United States Patent Application Publication US 2024/0301345 A1 - sequence listing, part 2

SEQ ID NO: 70 - DNA, 6461 bp, Unknown
  R206_24m  MAG No. k141_3967
aatccctgatgcttggttttgcttaatagcgaggaggattatgacgaacgatattgagcggcatagtccggatgagtggcggaagactgcggtggcgttaatgccggaaagcgtagctgtgggcgccggggaaacgacggcgaaggtgaatgcgaatggggcacctttgctgggggattctcgcgacctgttccgacccaagacctcggatattcccgccaaacccggtgtgtacaaatggcgcgacggggaagggcgcgtcatttatgtgggcaaggcgaagaacctgcgcaacaggctcaccaattatttccagccgctgtatctgctgcatccgcgcacgcagaccatggtgctgaccgcacgcagtctggagtggacggttgtcgccaccgaactggaatcactgacgttggaatacacgtggatcaaggaattcgacccacggttcaacgtgcagttccgcgacgacaagacctatccgtatctcgcggtcagcacgggggagcgaattccgcgcgtgtgggtcacgcggtcgcgcaaacggcgggatacccggtatttcggcccctatgccaaagtgtgggaattgcggcacagtcttgaccggttgctgcgcacgttcccggtacgcacctgcaccaccaacgtattccacaaggcgcaactgaccggacggccatgtctgttcgcctccatcggcaaatgctccgcaccctgcgtgaaccgtatcgaagcggacgaacaccggcggctgtgcgaacagctggtcggcgtgatgaccggacgactcggacggccatacatcgcccagttgacccgcgacatgaaagaggccagcgccgaactcgaattcgagaaagccgcccgactgcgcgaccagatccaaatgctggaaaccgtggtgcaacagaacgccgtcgtcttcgaccaggatgtggacgcggacgtgttcggcttcgccagcgacgagctcgaagcctcggtgcacgccttttatgtgcgcgccggctctattcgcggcgaacgcaactggagcgtcgaacgagttgaggacatcgatgacgccgacttgatggccgactttctggtgcaggtgtattcggacgccgccggggacaatcacccccagtcggccgcgaccatctccaccaatcgcgaggccatcggctccacacagaccatcacggccacggacgctgtggcacgcgcccaggccacccgagaacgcaacacccgtcaggagaccaccggacgcgcggacctgctggcacccatcgcaccggtaccgcgcgaaatcatcgtgcccgtcgaaccggcccgccgcgaggaactcgaaggctggctgaccaatctgcgcgggggcgcggtgaccatccgcgtggcctcgcgaggcgacaagaagcagcttatggaccgcgccaacgagaacgccagccaagcactgcaacgcagcaagatgagccgcatctccgacatgggcgcacgcacccaggccatgaacgatgtggccaaggcattgggactcgcgcaagccccgctgcgcatcgaatgctacgacatttcgaacactgtgggcggtgccttccaagtggcctccatggtggtgttcgaagacgcgatcgccaagaaatccgaataccgacgcttcgccgtccgaggcaaggacggcaaaggcgcggtggatgatctgtccgcgctttacgagacgctcacccgccgcttcaggcacggcaacatcgccggcgactccggcgaaagcatcgacgcggaacagcgcgcggcctcggccgccggcaagatgaccactgccgtggcggcggagacaatcgttgcgaacggtaacgacaatggtgagggcggttccgacatcagtggcagggggcacgcggtgccggtcggagtgcagaacgatgcacgggagtcctcgcccgacatcgtccagcagaacacaaaccggcatcactttgcctacacgccgaacctggtggtggtcgacggcggtaagccacaggtcatggccgccgccaaggcgcttgaggactgtggcgtgatcgacgtggccgtctgcggactggccaaacgcttggaagaggtgtgggtgccggacgacgactatccgatcatcctcaaacgccagtccgaaggcatgtatctgctgcagcgtgtacgcgacgaatcccaccgcttcgccatcacctaccaccgccaacagcggcgcaaaggcgccctgcgcagcgcgctcgacgagattcccggcatcggcgaaagctaccagaagcggctgctcaaccacttcggctcggtcaaagccatgcgcgaagccagtgtcgaggacttcgagaaggtcaaaggcatcggccacgccaaagccaaagcgctgtacaacgcgctgcacgagcagtgagccggcccggtccagcagcccagagtgaattttcggttgcggggcctgtggttgacatattcgaagcaaagtgtcggctagcatggaaacagacatcaaggaggggatatggccaatcatcgttgcgctgtactcggcaaacccgtcgcgcactcattgtcacccgtgctccacaacgcggcttatcgttcgctgaaactcgacgattggctgtacgacaagcacgaggtgggggaagacgacctcgacgctttcctcaaaggccttggctcgacgtgggctggcctgagcctgaccatgccgttgaagaagaccatccaaccgtacggtgttccggaaaatctgtgggccaaggaactgaaggtggcgaataccgcggtattcgactggagtgtggctaccgatgatcccgcttggccgaacggcaagccgggcatcaagctgtacaacaccgatgtcatcggcatccaactcgccttcgaccacgccaatcgcgaactcggcgaacaccacaccgcatcgagaagcggcgccgcgctgatcctcggcaatggcaacaccgccacttcggcgttggccgcatgctgcatgatgcccgaaatcggccatatcatcgtcgccgcccgccaccctgggaaaaacaccgggcttaaaccagtggccgaaaagttcgtcaacgtgcataacccgtacagcgaaatcgaattaggcgacgatcaggccctgctcgaggcagcccgcaacgccacctatgtcatcaacacgattcccggacatgcggccgacaacgtcgcggatgccctcaccaatgccggaaccgagccattctccggactgctgctggacgtggtctacgatccacgctccaccaagctcatggaagcctggcgcgctcatggcggtcacgccatcggcggcgaagaaatgctgctgtaccaagctctcgtacaggtattgctgatgaccggtatctgggatgacgacccgcccagcgatgccgaccagcgtctgcaggacaccaccaccgaagacgaccagctggagatcgcgatgcgcaaagctcttgaggaggcgttgtaatgagtcaacagacaacaatccgcgataccggcgaggcggccgccacgaatgcgccggcgaattccgcgacatccacatcgactccggacaaccagccgaccccgcttgatgccttcgaggtgctgctcatcaccggtatgtccggcgcaggccgctctcatgccgctgactgcgtggaagacatgggatggtatgtggtcgacaacctgcctcccaaactgcttatcccgcttgtcgacatgatgaccacctccggttccggatcggggtcgggcgtccacaagcttgccgccgtcatcgacgtgcgctccagctatttcgacgagctggccgccgtgctcggccatctggatgatctcggcgtcaaaacccatattctgttcctcgacgccagcaacgaagtgctcatcaagcgctatgaatccgtgcgccgcccgcacccgctgcagcacggcaaccgactgatcgacggcatccttgaggaacgtcacctgctggaagacctcaaggagcgagccgactgggtcattgacaccagctccctgagcatccaccagctgtccaccaaactctacgagacgatgctcggttccggccccaccaccgtggcggtacacatcttcagcttcggcttcaaatacggcatgcccatcgacgccgatttcgtggccgatgtgcgttttctgcccaacccgttctgggttcccaacctgcgcgagcttaccgggcacgacaagccggtcgccgactacgtgctttccagcaagggagccaaggaatttctcgacgcttatgagaaagctatcgagattgcgttggaaggatacgcccaggaagacaagcactatgtaaccatcgccgtcggctgcaccggtggtcagcaccggtcggtggcgatgagcgaagagctggctcgccgcttacgcgcacatgggctcaacgtaaccgtttccgcgagagaacagcataagcgtcactcatcgtaagcaggcgtcgagcggtcatcgggcaagcgttcggtgaccacactgcgagaaagcaaagcccataatacgtatcaaacgggttcgcttgtccaccagattaggtatcacagaaagccgatggcttccgaccgtatgacagcagataacggcacgaagcgcctgaagcattgagaagaacgggactgtaggaggtagatcttggctcttctggacgatgtcaaaagcgagttggcggcctttgaaggcgattcgccagccgcgatcaaggcccaagctgcggccatgatccgttttggcggcggtcttcgaccggtacagaatacatacgttatccaagccgtattcacctcgcttgacgttgcagaatggctgaagaacacgttgaggaacacgttcgggcatgaagccgaggtcaaccacctcacccgtcagaccccgaacggccctgtcgagacctacgtggtgctcgtcacccgcaacgtagtggccttggctttgcagaccggactggtcgaccgccgcaagcagcaggtccgtggactgccgtctgaagtggtcaacggatccatcgcccaaatcaaagcagcatggcgcggcgccttcatggcccgtggcttcctatccgatcccggtaaggccagcttcctggaaatcgcttgccccacggaagaggccgccatggccctgtgtggcgtggcccgtcgtctcggcatccaggccaagcatcgcacgctgcgcagctccgagcgcgtgaccctcaaggatcccgacgccatcgaacgcatgctcaagctcatgggcgccacccgttcggcccgcgaatggaccggcaagcgctccgacggcgaggcccgcggcaaggccaaccgtctggccaacttcgatgacgccaatatgcgccgttccgccaaggctgccgccgaagccagcgaaaaagtgcagcatgccttcgaagtgctcggcgataacattccggacaacctccgtcaggccggccagctgcgcatcgatcacgtggacaagagcctcgaggagcttggcaagatcgccgaaccgcaaatcaccaaggatgcgattgccggccgaattcgccgactgcttcagcttgccgagaaaacggagaaggctcgcgcagccgaaggcaagtaacccgacaacgacgtaacgaaacaccgcattcagtcagtaggcgaatgcggtgttttgttccggaatgcctgtaatatgcaaagtggcaaaattggccactttgacgtgcgattcgtcaaggaaaggatattcatgaagacactcaaggaccttggagatctcaagggcaagcgcgttttggttcgcgctgatttcaatgttccgctggacggcaccaccatcaccgatgacggtcgaatcaaggctgctctgccgaccatcaagaccctgcgcgaagaaggcgccaaggtcatcctcatggcccaccttggccgcccgaagggcaaggtcgttcctgagctgagcctggccccggttgccgcccgcctcggcgagctgctcggcaccaacgtgccgctggccaaggacacctacggcgaggacgctcaggccaaggtcgccgccatgaacgatggcgatgttgtgctgcttgagaacgttcgcttcaacccggaggagacctctaaggacgccgacgaacgcgccgcttacgccaagaagatcgccgccctcggcgaggccttcgtttccgatggcttcggcgtggtccaccgcgcccagggctccaactacgacgttgccgccgatctgccggccgccgcaggcctgctggtcgagaaggaagtcaaggccttgtccaaggccaccgagaacccggagcgtccgttcaccgtggtgctcggcggttccaaggtctccgacaagctcggcgtcatcgagaacctgctcgacaaggccaaccgtctggtcatcggcggcggcatggtgttcaccttcctcaaggccaagggctacgaggt

SEQ ID NO: 71 - DNA, 15879 bp, Unknown
  R206_24m  MAG No. k141_4147
ccacgatcagtctggatgcgcagaccaagcgtgacggcatcgccatacttgacgccatggggttgaacctgagcacgtttgccgaaatgtctctcagacaattggtacgcgacgggcgtctgccattcacgccaagcgtccgcccttcattcgaaaaagacaacgagggatatcccctgttcaaagcgaacatggatgatccccgcatcgtgacgccccagatacgtgatggtgccgtgatcctgccggagggttgggacgatgatgaagactgatccgcgccagttcgagatatggtgggtgccgttcgcttttcccgacaagccaggcaaagcgaagaaccgtcccagcgtgatcctccaatgggacgacggcacccgcatcgccttggtgaccaaggtcaccggcaacacctggcgcgacgaaccgggctatgtggtgctgcgtgactggcaggacgcgggactgagcaagcccagcgccgtgcgatgctcgcaactgctgcggctgccaagcaatcttttcctcgacgacggcccgacaggaagactttcggcatatgatgccggccgcgtcgcctgggcgatcaacgaactctatccgggcctactagcctgagagcaaccgataccgtcaccatccctgtcgaggtgcttgccgcagcacgggtcaccgacgtcactcttgtcaagtttggcgtgatgggctgttgtcgcgggcgaatcgttccccgctaaccgctaatgcagtccgaaccagccgctgcctcctgcctcccgataaaaatgaattcgtcaaattctttcgggcagcgaatgcagatacatgtatagagcatctgtactattttcaagaatgctcattgtctgcggcaacggttcggcatacacagttttataatccacctcatcgtactctttccgaatggggaaagccaaacgttcatcgtcaacagaaaagtctgcttgtacaccctctttattccctcttgcatctacacgaatccatcggtcaatggatctcagataagtggcattcaaggcatggatgcagtacccgctttcaggcgtactgcctaacgtaagcctttgatagcatattccagcaggaatgccatttgctcttaatagggcggccaataaattagattttgcccaacaaataccgacaccctcccttaatgcgtctgaggctgttgccgtgactcttttgtcttggacatcccatgaatgcttgatttcatctctaacaaaatagtaggcggcttttgccagttcgatttcgccttcagtggagtcttttagttccttggcttttctttgcacactcggttcattccaatcgatatagtgcgaaaaggcaaggtagctactgatatcatcttgaatatccaacatataacacctccgagaatcccgattcgtcgctctcttactttttaccccgttgcgaggttggttgtttcagcaagtccgacatagcggcttctcaccatgctatctcattttcgtgcagaccgatctgccaaaacaacgacgaccagattggccagcaccatgacaacaagcgtggccaccaacgcaatcaatgcctccgatgccatgttattgaagctcttctccatggccccgccaatgatgatttcaagggcgatgaggaacagggcacatgcatcaacgaggaatatcggagcgtactgcttgtgaatccgattccatgtgtcttcggatgacattgttgccggcgttttgatgtctaccgaattctgcaaaggcaacgttccgttctttgcatcacgataggccccgaccaaaaacacgccgacgaccacggccacaactacttcgacgataagcatgcgtcaaggatatttctctccccctagactagtaatggtttgaatcccgcctgcccaccgatggcaggtcgattacgcgaggtgaccatatggctccagtggagcgtcatatcgaggaagcgctgtatcgcagtgccgtggaactgatcgagcgaaggtatccgacaggatggggaggcgcggcggcgatgcgactcgccggcaaagacaacggtaaacatgacggaagcaacggctcggaggcacttatcgtcacgagcgtggcgattgagacacccaatgccgccgcttcgctatgcatcgaggtcggagcgatgtgcgaggcgatgaagcttgatcgccgtgtcacccacaccatctgcgtcgtacgcgatgacgaacacgccccgttcaccgtgttgtctccatgcggcatctgtcaggaacggctgcgctattggggcgacgacgtgatgtgcgccgtttcagacaacaatcagggagagcatccgttgttcgtgccgctgcgcgacctgcagccgcaccattggactcaggtgtatccactcgccgaattggaacactacgagcgataagccgccctcgattgaaatccctacctccctaagctatgcagtaggctccgcccgcaagtcacactggtacaattttcaggtttgagactgtagcaagttgagtcgctttatcagtaagtctgtatttggaggtatcgatggcccatcgtccgcttatcggcgtggtcccgttgtgggacgacaaattgaacagcctgtggatgctgcccggctatttcgacggcatcatcgaagccggcggcatcccggtgatgctgccgctgaccgacgaagagactacaatcgaacagctggtcagccaatgcgatgggttcctggtcaccggcggccacgacgtggatccggaacggtatggcgaggcggccggccccaagacggtcaaactatgcaaggcccgcgaccggatggaggagcgtctgatcccctccgtcatcgcggcggacaagccattgctgggcatctgccgcggcatccagagcctcaacgtcgccttgggtggcacgttgtggcaggatctgccggacgagcatcccagcccggtcgtgcatcatggcgacaagccgccgtatgacccggtggtccacgaagtgtcgatcgcgcccgattcgccgttggcccgcgcgttgtggccgctgggagacaatggcccgagtgaggcggaggccgatgaggtcgattccttcggcaggccgtatcatccgcgcgcctatacgctgggcgtcaacagttatcaccatcaggcgattcgcacgctgggccagggactggaaccgatggccactgcgccggacagcatcgtggaggcggtctggatgccggccaagcgtttcgtctgggccgtccaatggcatcctgagttctctcaccgcgccgatagcaaccaacgtcgcatcctcagcgccttcatcgacgcctgctgacgcaagctcccgccaatctcgacgaaacgtcttccaagaaatggcttgcccgcatccgcagccccctaccacgacatgagcgcccttgacaacgtcaccctcggcatgcgcttcacccgtgacagcaaacaggtcaggcagcgcaaggccaaggccatgctctcccggctcggactcggccatgtcgcgggagacaagatcatgaccctctccggcggtgaacagcagcgcgtcgccctcgcacgatgcatattgaagcccggggatttgatcctcgccgacgagcccaccggcgcgctcgaccgcgatctcgcccaacatgtcttcgacgaaatgctccgcctccagcacgaatacggcaagaccctcatcatcgtcacccacgatcttggcatcgccgcacaatgcgacaacaccatcgagctacaggcggtttgacggagatattccggcagctttggtctaccgaagtcacgtgttgcccttcaatctcctcggaaatctaggtggcccatttttcaaagaatgcgatcggacgtaacgccccgtaaggagacctgcaatatgaaacgttgaatcgtcatctaaagatgacgttttcgtagatcttccggaatcgccagtcatctgcgatccggatatggcaccggtccggctcgatcgagcccggacgaccatggagaaaacgaacgatcgaatccgaacgcgggtaaagagcctgcgcgacaccattgataaagccaaatttaagaaaacagatcagtatgcataagttttacatgccttcagcctcgtcaaccggcagcgggccccagaatccagtcacagccaggcagagcgtacaacatactgcgtagtacatggcgcgaatcccaatgaccaccatcgattgatgacggccacgaatactcgtactcagccttactgctttggctcatttctgttcacttcacgctggagtaccgagacacgttgagcggaaataccggtaattcacgtacggttaccgaccattggcctgaacggtactcagcatccgcagtcacttggggtatggtcatgacggagagccatcatgaccgatctctcattattctgggatgaatccggcgaggctggaactgaatctaaatattaaaacgcatgatgcacacgttgcggaattagtccaccagaacttcggcatgctcggcaggttcagcgggttcgatgtgacgggcacgcatggcatcgagggcggcggccaggtcggccgggtactgggaccggaccgtggtccagacgcgggtgcgaggatggcggaattcgagcttcatggcgtgcagccactgccggtcaagtcccaaagcttcagacagcaccggattggcaccatacatagggtcgccgcacagaggatgcccaatcgaggagaaatgcacgcgaatctgatgggtacgtccggtctccagattcacggataccagtgtggcctcatggccgaaacgctccaacacatcccaatgcgtaacggccggtttgccggccggagtcacgcagaagcggaaatcggacactttggcgcgcccgatcggtgcctcaatggtcgctttgttctctttaagaccgccctgcacgagcgcatgataggttttctttacctcatgctcggcgaactgccgacgcatctcggtgtacgcaaggtcggacttgcacaccaacatcaagccggaagtgcctacatcaaggcgagaaacaatgccttcacgcccggccgcgccataggaagcgatatgcacgccacgatcacgcaacgatcccaataccgtgggaccggtccagccaaccgaggcatgcgccgccacgcctacaggcttatcgactacgacgacatcatcatcttcgtagacaacagccatatcagttgcgataggctcaggcccggcctgttcctccgccaaatcaaattcgacggtctcccccgcctgcaacgtgctggaccgcgcaacttcacgccctaaaacgcgcgcctgtccggagtcaaccagatcggcggctttagatcgtgaaatacccagcattttggccacggctacgtcgaaacgcttacccaccaatgcatcgggagcagggaccattcgactcattacttggcgtccgcctccggctcagactgtagggattcgtcggattgctcgataagatccttgtgggagaacggctcccccataagaatcagaatcaccaggaccacaccggcgactaccagatagatatccgccacattgccaacggaccagccatagttaaggaaatccaccactttgccgttgaggaagccgtcagcgtacataacacggtcaatcaggttgcccagagcgcctgcaaacgcgaaagaaagcgccaccgaccatttcatggagatagtgcgcaccccagccacagcaagggccacgcaagccacaacggccaacagactgattacccaagtagcgcctgaccccatgcccaaggacgcgcccggattacgcaccaaggtgaaggacagcagtccgggaatcacgcgaatggtctgaccgttggataacgcggccatcgcccaagccttggtgagctgatcgacaatcagcgcagccgcggccacacatgcaaagacggccacgcgagtgcgcagccgtccctgttggttcgtcatacgacctgtacctgcctgcgctcagttggtcttggacgaggtctggtcgacgtagttgttcgactcggaaacctgcgatgccagctggccgaggtactcggtgaggcgggcgcggtattcagtctcgaactgcttgaggctctggatgttgccctcgacgaccttggactgagcctgaaggttgtcgcgcacctgctcggcatacgtatcggctgcagagcgggtgttcttgtcgtacgcatcagctgcggaacgagtgttcttgtcatactcggcggcacgctgctgcacttccttctcgtagttgtcagcgtcatcgtgctgagacttggagtagttgtccgcatcctgacgagtcttgacggagtatgcgtcggcctcagaacgggtgttctgggagtaggtctcggcatccgcgtgaatctggtcacggtaagcgtcggcctcggagcgggtacgatccgaataggtgtcggcgtcggaacgagtacgagtggagtagtcgtcggcctcggagcgggtacgctcggagtagttgttggccttggtgaccaaatcgttgtacttgttctggctggcctcggtgatttccttggccttgttcttgcccttctccacgtactgatcgtgcagctgcatagccagggtcagcatggcggtggcgcgctcgggctcggtgcccggcatggaagcgacgccagcgatcttctgcagagaaccggtctcagtgctcggctcgaccttggaaacctgggcacgaagctggttttcacgctgcttggcttcttcgagctgacgagacagttcagcgatctgagcggactgctgctgagcggcggaaccctcctgctgagcagcggcgagctgacgggacagctcctcgttggccgcgcggaactgatcacgttcctgctgaatggcggcgatctgctggccgacggcttcctggttaccggaggcctgagcggcctgggcggtgagctgatcgatttgagcgttcagctgatcgacctgacccttgagctgctcattctgggaggacagcgcgcggttggattcctcggcttcgctgagcttggcagaggcaagctgtgccgcctgatcattgccagcctgagcggcctgctgggcctgagccacagcgttcttcaaaccagcattctccgactggagttgctgcacctgaccggtaagatcggagatcttcgcattaaggttggtcacgtcagggcccagagactgagtggcctgaccgccggctaccgcctgacgtccaagagcctcgacggtttccgtgacctgatcaaggaagtcatcgacctcgtcgacatcataaccttccttgaatcgaacagtctggaaggtatgctccctaatatccttcggcgtcaacagagccataaatcttgcacctcgctttggggcattgcccgcacttacgttggtctcaagtcagaatgctatcacgaccccatcgtttcagaacattcaacgtgggtttttatgccagatatatgcctccggcgggtcaaaaacggcctcagaacactatcagaacaacactttctagtaccaccaacgcaaaatacagcacgatgaagctgacatcaagataaatcgagccgagcggcaatggacgaatatagcgacgtagccagcgcagagggggttcggtaatggaatacacaatgttgatcagctgggccaccacaccacgtggataccagtttcgtgcgagaacggagacccagtccagaatcatgcgcacgaacagaaccgtgatatacgcgttgatgagccatgcaagaatgcggccgatcagagagaacactaaggaaagcatgctgacagactaacaaccgcgcatgaaaagtttgctcggagcgcaataagaatcggccgactccttgctgggagtcggccgaataccgatataacgtcgaatgcgaaaactactgaaccggtcagtcagcgaacaaatcgtgggacgaggttggttttgtcggctcttcgaccttgatgttcacctgcgccgggctcaacaggaacacgcgcggagtgacacgctcgagggaaccacgcacgccgaacaccacgccggcggagaagtccacaatgcgatatgccacggcttcggccacaccggtgagattcagtacgaccggaacaccgtcacgcaatgcgcgaccgaccagctgagcatcctcatatgacttcggatggatggtggtgattctgttcacacggccaccggggaacggcttggtagtcgacgatgcggcaggcgcggtggttgacgccagcggcgtgaccgtatggtcggaatcaaatgcggacttcgaagccggcttctgctcctcgtcctcctcgatgtagtcgtcctcatcgtccacaacgtcactcatgcccagataggacatcgcgtttttcatgaacccagccatggatcaatcctttcagcgcaggaagtcagggatgtcgagatcgccagccggatcgttcacggcgatattcggatgagcggaagtcggatcatcaaaaggcaacgatgcggagtcaccgatagccggtgtgaatgccggttgggcagtggcagcgggctgtgcagccggtgccggtgctggagctggctgtgccacgggagtcgcaggatcggcggcggttggcacaaccggcgtcaccgtgctctgagtgtcgtcatcttgagcggcgacggggtcaaaaccagcagcaataacagtgacacgcacttcatcgccataagcatcgtccagagcaagaccccaaataatctgggcttcagggtgaatcgccttgcgcaccagttcggtggcagcagaggcctcctgcaacttcaggtcggtcggaccggcgatgttgatcagcgcaccgtgtgcgccttcgatgctttcctcaagcagcggagagctgatggcgatttcggcggcctgcgtggcacgatcctctccccgtgcggaaccgataccaaacagcgcagtaccagcaccacgaagaatggagttcacatcgttgaagtcgacgtgaatataggagttcatcgaaatcaggtcagtgatgccctgaacaccggcaagcagtgcggtatcagcggtcttgaaggcctcaatgatgccgatggaacggtcggaaagctcgagcaggcgatcgttcggaatgacgatcagcgcgtcgacttccttgcgcaggttgtcgatgccgtattcggcggaagcggaacgctgagggccttcgaagctgaacggacgagtaacaaccgcgatggtgagagcaccctgttgatgagccgcacgagcgacgatcgggctggcgccagtaccggtgccaccgccctcgccgcaggtgacgaacaccatgtcggcacccctaagcgcctcttcgatatccgactggtggtcctgggccgccttggctccacgctccgggtcggcaccagcaccgagaccacgactggacttatcggaaagggaaatcttgacatccgcatcagagcgcagaagatccttcgcatcggtatttaccgccacaaattcaacattctgcagtccctcggcaatcatgcgattgacggcattaccgccggcaccgccgacgccaacaaccttgatgttggtcttgtcgttgaactcattctgcgcgatctcgctcacgtttggctcctgtcacttcacggttacacccaagagtagcgcaaacaggctactcttggagggaaattcacgcgcagaatggcgcgtgttgcgtgtattttcagtattttctcagtaactggcgtccattgggtcgtcaccgaagagcgcctcacgctcttcgtgggtggtggtacgcgattccaaccacccatacggcaagtgcaccttcttggcgaaacgcacgcggccgcgcggtttgtcgaccacgcgtggcgggtattcgatggtcgggtcgagcttgccgatctcgcggtccacatcggccaggctctcgcattccataaaggccttgcgggtggacccacccaccgggaaccctttcagataccaggcgatgtgcttgcgcagatcgtggacggccatcatctcatcgccctcatagaactcggtaagcagctcggcatgacggtgaatcacccggcagacctcgcccagattcgggttgagccgttcgggattgccctcgaaggcgtttttgatgttggcgaacagccacggccggccctgacatccgcggccgatggccacgccgtcgcagccggtctcgcgcaccatttcgagcgcgtcctcggcgccccagatatcgccattgccgaataccggaatgttgaggtgttccttgagctcgccgatgcgggaccagtcggaatgaccgccatagtattcggcggtggtgcgggcatgcagggttacggccttgcagccctcctcctgcgcgatgtgtccggcttcgaggaaggtctcatggttatggtcgatgccaacgcggatcttcgaggtgacggggatgcccgccggctcgcatacggcgaccacgcgctggatgagctcggtgaagatgtcggttttccatggcagggccgagcctcccccgcgacgggtgaccttgggtaccgggcaaccgaagttcaggtccacatggtcggccatgttgccgtcgaccacgattttcgccgcctgttcggtgatggacggattcacgccatacaactgcagcgaacgaattttttcgcttttggcgaaatggcagagacgcagggctttcgggttgcgcgccacgagggcccgcgcggtgatcatctcggccacgtaaagaccatcgggaccgtattcctcgcagatcacgcggaacggccagttggtcacgcccgccatcggcgaaagcaccaccggggtcggcacggtaatgttgccgagctgcacgggggcgatgtataccggagtctcgggccgtgccggcgcgtccgtacgcgggtcgagattgttggtctcgtgagtagcggtgatggtggtttcggtttcagattctgccatgtggttcctgttctgaaatagttttggctcccctcagtccacttcgtagacagctcccctcatagaggggagcctctatacagacccgtctttagtacagaccgccggcttcctgaacgccggactcaggccaagcctcgccgcccatttccacgggcttcaggggcacgcgggtgcgcttctcgccgatgcgggcggccacgtaatcggccaccttgtcaagagcgacgcgctcctgggccatggtgtcacgctcacggatggtcacggcgtggtcctcgagggtgtcgaagtccacggtgatgcacagcggggtgccgatctcgtcctgacgacggtaacgacgaccgatggcaccggactcgtcgtagtcgatcatccattcgttgaagcgcaggtcgtcggccaggttctgggccacggtctgcagttcaggcttcttgctcagcggcagcacggcggccttgaccggggccagacgcgggtcgagacgcagcacggtgcgcttgtcgacgccgcccttggtgttcggggcctcgtccacatcgtaggcgtccacgaggaagcacatcagggaacgggtcagaccggcggccggttcgatgacgtacggcacgtacttctcgccggtggcctggttgaagtagctcaggtcttcgccggagtgcttggagtgcgcgctcaaatcgtaatcggtacggttggcgatgccttcgagctcgccccagtcggaaccttggaagccgaacttgtattcgatgtccacggtgcgcttggagtagtgggagagcttctccttcgggtgctcgtagtggcgcaggttctctggcttgacgccgaggtcgatgtaccagcgggtgcgggcgtcgatccagtactggtgccattcctcatcggtgccgggcttgacgaagaactccatctccatctgctcgaactcacgggtgcggaagatgaagttgcccggggtgatctcgttacggaaggacttacccatgttggcgatgccgaacggcggcttggaacgggaggaggtcatcacgttcttgaagtcgacgaagatgccctgtgcagtctccggacgcaggtagtgcaggctgttctcgtcctcgaccgggccgaggtgggtgcgcagcatcatgttgaagtcgcgcggttcggtccactggccacgggtgccgcagttcgggcagacgatgtccttcatgccgttttccggcatcttgtcgccgtgcttctcggcgtaggattcctcgagcttgtcggcgcggttgcgcttgtggcagttgaggcactcgacgagcggatcgttgaacacgctcacgtggccggacgccacccacacttcgggcggcagaatgatggaggtgtcgacaccgacgacatcaggacgggtgacgaccatggagcgccaccattcacgcttgatattgtccttgagagcgacgccgagggggccgtaatcccaagcggaacgggtgccgccgtaaatttcgccggcggggaacacgaagccgcgacgcttcgcaagggatacgacttcatcgagtttggactgagccacaatgcaccttctggtttgaacggtttggggtctaataacaaccgcttcaggatagccgtatacggtgacaggtcaggcggcattgtccggtatatgttccgcgtctcacgagcggccgttcgcagcgattcctatatcgcaaacacctccatattgttcctgttgttttgcccttccccaatttgtaccactgacatcgcgttagcgtcacaaattcgggagatgttgctcggcggaggcgtccacatatcacgaatggacgggacgcgccagacctgacgacacgtatcgaacaaatccgtcacgataatgtccatgttggcgcatagcgtcggcactgtagtgcagggggactcgcatgtggttcgcgagttgagaaaggcctgagcctgacccttagaacctgttggttaagaccatcgtagggagcagtaaatgagcaatagtgcatcatcgtttgccgatgtgtccagcggttgtaccgccgggactccggttccagccgattcacccatccgcgacaatatcgccgatgccgttcgccgcgtacgcgagacgactccattggcccagtcattcaccaattttgtgaccatcaatttggtcgccaacgcgcaactggcggccggcggcactgcggccatgagtttcctgccggacgacgtgatcgaaaccgcgaaaatcgcgggcgcgaactacatcaacgtgggcacgctgctgccgttctataaggatgcgctgcccgaaatcgcccagcgactcaactacttggacaagccgtgggtgctcgacccggtggccgccggcatcggccacacccgcaccgccattcttcagaccttcaaggccgctcccccgaccatgattcgcgcgaacgcctccgaggtaatcgcgctggcgaacatgtgggggctcaataccgaaaccgtgggggacgcttccgagcaccgccccgccggagtggaatccgtcgacgacgtggagtccgcaaccggtgcggcggtggcgctggcacagtatctgaccgaacagcacgccaagcattcctcccatgacgcttccacccgctgtgcagtggctgtgtccggcatcgccgatctggtgaccgacggcgaaaccgtgtaccgactgccgggcggcagcgcgatgatgaccaagatcatcggtgcaggctgctcgctgggcggcgtggctgccacatatctggcggtttccgatccgttgaccgccgctctgtccgcatctctgctgtacaaccgcgcggcagagatagccgatacgacttcgcacgggccgggctcgttccaggtcgcgttccttgacgcgctgtggaatgttaccgccgaacaggtggcggaatccgagattttggtgcagtagtttcagttccctctgatgagggagctcataacagtttttcccaataagacttccacaagaaacaacaaaggtaggaataataatgagtaatgaatacccatacgcctccatgcgagacaacttcgacttgtccgcgtacttcgtggtggggccggaggactgcaaaggccgtccgctgaccgacgtggtggatcaggctctgcgcggcggcgcaaccttcatccaactgcgcgccaaggaggccgatgcctctgagctgaccgacatggcccgcgacatcgcgcagatcatcgaggacaatgagaagtccgattccgtggcctttgtgatcgacgaccgtgccgacgtggtgtggcaggcccgccgcaagggcatcaaggtggacggtgtgcatatcggccagaccgacatggagccgcgagaagcccgcgccctgctcggcgacgaggccatcgtgggtctgtcggctgagaccgaaagcctcgttcagctcatcaacgagctgcccgacggctgcatcgactacattggcgccggccctctgcacgtctccaccaccaagcccgaggcttccgtgggcggcaacgacggctccggcaagacactggacgccgcccagatcaacaccatctgcgctgccagcgaattcccggtggtcgtgggcggcggcgtgaccgcagccgatatggccatgctcgccggcaccaaggccgccggctggttcgcggtctccgccatcgcgggtgccgagaacccggaagaggccgcgcgcaccatggtcgaaggctggaaggccgtccgcggcgacaagaagcacggctacgcgccgcgcgtcgtagcccacacccccgctgctgatactcaggctgctcaggaaggggccgcaaagcctggctccgaggccactgagaagaagttcaccaacgccaaggacgccaaggatgcccagaagctcgccaagcagcagcgcgtggacatcgccgcccgtggttccaagcagcgcgacaaggcgcacatccgcaagaccaagtccgtaccgttcacctatcagtatggttcctacgacctggaagtgccgtacaccgaaatcaagctgagcgacacgcccggcgtgggcccgaacccgccgttccacgactacaacaccgaaggccccaagtgcgacccgaaggaaggtttgaagcccctgcgtctcgactggatccgcgaccgcggcgacatcgaagactacgagggccgccgccgcaaccttgaggatgatggtaagcgcgccatcaagcgcggccgcgccaccaaggaatggcgtggacgcaagcatgagccgatgcgcgccaaggaccacccgatcacccagatgtggtacgcccgccacggcatcatcaccccggagatgcagtacgtggccacccgcgagaactgcgatgtggagctcgtgcgctccgagctggccgccggccgcgcggtgatgccctgcaacatcaaccaccccgaggccgagccgatgattatcggatccgccttcctgcccaagctcaacgccaacatggtcaactcggccgtcacctcctccatcgacgaggaagtggagaagctgacgtgggccaccaagtggggtgccgataccgtgatggacctgtccaccggtaacgacatccacaccacccgtgagtggatcctgcgcaactcccccgtgccgatcggcaccgtgccgatgtatcaggccctcgaaaaggtcgaggatgatgcctccaagctgagctgggaactgttccgcgacaccgtgatcgaacagtgcgagcagggtgtggattacatgaccatccacgccggcgtgctgctgcgttacgtgccgctgaccgccaaccgtgtgaccggcatcgtctc

SEQ ID NO: 72 - DNA, 8304 bp, Unknown
  R206_24m  MAG No. k141_5059
ctgcccgccaccgtggaaatgaccacgccgaacgtgttcgccgacgaagtggagtacgtctccacccacctcgacgaccgtgactccgtagtgctctccctccacccgcacaacgacgaaggcatgggcgtggccgccaccgagctggccgtgctggccggcgccgaccgcgtggaaggctgcctgctgggcaacggtgagcgcaccggcaacgttgacctggtcacgctgggcctcaactggctcacccagggcatcgacccgcagctcgacctgtccaacgtacctgagatccgcaagacggttgagtactgcaaccagatcaagatctccgagcgccatccgtacgccggcaacttcgtgttcaccgcgttctctggctcgcatcaggacgccagcaagaagggtctcgaggctcgtcaggtggccgccgagcgcgctggcgccgatctcgacagcttcgtgtggcttgtgccgtacctgccgatcgacccgaaggacatcggccgcacgtacgaggccatcattcgcgtcaactcgcagtccggcaagggcggcatggcctacctgctcaagaccaaccacaatcttgacctgcccaagcgtctgcagattgaattcgacaagatcgtgcaggactacgctgacacgaccaagaaggaagtcaaggacgaggatatctggcgtctgttcaaggacgagtacctgccgatcgaacagtccggcatgaccgccgccggtgtggttgtgggcgatactcatgacgcctcgctcgcgccgtggggccgcttgaagctgctcaaggtggccgtcagctccggtgaggatggctccgataccgtgctcaaggctcgcctgctcgaccgcggcgtgaacgtcggggtcgatgcgcccgtggagcgcgaggtctccggcatcggcaacggtccgatcgccgccttcctcaacgccatttccaactttggcgttgacgcctcgattatggattacgtggagcacaccatgtccgtcggcaccgacgccatggccgcctcgtacgtggaatgccaggtcggcgaggccgatgatgcgcagatcgtgtggggcgtcggcatcgattcgtcgatcaccaccagcgctctgaagtcgattatctctgccatcaaccgttcccagcgcaagcgctgagcgctaacaacaaaacaaagctccctctgattgcatcagagggagctttgttgtctgtgcttacttactactgggtgacgccgttggtgccggtgttcccgccggtgcctccggaattaccattatcgttgccggtattgttcccgttgttcccgccggtattgccgggattgttgccattgttgccatctccgccggtagtggtgccgggataattcggacactcggtggaatagctcggattggcgaggcactgctgggcgaactcctgggcctgctgttgcttcttggcttcctcttcggccgccttctgctgtgcgtcctgctcagcctgcttctgcgcgtcttcggtggactgcttgttggtgttgttggacaggccgctgctctgtcccttgcccaagccccaagtgccgtcgggtccaccgatcttgccattgtctttagcggtcgggaactgctccacctcggtaccttgcaaggcctgagccatgaactcctggaacaggtgggcggggtatccagtggaagagatgccgtatccggagaaggccggcaccgcctgcggattgcccttatcgtccgggttccagatagcccacacattcatcatgctgggggtgtatcccacgaacgacgaagccatttcgtcgttggcggtaccggacttgccggcgatgggtcggcccagcatgttggatatgccggccgccgtaccgtacgtggtggtgccctgcatggccttctgcaccaaagcgcagtcgttggcatcgaacaccttggtgcctttgctgggcgcgttgtacatgtccttattgttggaatcaagcactttggacaccatgtgcaaggtgctcttcacaccattgttggcgatggtcgaatggccttgcgccaaatcccacacggtcagggcgttgatgcccagcacgttgtacatggagttttcatcgatatcgccctgaatgcccgcttcatgggcgattgcggccgtgcgcttcggcgtcagatgctcattgacgttcatgaacaccgtgttcaccgagttggcggtggcctgatacagattgatgttgccccagttgttctccagagcgttattcacctcttgatccaagccggtgaagtgctggtgggaattgccgttgaacaacgtatcgaagctgacgccggattgcgcggcccccagcaaagcgaacggcttcatagtcgaacccggttcgaatacggcctgatcggcattgttgagctgcttggacagataatctgaaccggcgtatacggacaatacttcaccggtcttcgggtccagcgctatgccgccgatttgcagggattcaggcatgtcgtccagacgggtgtcgccgatggactgcataaggtcctgcttgctcttgtcgatggtggtgatgatcttgtatccgccggtatccaaatcctctttggtaaaggccttggactgcaccagctcacggcgcaccatatccagcagataaccgttcggccccgcgtattcgttttgctgcgccaccgcggcagtctgcgggaacttggcatcagtgtgctgcttggcagtgatgtaaccatcctcctgcatgatgttcagcacacgcttgaagcgcgatttggccatatcggcgttatcggccggatcccacgtggacggtgacggaataatgccggcgatcatcgccgcttcagacagcgtcagatccttggcgtccttattgaagtatgccttggccgctgcctggatgccgtaggagttgcggcccagatagatggtgttcatgtaattgcacagcacctcgtccttggactcggtttgcgcgattttgatggccacgatggcctcgcgcgccttgcccgcataggatgtggtttcgcccatgtaataccgctcggcatactgctgggtgatggtggaaccaccttggcgcgtgcccttggtcacattattaatgaatgcgcgggcgatgcccttcagatcaagacctttatccgtgtagaacgtacggttttcggacgccacaatcgcgttgccgatgtagtccggcagcccctcgcaagagatgattgaacgattctgttccgcgtaggagccgatcgcggtggtgccgtccgcgtaatacacggtggttttctcggccaacgcgaacttttcgggttgcgggacctcggtggtggtgtacaggtatgcgaatactgcgataccggccagcaagcccagtccaatcagggagaagaagatgcccagcacccatttcagtacacggtgcttgccttttcctgtgttctttttcttcctgttcggggctcgatggctattggaagccttgtggcttgcgtggcgggaacggctctcctggggcgtataggggccctcctgtgcggagtggtcggctctgctttgcgcggtgcgcggttgcctcagagcggggccattgcctcccgaatgtgcacgacgagtataagaagccatggtgtccaccgtaactgttggccttgaacaatcgtttgacgtgagcgtaaccacacgcatttatgccggtatttttccggaattcttacaattgggcacgttccttgatgctgcatgaatattgcctgaatgcgctggttggcctgccgtgcgacccggcgcgcacgtttcgtgtcgctgcgctggtccatacgtctccatagacttatcccagcctccacgcggcgctatgtcacccaactcccccagggcaggaatgcagcaagggtaagtggcctctgacgggtgcgtggaggttttccatttgtgcggatttggccgtgagctggcacgagcacggctccctgtccggggcgcggccgtacagtcgaacgtatgaatgacgcacagacccctagaattcgcgacccgcatgcggcggtcaatctggtcggctcaggcgcagcgcagcctgactcgtcgtcgaacgttgttgacccattggctgcgctcggcccggtctccggttcagatgcatcggcatccacatcaggctccttaggggatttcaggccgctgggcatggacgatgcggatggggcatctgatatcgaccgtggcttggcccggcttgacccgcttaccgtgcgcccgcgaatctccagccgcgtactgtgcgtggtattcggtctgctcctgatcgctattggcttcggcgtgtggtgggggtgcgtgtttaccgaaaacggacaatcgtacgacgaactggtctggaaaaacctgcacaacgatgtaccgtcctggaccaccggcatgatgaacgccgtcgcacaatcctggctggttatcgctgtcagctgcacaattgccgcaatcggcattattacggcgctgattcgacgccgctggtggttggccgggcaaatcgccgtgttcgccgtggtctgcttggccgtcacccgtatcaagggtctgttgccgcgtccgttcatcatcaacactgaatcgcctgccgctaattccgcgccttccggacacacgatgctggccgcagcctgtgcggtgattctgctgcttaccgtgcctcgcgcggttcgagctttggcgggcgtcatcggcgtggtttgggcggcgaccgtcggtgtctctgtgatatacgggcaatggcatcgcccctcggatgtggcgatgtccatcctgctggtggcgggattggccctgctcgctctggcggttacacgcaagtccggcatggacgagccgggccaccgcgtctcctcagtgagtgtgcagatcgtcggcagcgtgctgattaccgggggcctgctgttgctcgcctacagcggttatgtgatctggcaggtggtgccgggactcaatgtcagcgccagttgggcggttcagggggcgaatgtcagcgctgttgtgggcattacgggtgtggccatgctcgcattcggactgttgctggccctacgtcagatcactgcagcgcccttaagcaggctgggcctgatcggcgctccgccggcaccgcccaaacggtaaaacacgaggtgcgaacggccgaatttgcccggcacaacggcggaatttggcagttggatatgattcatgagtattatgacgccagaaacgtcgtgtgtttcgcgcaatacataaggagtgggtatggctaccaaactggtgattgtggagtctccgaccaaggcccacaagatcggtgactacctgggcaaggggtacaccgtcatggcgtcggtcggtcatatccgcgacctcgcgcagcccagccaggtgcccgcggcagacaaggccaagttcggcaagttcggcgtggacgtcaacgacgggttcaagccgtattacatcgtcgacggcgacaagaagcgtacggtcagcgaactcaaatcggccctgaagaacgccgacgaactctatctggcgactgatgaggatcgcgagggcgaggccatcgcgtggcacttggtgcagaccttgaaacccaaggtgccggtcaagcgcatggtgttccacgagatcaccaagaacgccatcaacgcctccctgaacaacacgcgcgacgtggacggcaatatggtcgacgcacaggagacccgccgcatcctcgaccgtctgtacggctatgagctgtcgccggtgctgtggcgcaaggtgggcccgggcctgtccgccggccgcgtgcagtccgtggccacccgcctgatcgtggaacgcgaacgcgaacgcatggcattcaagcgtgtgccgtactgggatatcgtcgccatgttggccgcgcctgacgcgctgggggagcgtgccgaattctccgcccgcatgatcgcgctcggcggcaagcgactcgccggctccaaggatttcggtgccgacggccagctgaccccggacgggttcgcggcgaacgttcgccagcttgatgaggctggtgccactgccgtggctgaagcgctgaggaccgccgatttcactgtgatgtcgatggaaaccaagccgtaccgccgccgcccgcagccgccgttcaccacctcgaccttgcagcagaccgccggcaatcgcctcggcatgggtgctcgcgtcgtgatgcgcgcggcccaaagcctgtacgagaacggctacatcacctatatgcgaaccgattcggtgacgctgtcgcaggaggccatcaccgccgcccgcaacgccgtctcctaccatttcggcgacaagttcctctccgccgagcccaagcagtacgccaccaaaaccgctggcgcgcaggaagcccacgagtgtattcgcccggcgggctcgcgcttccacgacccggatgagctggcttccaaacttcccggcgaccagctgcgcctatacacgctgatctggcagcgcacgctcgcctgccagatggctgacgccaccggctccaccgccaccgtgcgcctgtctgcgccggccggccccaccgagggcgaggccgtgttccaagcgtccggcactgtcatcgaattccccggctttatgaaggccacgggggagggacgcaagcccaaggccgccgttcccggcgctggggctggctcggaccaggctgctgccggcaagacggacgtcaaggccgtcaggggtgacgcctccgaatccaacacctccctgccgccgatgagcgtcggccagcaggtcgaggcaagcgacatcgaaccggacggccatgaaacccagccgccggcccgttataccgaggccacgctggtcaagacgctggaggccaaggagatcggccgcccgtccacctacgcgagcatcatctccacgattatggatcgcggctatgtgtatgagcgtggccgtgcgctgatccccagctggctcgccttctccgtgaccaagttgctcgagacgaacttccccaagctggtcgactaccagttcaccgccgagatggaaaacggccttgaccgcatcgcccacggcgaggaatccggccgcgactggctcacccacttctacttcggttccggcgagggcgccgcccgcaacgccgacgaggcgcacgaaggcctgcaacagcaggtcgcgcagctcggcgagatcgacgcgcgcgccatcaacaccatcgacatcggcgacggcctgcacgtgcgcgtcggccgttacggcccgtatctggaagacatggagcatctggacgtcgaaggcaacccgaagcgcgcgtctctgccggacaccatcgcgccggatgagctgacggtggccgtggcccgcgatttgatcgacaaccactccggtggaccgcgcgagctgggcgttgacccggtatccggcggtaccgtcgaggtgcgcaatgggcgtttcggcccgtatgtggcgctggtgccgccggctgaggcttcggctggcgctgctggcgatactgctggtgcttctgcggccaagaagggttcgaagaaggccgcggccgccgccgcgtcgcgcccgaagatggcctcgttgttcaagacgatgagccctgaatcgctgtcgctggaagacgcgctaaagctgctgagcctgccgcgcgaagtgggcacatacgaggaaaccaacgccgaaaccggcgaggtatccgaatgcacggtggccgccaacaacggtcgctacggcccctatctgaccaagacgggtgccgacggcaagtcggagacccgctcgctggcctcggaagacgagattttcacggtcgatatcgacaaggccaaagaactgttctcgcagcctaagtacggccacgggcgtggccgtggtgccgccaagccgccgctgcgtgatttgggcaaggacccgaacaccggcaagaacgtgaccatcaaggacggccgtttcggcgcgtacatcaccgatggcgagaccaaccgcacggtgccgcgtcagtacacgcctgaatccatcacccctgatgacgccttccgactgctcgccgaaaagcgtgcggctggtccctccacccgtggccgtcgcggtgctgggcgtgccggtgccgcgaagtcgggagccaagggagccaagaagggcgctgcttcggctgcgaccaatgccgccgaggccaagcgcgccggacgccgtgccgaggtgaagaagctggcgaacaagggctggtccaaccagcgcatcgccgaaaagctcagctccaccgccgc

SEQ ID NO: 73 - DNA, 3257 bp, Unknown
  R206_24m  MAG No. k141_5206
ctgccccgccgcgagcacgtgagccactccggacagtccgtccagcgccgtcagcgcgccttcggctacaccgaagaggatctgaagctgttgctcactccgatggccaacaccgggaaggaaccgctgggatccaggggtaacgatgcgcctatgcccgcactctccagccgcagccgcatgctgttcgactacttcacccagaagttcgcgcaggtcaccaacccgccgctggactgggagcgtgaggagatcgtcacctcgctcgaatccgccatcggccccgagcctaacctactggccgattccgagctgcacgccaagaagatcctcatcccgctgcccgtggtcaactctgatgagatggcccagctcaagcgccttgacaaggcccgcatcctcggcggctactatcgcccgtacgtggtcaagggcctctaccaggtcgccggcggcggcaaggccctcgaagagcgacttgacgagatctttgccgaaatcgacgaggccatcgccgacggcaagaacttcatcgtgctctccgaccgtgaatccaaccacacgtggggcccgatcccgtccctgctgctgacctccgccgtgcagcaccacctgctgcgccgccacacccgtacgcagatctccatggccgtcgaggccggcgacgtgcgcgagattcaccacgtcgcactgctgatcgcttatggtgccgcctgcgtgaacccgtacctggccttcgaatccgttgaggatttggcccgtaacggctacctcaaggtcgacgcggacaccgccgtgaagaacctcaccaaggcgctttccaccggtgtgctcaagatcatgtccaagatgggcgtctccaccatcatgagctaccgtggcgcacagctgttcgaggctgtgggcctgagccaggaagtcatcgacgaatacttcaccggcaccacctcccgtgtgggtggcgtgggccttgacgagatcgccgaagaagtggccatccgtcaccgcgtggcctacccgaaccagtggagcgcatccccgcaccgcaacctgcgcacgggcggcgactacaagtggcgtcgtaccggcgaggaccacctcaacgatcccgaggccatcttcctgctccagcagtcgacccaccgtggcgactaccagatgttcaagaagtattcgcaccacatcaacgacacgtcgaaccgactcatgaccctgcgtggcctgatgaagttcaacaacaaccgcaagccaatcgacatctccgaagtcgagccggcctccgagatcgtcaagcgcttctccaccggtgccatgagctacggttccatctcacaggaagcgcacgagacgcttgccatcgccatgaattcgattggcgcacgctccaactccggtgagggcggcgaatccgacgatcgtatcaacgacccgcagcgctacagccgcatcaagcagatcgcgtccgctcgcttcggcgtgacctccgattacctcgtgcacgccaccgacctgcagatcaagctcgcccagggcgccaagcccggtgagggtggccacctgcccggtgccaaggtcccgccgtggatcgccaaggtccgtcacgccaccccgggtgtggagcttatctccccgccgccgcaccacgacatctactccatcgaggatctgaagcagctgatcaacgatgcgaagatggccaacccgaaggcacgtatccacgtcaagctcgtttccgagttcggcgtcggcaccatcgcggccggtgtggccaagtgccatgccgacgtggtgcttatctccggctatgacggcggtacgggtgcagccccgctcaacgccatcaagcacgccggcaccccgtgggagatcggcctgtccgaaacccagcagacgctgatcctgaacggcctgcgctcccgcatcgtcgtacagtgcgacggcgagctcaagaccggtcgtgacgtggtcatcgccgccctgcttggtgccgaggaattcggcttcgctactgcggccctgatcgtggaaggctgcgtcatgatgcgcgcctgccagaagaacacctgcccgcagggcattgccacccaggatcctgagctgcgcgcccgctttaagggcaagcccgagtacgtggtcaacttcttcatgttcatcgctgaggaggtgcgcgagatcctcgcccagctcggcttcaggactcttgaggaggccatcggccacgttgagtgtttggatcaggacgaggccatcaagcgctggaagtccggcggcatcgacctgaccaacgtgctcaagcaggccggcccggtacccggcacgatcctgcaccagaccatcgagcagaaccacgagctggagaaggcactggacaacaagctcatcgaacttgcccagccggccctcgaacacaaggaacccgtgcgcatcgaaatgccgattcgcaacgtcaaccgtacggtcggcaccatggtcggctacgagatcacccgccgttacggcgaggaaggtctgccggacgacaccatcgacatgaccctgcacggttccggaggccagtccatcggtgcgttcatcccgcgcggcgagaccatgcgcatctacggcgaagtcaacgactacgccggcaagggcctgtccggcggtcgcatgatcgtgcgcccggaagatagcgtcacctttgataagcatgacaacgtcattgcaggcaacgtcaccggcttcggtgccacttccggccagatgttcgtggctggtcgcgccggcgaacgtttcggcgttcgtaacggcggtgccacgtttgtggtcgaaggcgtgggcgaccacggctgcgagtacatgaccggcggcactgttgtggtgctcggccccaccggacgcaacttcggtgcaggcttctccggcggtaacacttatgtgcttgacctcgatatgaagaaggtcaacccgggtgccatcaagtccggtgcactgctcttcgagtccctgaactccgaaactgcaaaggtggtgtacgacctggtcaagcagcacgccgaggagacctgctcgcagttcgccgctgctctgcttgaggactggaacgagactgtgaagcgattcacgcacgtggtgccgaagcagttcgtggccatgaccaaggccatggaagaagccaaggccaacaatgtagatttcaatgcgcccggcgcctgggaaaaggtgtacgagcaggttatggaaggagcgcgctgacatgggcgacccgagaggatttctga

SEQ ID NO: 74 - DNA, 31296 bp, Unknown
  R206_24m  MAG No. k141_6141
ggtcgtgagtccaattctcactcggggctctctggcggggtagctcagctggctagagcgtacgactcataatcgtaaggtcaagagttcgagcctcttcctcgctacaaatcgcgcccgctaaccggtgggcgcgcactaaaccttataagaacacagaggtgaatgacaatggctaagagcgccgacatccgtccgggcatcacgctggcctgcaccgagtgcaaggagcgcaactacattacgacgaagaaccgtcgtaacactcccgaccgtctcgagctgaagaagttctgcccgcgctgcggcaagcagactgtgcaccgtgagactcgttgattgcgcacagcattatgtttcaaacccggcccatgcggccgggtttttgcgtatgggacttgctgctgtctcagacgacgattgcctcgatatcgctcgtgcgacactaagataggaagccatgacaagctttgcagacatcaccaccatgggtgtgggcggacatatcgcccacttcgtcgagccgaccacgcgcgtcggactgatcgaggccgtggaggacgccgattccaaaggacttcctttggtcgttatcggcggaggctccaatatgctcgtttccgatgaccccttcaacggcgtggtggtgcgagatgcgcgctgcctgatcaccgtgccggacgaggccgcaccggtcgaaggcggagatcgcacagtccatgtcaatgccgaggccggcgccaactgggatgattttgtggcgttcaccgtggaactcgggcttgaaggcgttgaggggctttccggcatccccggcacggtcggtgcctcagtggtgcaaaacatcggtgcctatggccaggaggtcgccacttcggtggaatcggtggaggtctgggaccgcgaaaccaaaaccacgcgcgatttgactcctgccgatctccagttcggataccgttactccgcactcaaggccagcatgtatgccgggcccggcaagcctgccgaccggttcttcccgaccccgcgttatgtggtgctatccgttacctttgcccttacccattcggctgaaggcacggtcggctatgggcaattggccaaggcgctcggcgtcgaggtgggcgatcgcatggccaccaccgatattcgtaaggccgtacttgcggttcgtgccgccaagggcatgctcgaagatcccacccgttatgcactgcccgatatggccaccgccaagcgagaggccaatattctgtccgatttggatcggcttgccgctctgaacaatcaggccggtatcccggctagcagcgatggtttgcccgctcctgattacaatcgccacagctgtggttcgttctttatgaatccgatactctccgcacagcaggctgccacgttgcctgaggacgctcctcgttttgacgcgacccggcccgatggtacgcctggcgtcaagacctcggccgcttggcttatcgaccatgccggctgccataagggatacaaggtcagtccagatgcgtctgcgggtctgtccacgcagcatgcgttggctctgaccaatcgtggaggagcgagtgccgccgacgttgaagtcttggccaaggccgtacagcaagcagttcgggaagcattcggcgtcaccttggttccggagccggtctgtatcggcgtgctgtgatgccccgcagaaaacttggcgatgatcgcctggccgtttggccggcaaaccagtgattccactggataacggattgatggacaacgtaatcacccccatttatactcattttcagtgctgcgcgcgtccggcgtgtaggcaggggagaagagagcaatatcatgcaactgttccgtacgaaatccgtcgaacagaccattgccgaaacaggtgaagagggtcgcaagctcaagcgcaacctaacgtggtgggatctgtccatcatgggtgtggctgtggccgtgggcgctggcatcttctcagtaggtgcgcaggcggcggctttccacgccggcccggccgtgatcatcagcttcctgattgccggcatcgtctgcggcgcggccgtgatgtgttacgccgagtttgcctcgatgattccagtggccggttccgcctataccttcacctataccacggtgggtgagctcatggcatggatcattggctgggatctgattctggaaatgctgttcgccggttcggtgattgccaaatactggggcgtgtatctcaacgatttcatacgtctgatgggttggaacgtgaataccgatctggcgctaggctccttcaacttcgacctcgcgccaattatcatcgtcgcgttcttcaccgtgttgctggtgttcggcaccaagattggcgctcgtgtggatggcgcgatgaccgtgctcaagatcgccatcgtggtgtttgtggtgattgtcggcttcttctacgtcaaggcctccaacttcaccccgttcattccaccgagccagccgaccgcagccactaccggcgacggtgccgtcagcgctcagatggcgcagccgctatggcaatgggccactggcatgaccccgtccatttacggcgtgcctggcatcctgtctggtgcggcgcttgtgttcttcgcgttcctgggattcgacgtggtggccaccgcctccgaagagaccaagaacccgcacaagaacgtgccgctgggcatcggtgtcggcatgctgctcatcatcgtcatgtacatgctcgtggccattgtgaccaccggcatggtctcctacaaggatcttgccaagcaagacagcccgtctctggccacggcattcgaattggtaggggctgactgggccgccaagattatcagctttggtattgtgctgggtttggccaccgtgattatggtgctgctgctgggcttgacccgcatcgtctttgctatgagccgcgatggtctgctgccgcgtggcctgtccaagaccggcaagcatggcaccccggccgttctgcagattgttgtgggcgtagtggtggcactggtcgctgccctgttcgacatcggcgtgctttctgacatggtgaacatcggtacgctgtccgcattcaccttggtggccatctccattccgattatgcgcaagaagcgccccgaattgccgcgtgccttcagaatgcccggcaacccgtgtgttccgattctgattgccttggccaacttctggctgatgttgaacctgtctgtgctcacctggattcgtttcctggtgtggctggtgatcggtttcgccatctacttcagctatggttactggcacgctcgtctcggtaagggagatttgagcgaaacgctatctgacgagactgatcgggccgttaacggctgaggtgtcaggggcgcgtcctaacgcgcgcgtatttttgtagaaagttgttcgtaaggagaattccatgccatacgtaattgctcagccttgcgtggatgtcaaggacaaggcttgcgtggacgagtgccccgtcgattgcatttatgagggttctcgctcgctgtacatcaatccgaacgagtgcgtcgactgtggcgcctgcgagccggtgtgccccactgaggccatcttctatgaggatgatctgccggatgagtgggcctggtacaaggacgcagccgtcagcttctttgccgaagtaggcgatcttggtggtgcttccgccaatggtccgattggcaaggatcccgagcaggtggccgcgctgccgccgcagaatcagtgagctgattcgctcaatcatataatgcaagccctcggtctcaataggccgagggctcgtcgtatcttaggaacatatcgtccaagaaagggttcccatgggctttcattcatattcgtcgccgtacgattggtcgcgcatcgccggtttcaaggccgcggccaaggcagtgccgggcggcatgatcgacctgtccgtcggctcgcctgtggattcggttcctgacgccgtgcagcaggcgttggcctctacggcggatgcgtcgaatgcccacggatacccggtcacggcgggcactgtcgatttgaaatccgctatagattcgtggttccgcaatatgcgcggtgtggatttgaaagcggtgaatgcggcagtgattcccaccgttggctccaaagaggcagtggcattaatggccagcttgctgcatctcggcgagggcgatgtggtggtgcagccgaaggtttcctacccgacttatgaaatcggcacccagcttgccggcgctaccgtggccaaggtcgatgacgtgaccgatgtcgattcctgggtcaacattcccaatgtcaaagccatctggattaactcgccgtgcaatccgaccggcgaagtcatttccgccgattggctagccgacatcattgctgcagcccgacgcattggcgcagtagtgctctccgacgaatgttatgcgcttatggactggcgttcggcgcgcaatacgacttacaggcctgcggcggcatccaacgagcccgcctttgatgccgcgttcagcctgtccgccacgccgtgtgcgctcaaccagcaggtatgcgaaggctcggccgatggcatcctggtgctgtattcgctgtccaagcagtccaacatggccggctatcgcaccgcactgattgccggcgattaccggctggtcgccgaaatgggtgaatatcgtaaacagattggccagatcattccggggccggtgcaggccgccatggccgcaggactgaacgacgccggctccgtatatgcgcagtggaaccgttatcggggtcgattggtcgcattggtcgacgcgctcaatgcctatggttatcaggctcagatgccgtcaggtgcactgtatgtgtgggtcaaggccaagtctggtgattgctggtcggatatggccgagcttgcccagttgggaatcattcccagccccggcgagttctatggtgcccccgagtatctgcgtttctccgccaccgccaccgatgatgccattgacgctgcatgccagcgtctgatggcctaactacgccccgaactgtgccgccgcgctgccgaatttgcggcgcactgcgtccattgcagcttcggcatcatgcatgcgtgcctgtgcggtctgcccatgtgcgtcatcggcttcttcgagcagatcgtctaatgacggctgcactgcggtagcatgtgcctcactgagcgatgatgtgctcatgcctgccagcctgatgagttttggcaggggagtggtcggttcggcgttcgccggtataccaagcatgattttcaactgccgcacgcattcgggatacagcgtgcttgccgtatcggtcggctgctccatggtgaaggatctggtctgatagctcaggtcggcgaaccgcaatttcactgtcagcgtgcgagccaccaatcctttgcggcgcaaggtacgggcgacttcatcgcatgctgaacgcagcagccggcatacgatgtgcatgtcacgggtatcttcggtcaaggtgcgttctgaaccgatggacttctcttcgcgggttgttgcgatctcacgtgaatccagaccatgcgaggccgcccacagtccgcgcgccgcggcgggcgatccagtggcctgtatgagagcggcttcatccatttgtgccaattcggccacggaatgcacaccccaggcgttgagtcgtttctccagcgacgggccaacgccgggaatgccgcgcaatggcatcatctgcacgaactgtgccgaccgtgccgccggaatgagcagcatgccgttcggcttggcattggttgaagccattttggccaccagtttgttgcaggcgatgcccaccgagcaagtcacgttgaatcgttcgtccacctgctgccgtatccatgccccgattgcgctcggtttgtcccattccagcagcgcgccggacacatccatatatccctcgtccaccgaaacctgttcgaactggtcggtgatggtcagaaagacctcgtgcatgatgcggtgcgacatcatgcggtagtacgtcatatccaccggcaggaacacgccatccgggcagagttgatgggcgcgggcggccggcatggccgaattgatgccgtagcgtctcgcttcgtagctcgctgcggataccaccgaacgcggcccggtgccgatgatgaccggcttgcctttcagcccgggattgcgggccacttccagcgaggcatagaaagcatccatatcgatatgcagcacggtgcagccggtctcgtcatgaccccaatcgcgcttggcggcctcaagtctcggtgcggtgctcatgctcaccattgtaagcagtctcataggggtgtccacattatgtcgttgtccgagccgaactcttccgactatgtactgtcccggctctgcgagtagcgtgaatcttatgaagaaggcagcggtcggtatcctcaatcaggttcctgtggtgtgcattgtgatcggtgaggcgttggtcatctatacggctatggccattgccaaactggcattcacccagcttgatccgttgtattcggtctggtatcgcgtcgggtttatggcagtgatgctgttgctatggcgcaggccgggatttcgctggccaacccatcaggacagggtaattttctcattggtctgattgccatccttatcggcggctcgatgtggggcgtgtacattgtgacagaccgtcgtgtggcgtccggaggcaactcgctggacaacctgtgcatcgcggttgccgtcggctggctggtgcagtcgttgttccttggcgtgccggctgtgagccatgtgattcatccgaaatccgatgccacatgggcgcttgctcctggcgggccatggaaactgttggcgttgctgtttgtgatttccctgatggcgtccttcatcccgtatgcggtggaacagattacgttgcgccgcaccacctcgggagcgttctcggtcatgcagtcaatcaaccccgcgatggccgtggctgtgggactggcgtttggcgagattccagacaccggtgaggttattggcgtcgcattggtgatctgtgccgtgatcgtcaccttttccggtgatgcgtccctggccaagggcaagtgacgggctgcctggccggcaaggccgtcttgcgcttttttggacgcattcggcacgttgtatccgcagggcatggtacgatgttttgctgttgcgcttcattgtgtaacgtggagtcatgcctgagtggccgataggggcaccctgctaaggtgttagtcgtgtaaacggctcgagggttcgaatccctctgactccgcaagtagacccggacatcattgggaaactgatgattccgggttttgttattaagagatggccgttgatgatgtgttgaacaaagcacatgaacgcgaaccgtgggatgccgccatcagagtagcggagccggaggtacgccattgtccgtccgcctccgtgagccattctaccggcatttggggagcggcgcgtcataaagaatacggcatatgacaaggtttttcccgaatattgaagcaatgccgcccttggacggtactctgatagtgagtacagagagtcgcggaatggggaagctatgagccatatcagcggtcaagggcagcatcgttcaatgtcgtcgaacggcaatcacatcgcattgattgtggcgttcgttgtcgctttggctgtggctttggggctgggagtatggttcgctgccatgcataacgactcaaccgatgtgtctcgtcccggaaccagcacggttgccgatacgtcgctggacaaatccggatccgttcctcagccggtggcggagcatcacggcaattcgccggattgcccggataccgactgcatcgccatgctggtgaatggcgacttgctgttccacgagagcctgtggaacggtttccgcggtgccaacaccagcgccacggatggcactgctttcaattttgatccgctgtttgagccgatgaggcagtacattcaggcctctgatatcgccgtatgcaacttcgagactccagtcgcccaacgaggcggcccctacagtgcctacccgattttcaacataccgcctgaagtggccgatgccgcccgcaacgtgggatacaacgcctgcactcatgccaccaaccattcatgggatcaaggctccgatggcatcgcccggctttgggacacgttggaggccgacggcattgcccaaaccggctcatacaaaaccgaggaggattcccttaagccgttggtcattgattctcccacaggcggcggcaaactcggtctggtggccggtacggtgtccatcaatggcatgaccgccgaccatgattggcagatcgatcgcctgcgcgagcaaggcgatccgcatcacgacagcgatattcagcgtgcggtggataaggcgaacaaagcccgtgagcagggtgccgatgtggtagccatagcgttgcattccgtgcaggaatatattgattacgccgattcctggcaggtatccgaggcgcatgagctcgcggataccggcgcgttcgacgtgatatatggtgccgggtgtcactgcgcccagcccatcgagcaatacaacggcacgtggattatctatggactgggcaatgccgtcaccgagaacgccgtaacccctgaaaccatggtcaacaatcagggcgtcaccgcgcgcgtgcagttcgccggcaagaaaggcgtcaaggagtcatggcgagtgaatcgcattgactggcttcccacggccaaccagcatcagggcaattaccaatggtgcccgatatccagcgaccatcccataggcacttgttggaccgaggtcaaggatgctcaagtacgccagcgcatatcggatgtgatttatgcgatgggtgccgaccagaatgttgtcaaggagtggaacattacccaagaacaggcgcagcaaaccgcacagtgaatttcccgccgcagttctaatgtggtgcccatgaccgagatttacgaaactcagagcgaacgtaccgatttgccgcttgtcgtgatgcctgccgtgctcgacgcgatgattgaacccatcaaggctcagttcccggcgctgcatgatgtggctcgcgtgcgtatgttcgaggaattcacttcggacgaagccgtgctggctgaacgcctgaaaaacgcagatgccctgttggtcggcggctaccatatctcggatgacttattgcgcacgatcagcgaacaaggccatgtcaagtgcatcgtgttctgcggtaccggagtcgccagctatatcaatctcgagctggcacgtgagcttaaggttcgtgtctgcaatgccgaacattacggcgatcatgccgtggccgagcatacgttcgcattgctgttcgaactcattcgcaaggtcggacaactcgataaggatgtcaaggcgggcaactgggcatgggcagggggcgacggtttgcagcttgccggccgccgcatgggtattatcgggctgggcggcattggcgctaccgtggccggcattgcccgcgccttcggcatggaagttgccgcgtggaattcacatgtgcctgccgagcattttgaacggtctggtgccgttccggtcgacgatctcaatgagcttattgaaaccagtgatgttatttccgtccatctgccgctgaatgatgccactcgtggcattgtcaccgctgaaaaccttgctcatctcaagcccggcacaatgttgatcaataccgcgcgctccgaagtcatcgagtccggtgcgctgttcgcccgcctgcaggaaggcgatattcccgccgcgcttgatgtatttgaccacgagccactcaccgtagatgatcccatctgccatgtgccgggcattgttctgactccgcatgtcggctggcgtaccgatggcgcattcaaggagctcacccgccagatgatcgcctgcatgaacgcctactttgccggcgaggactataacgtcgtcgtctccgaacactgattcgtctagtcgaaacgccgcctatgcagacgattctcaacacatccgacaatccggcccacgattccctcgtggagaagaaatccgagttcatcggtgatgccgctcatgtcgatgcgctcgatgaggcgctcgcattcgtgacctcaatccgcgagcagcatccaaaagctcgacatgtcgcgtatgccgcggtgtgtggaggcgcggacggacgtttgtccgagcgcatgagcgatgacggtgagccttccggcactgcaggcaagcctattctcgatgtgctgaagcagtccggtactaccgattgcgtgattgccgtcacccgatatttcggcggaatcctgttggggtcgggtggtttggttcgggcgtattcatccgcggcgtcattggccatgaaagcggcgcaagtggcaagaatcatgactgcgcgccggtatcgcgtgcatcttgaatacccgcagttgtcccgattccagcagctgctcagccaactggatgggcggcaggaagacgaatcgtatgcggcgaacgtcgagctgacggctgtggtgcccgtcgaccattgcgaacaattcgagttgcaggtcgtagaagcgttcaacgctgcggtatctccggaaccaatcgacatggtcaacattccggttcctctggcatgactaagctaaacactatgaccgacgagaaccccatcaatgagacccagcagagcggcgactccgccgcatcacagggcggtgacgccaacggcgccgcctttgagccgttgaccgcctcatacgagcgcttgcgtcattccactgactctgccgagctttccgagtttgctcgccgtcctctgcctgatcgtagcgatcaggcggcgttctcgcgtgccaccgcactgcttgaggccgtggctggcaacaagcacacgccggtcgaagatcgcgtgtttcttgccagtaccatgccattcccgaacgtactggtcaagttgtccgtggatcccgagccttccgtgcgtgtggctgtggctgccaacgaggacgataagaactggctggtcgggcgtctgaccaaggatccgattcccgaggtgagggatgccgcgctgcgcaacaagcgcaccagttggaagatgcggctcgagggtgcgcaggatcccgctgcggacagtgaaactctggattatcttgggttgctcggcactgagcttgaggaaggcgccccggcggtgctttcttccatggttcgtcgtgccgtggcgctgaaccccaacacttctgcggacatgatggccaagctggcggaagatccgtcagtggaggtgcgtcacgcggtggagagtcgtcgctagattccgttttgccgccatgtgagcgttctcatgtcgatatatggttgcttaattgttgcaaacgtaagcattctatggccgtcttacggtgtggcgcggcttttcggcgctacactggggctatgagtgagaataccgagagtaaagaacgattggctcgtccgctgattcgattggccaaattggtgggtatcggtaccagctatgtgggcatgagccacgattatcatgagatcgacgatgatgtgctcatcgaaatcctgtctgctctaggcatcgaagcccgaaacgacgatcggcaaaaggaagccattcacaggattttgaaggaacgccatagccgactggttgctccaacagtgttgcataccgtcggcgaggaagaccgtctgctcgttaacaccggcatcatggagataccttctgcaagcatcatcctggagaatggtgagtcatacgaggggaccatcggagtcggtccgggagacggatctccggcgttcgatttggatggtaactttgtgtctacggcatcgctgatcattcccgccgatgtaccggtcggctatcacaccctgcatgtcaaggtcggtaaccgttcgcaggacgccaccctgattagcgcgccgagccaggttccgttgattgacccgatgaaggacggtagcctgtggggctggatggcgcagctgtactcgattcgttcctccggatcatggggtgtcggcgattacgaggatttgaagaccatattggtcgacgccaagcggaagaccggcgctgattttgtgctggtcaatccgttgcacgccgccgaaccggtgtctccgcttacgccgtcgccgtatcttccggtgagccgtcgtctggtcaatttcacgtatattcgccctgagtcggtaccggaatacgccacattgccgaccgatgccaagaatgaagtggatggactgcactccgatgtggagccgctgaacggcgatgcccaggtcattgaccgtgacgccatgtggcgcagcaagatgcatgctctgtggattatcttcaaggccggtcgcactgccgagcgtcaggccgcattcgaccagttcaagacggatttcggttccgacctcgaagcctatgccacgtggtgcctgtgttatgacaagtggggtgcgccctcggcacaaggcgacaattgggaacaggccctcggccgggattctcagcagattgctgatttgaagcgtcaattccccgatacgctcgacttctaccgctggctcgaatgggtggcgtccgatcagcttgccgctgcgcagcaggcggccaaggatgccggcatggaaatcggcatcatgtctgatatggcggtcggtgtgcatcccctcggcgcggatgtgtggtggaatcctgagcggttcgccaagggcgctacggttggcgctccgccggatatgttcaaccagcagggccagaattggagccaaccgccgctgagcccgcttgatttggaagccactggctaccagacctaccgcaacatggtgcatggtatgttcgcccgtgccggtgccgtgcgcatcgaccatatccttggtctgttccgtctgtggtggattcctgagaatcattcggcaacggatggtgcctatgtgcattacgattccaacatcatgctcggcattctggccatcgaggcgtcccgcgccaacggcgtggtggtcggtgaggatttgggcgtgatgcccgattatgtggccgattccctgtccggccacggcattctcggttgtgcggtcgaatggttcgagcagagggacggggtgttccgcacaccatctcaatggcgtccgtatgccttggcgtccgtgaatacccatgacctgccgccggccgccggatacctggagtatgagcacgtcaagattcgcgaacgcttggggctgctgactggccctgctgaggagttccaagcttctgccaaggctgagcaagacgccatgattgctatgctggttgatcaaggatatctggatgccgatttcaccgagcaccgtgaggagcacgaggcggacatcatcgatgcgttgtaccgtgcgctgaagggatctccgtgcaagctgcttgccgcctcgattaccgatgcggtgggggagaagcgtgcgcagaaccagcccggcaccaataacgagtatccgaactggcgtatcccgctggccgacgataagggcaatgtggtgccgctcgaaactctcttcgacacccccggtgcccaacgtttcgcccaaatcttcaataactgactcactccagccccctctgatgagagggctcctcgcgaagcgaggtgggggagagacgacataaaaaagcgggagtgtctccacagttgccctatgtcaagactggcgatatactagtggattgttgtgtttccctaaggggtccttcaaagcgctatcccactcgccatcgaggactttcagggagcccacggataatgaggcctgaagcctcttggatgcggccctgaccaagccgcgccaagcagctgacagcccggaacacaatatatagaaaaggtaatccagtgaaaaccttcactccgaaaccagctgatctgactcacgactggtacgtcatcgacgccaccgacgtggtgcttggccgtctcgcctcccaggctgcaatcctgctgcgtggcaagaacaagccgactttcgcgccgcacgccgactccggcaaccacgtgatcatcatcaatgccgacaagattgctctgactggcaacaagatgggcaaggaactctactcgcactccggccgtcctggtggtctgcgtcgcgactcctacgccgagctgctcgagaagaaccccgagcgcatcatcaaggaagctgtcaagggcatgctgccgaagaaccgtctggccaaggtgcagctcgaccgtctgcgtgtcttccgcggcgccgagcacccgcacaccccgcagaagccccaggtcttcgagatcgcccaggtctcgcagcaggccaagtgaaacctgagaggagataagaatcatggctgaaaacaccaacgactcccaggttgtcgagaccgaagaggagctcaccaactacaccaccgagaccaacgctggcgctggcaccggcacctccgcgatcgagccgggctacggcaccggtcgccgcaaggaggctgtcgcccgtgtccgtctggttccgggtgacggcaagtggaccatcaacggccgcaccctggaggagtacttcccctccaagctgctgcagcgtgaggtcaactctccgattgttctgctcaagctcgaaggcaagttcgacgctatcgtcctcgttgacggcggcggcaccaccggccaggccggcgctatccgcctcggcgttgcccgcgctctgaacgccatcgatcgtgatgccaaccgcgccgccctgaagaaggctggcttcctgacccgcgacgctcgcgtcgtggagcgcaagaaggctggcctgcacaaggcacgtcgcgccccgcagttctccaagcgttaatttcgcttgtcctgtaccgagcatacaaaggctctccgtggaattccgcggagagcctttgtgtttgtgtcgtgctgttttgagtgtgactcacacctgtttcatcagcgtgatgctcagcgccggcatggtccagacattgtcgtcgacgggagtgtccggcgtatcatccacaggggcatcaggcatatcagctgatacctcatcccgaggcgcggacgaggtgccgtttgcggcgtgatccgttgctggcatcgcgaattcgatggtatccgcttcatcctcagtcgaggattccgtgcgctgcatggccacttcttcgaccagcgtgcgtaccgtctcgctggcgtccggtacatgctgcgtccaaacggtggtgtcatcgttcaaatcgcattcctcgacctgaatgccatgcccggctcggcggccgttgatttcggccgagcaccatttaggcgtccagtgagtgtctggcggcaggcggaatgtgcggtcgtcagcggtgccgttgaccacaatgcacacgtccacctcactgttggacagcaatcgcatggtgaagctacgtacgcccagatcgaaccagtcacgctccatcggcgtggtgccgtcgggcaggaaccactgcacgcggcttgagggcttgagtaggccgagttgggtcagtcgggtgaagaagtcctcgtggtgatacaggtccagtgatttacgtagcgccaccagtcgagacacggttttcaggcgacgcatttcgcgtgtcttgttggtggaatacatccaatcccacttcagccacgtgatgtcgttgtcttggcagtaggcgttgttgttgccgtcctgtgtgttgcggaattcgtcgccggcgagcatcatcggcgtacccagcgagagcagcagcatgccgatcatgttcatggccgcctgttcgcgtgccgtgatgacgtctggatcatcggtgacgccttcgacgccgaaattggcggaatggttcaccgacgagccatcattattgttctcgccgttggcttcattgtgcttggagcggtatctggtgaggtccgtcagcgtgaaaccgtcgtggcaggacacgaaattgatggaggccggagcgccgcgcccgggttcggtggcgaacagatcggccgagccgcagagtcgcgtggccatctcctgcaaactgatacgaccgaaatcggagccgccatccacatcctcaagccagaaggtgcgggccgtgtcgcggaagcggtcattccattcggcgaacggcacggagaattggccggtgcgccagccgaggttgcccagatcccacggctccataatgagcttcaggttgcccagcagcagatcggaacgcagggcgtagaggaacgggtgatgatgggtgaattcgccttccaggcgggccagcgtgacgccaaggtcgaaacggaaaccgtctatgccgatacgcttggcccagtatcgtaatgagtcgatggcaaaggtgaccacatgcgtgttggtgaagtccagcgtattgccgcaaccggtggtgtcttcgagtcgaccggtattggatttttgatggcgatagtaggccaggtcgtcgaggccgcgccagcagaccgtcgggccttcgacgccgccttcgcatgtgtggttgtagaccacgtccatgatgacttcgaagccggcctcgtgcagcgcgcgcaccatgtctatgacttcttggcgcacggcggccgcgcccttctcttgggctgctttggtggcataggagggttcgggggcgaagtagctgagggtggagtagccccagtagttcttgtggccgtgttcttgcaggaagagctcgtcctgcttggccataatcggcagcagttcgatggaggtgatgcccaatccctgcagataggcgagcgttgtggggtgggcgagtccggcgtaggtgccacgcaacgcttcgggcagccacggcgcgttggcggtgaagcctttgacatgcatctcgtagatgacggttttgcgccacggcacatgcgggtgctgcgggtcgccctcatgcttatggatatcgcgatcgtcgatggccacggacaccggcacatggccgagcgagtctacggtgctcatggcaccgtatgccgagccggttaccttgcgatccacgacatcgcattcataggagaaggcggcgggggtgagctccatggagccgtcgatgcccttgccatacgggtcaagcaggaatttgtatggattgaagcgcacgccgtgtttcgggtcccatgcgccgtccacgcggtagccataacgcatgccgtcccatgctttgggcaggtgcacgtaccacaggccgtagttcggtccggtcatgcggaacagggtctcgcgcagatacaaatgttcgataatgcgcgtgcacaccggaaactcatggatctgctggatgaacgaggcgttcgggtcttcgaacaggcggatggcgtcttggaagaaggcgccgggctcgtcaatgggctccagcacacacagccaaacctgatcggcagtttcggaacgaacaacgacgtcagccccaccgtcgtcagtgaagtacagccctgggcgagtggcgtaacgatgcaacggtgggtttttcatacctccattgtagacgtgttgtcacttctggtggaagcccttgatttcctgccgcgttccgcagcaccacagatatcgtcgagataattctcggcgaatcgcaatgcggcaccgatgatgttctggtcttcggcgcagtagctcttgcgcagattgaaatggtcggtgccgaacggactgcgtgcgatgacgcgcgccttcagatcctcgatgtcactgtcttcaagatgctgggctgcttcaccgccgacaatcacgtcgcccgcgatgatggatcgcgcgttgacgatggcctgcgccacgtaatccagccattcgtccatgcgctcgcgatgatgccgttcaccctgctcaagcacgctgaagaagccgggaatactttcgtaatcctcgggcaaggtctccggcgagcagtaggtgtccatgcaaccgcgctggccgcagtagcattcgcggccgcccggcaccagcgtcatgtgttcgatggcgccattgcacatattcggaccctgatacagcttgccgcccacgatcaccgcgccgcccgggcgtcgctccagatagacgcacaccgcatcggtgagcgtggagtcgaaccatagctcgaccatggcggaggcatcggaatcgtggatcatcatgcacgggtaatggaccgactggctgatggtttcgagcgtaagccccgtgttgcccataatggtgccgaaggtgatggtggtggcgtcgggggagaggatgccttggatggcgaacgagacgccgagcactttgccgtgcttcttttcgacgtcggaggcgaagttgttgatgatgccgccgatacgctggtagtaaacgttggtgttgcgataaggcagggcatcgttgcgtttttcgatgacgttgccgtacaggttaatcgcgcacaggcgcagttcgttggaccgcatcactacgccgatggcagtgcgatgatcgggattgaactcataattttgcgccttgcgcccgccggtggaatcctgcagttcgcctttgcggatgagtccatcatcttctagggcgcgcagattttgggtgatggtgggcaggctgaggccgagttcgcgttccagttcctgcttggtgacatggctatggccatacagatactgggtcatggcactgcggttgtgcgctttcactgcggtcgatggcattgccctcatatttacccctttgtgcgatgagatatatgtaagtatactttatgaaagtggctttcatgtgcttcgacgcggagattatgaggcaacaatcgtatatttgtaggcgattttgggcacttttttaaaccaattttctagaaatgtggagaaaatgagtacttttggaaacttgatttaagaaagttgtcggattgcgttgtttgcaagcatgtgattttcggtaaaaagtgaacaaaaagtaccaaatcgccgaataaagtgaggatttgttcgatatttcgcacaactcttaacaaaaactgttcaatatcgcacgtgaaacgccgtcgattttgtgcgtatgcatcgcgccggaccgttcggtatattgtgactcaagtcacatatgcaatgtgacaacgcatcaccggccattttcggttactgaggcggtatcccgctggtgcaactgaggtgacgaggcgatggcccagaactttgccatataccccaagaagatcgaggaggaccccaagtggcagaagcaaagaagaaagtcgaagctgccaatccgaccccagaagagaagcaggccgcagctgaggccgaagttgacgcgctggttgcccgcgccaagaaggctctcgacgaattcgagaacctcgaccagaagcaagttgatcatatcgtcgccaaggcctccatcgccgctctgaacaagcacctcgttctcgccaagatggccgtcgacgagaccggccgtggtctcgtggaagacaaggccaccaagaacatcttcgcctgtgagcacgtcaccaactacctggccggccagaagaccgtcggcatcatccgcgaagacgacgtgatgggcatcgatgaggtcgccgagcccgtcggcgtggtcgccggtgtcaccccggttaccaacccgacctccaccgccatcttcaagtccctcatcgccctgaagacacgctgcccgatcgtcttcggcttccaccccggcgcgcagaagtgctccgtcgaggccgccaagatcgtgcgcgacgccgccatcgaggccggtgctcccgagaactgtatccagtggatcgagcacccgtccatccaggccaccggcgcgctgatgcagcacccgggcgtggccacgatcctcgccaccggtggtccgggcatggtcaaggccgcttactcctccggcaagcccgccctcggcgtgggtgccggcaacgccccggcctatgttgattccgatgtggacatcgtccgtgccgccaacgatctggtgctctccaagcacttcgattacggcatgatctgcgccaccgagcaggccatcatcgcccacaaggacgtctacgaccagctcatcaaggagctcaaggtccgtaaggcctacttcgtcaacgccgaagagaaggccaagctggagcagtacatgttcggctgcaccgccggttccggcgtcaagcccgtgctgaactccgtggtgccgggcaagtccccgcagttcatcgccaaggctgctggcttcgagattccggccgacgccaccattctggccgccgagtgcaaggaaatctccgacgacgagccgctgacccacgagaagctcgctccggtgcaggccgtgctcaaggccgacaacaaggagcaggccttcgagatgtgcgagaagatgctcaagctgggtgccggccacaccgccgccatccacaccaacaaccaagagctcgtgcgcgagtacggtgttcgtatgcacgcctgccgcatcatctggaaccagccttcctcccttggcggcatcggcgacatctacaatgccatcgccccgtcgctgaccctgggctgcggctcctacggcggcaactcggtgtccggcaacgtgcaggccgtgaatctcgtcaacatcaagcgcattgctcggaggaacaacaacatgcagtggttcaagatcccggccaagacctacttcgagccgaacgccatcaagtacctgcgcgacatgtacggcatcgagaaggccgtcatcgtgtgcgataaggtcatggagcagctcggcattgtcgacaaggtcatcgaccagctgcgcgcccgctccaaccgtgtgaccttccgcatcatcgactacgtcgagccggagccctccgtcgagaccgtcgaaaagggcgcggagatgatgcgcgaggagttcgagccggacacgatcatcgcggttggcggcggctccccgatggatgcctccaagatcatgtggctgctctacgagcacccggaaatcgccttctccgacgtgcgcgagaagttcttcgatatccgtaagcgcgccttcaagatcccgccgctgggcaagaaggccaagctcgtgtgcatcccgacctcctccggcaccggttccgaggtcaccccgttcgccgtgatcaccgatcacaagaccggctacaagtacccgatcaccgactacgcgctgaccccgtccgtggccatcgtggacccggtgctggctcgcacccagccgcgcaagctggcgtccgacgccggcttcgacgccctgacccactcgatggaagcatacgtgtccgtgtacgcgaacgacttcaccgacggcatggcgctgcacgctgccaagctcatctgggacaacctggctgagtccgtcaacggcgagcccggcctggccaagaccgacgctcaggagaagatgcacaacgccgccaccatggccggcatggcattcggctccgcgttcctcggcatgtgccacggcatggcccacaccatcggtgccctgtgccacatcgcccacggccgtaccaactccatcctgctgccgtacgtgattcgctacaacggccagattcctgaggagcccacctcttggccgaagtacaacaagtacatcgccccggagcgctaccaggacatcgcccgcaacctcggcatcgacaccggcaagaccccggccgaagccgtggagaacctggcgaaggctgtcgaggactaccgcgataacaagctcggtatgaacaagagcttccaggattgcggcgtggacgaggattacttctggtccgtgctcgatcagatcggcatgcgcgcctacgaggaccagtgcaccccggccaacccgcgcatcccgctgatcaacgacatgaaggacatcgccgtcggtgcttactacggcgtctcccaggcggaaggccacaagctacgcatcgagcgcgagggtgaggccgccactgaggaagcctccgagcgctgattgcaggcggttggcggctgctggcaccagcagtagccaccaaccgcggtgttgcagcttagtggctgcatagcggacacaaggagcccgaccccattacaggggccgggctcctttgcatatgtggcgctccctcagccggcaggtgcctccatggggcggtaacctactcatggggcggtaacttgcccatggggcggtgaaaaccccatggggcggtgtacgaaaacggctctattctgcggaaggtaaaattttaccgtccgccccatgggctaattaccgccccatgagggaattaccgccccatggaatcgctgagcgtcgctaaatcactgcaataatgcagccaaaagcaataaagctggcaaacgcctcggtaatgccggtcaccacgggcttcaaggttgtgcgccgtgtaaccaccggcaacgcaacggcgcgggccaacagcagcacagtcatcgcaatcagatacgggctgcgtccagccggcacggcggctagcagcaatagcgccacatgccatacccacgaagccgccacgtacgaacgcttcccgcgttcccggatcatggttttgaccaccagaaccgacccatactgcgtcagcgcaaacagcacggtggcaatcagcccgttcacgggcaatgaacccgcaggccaccaggcgtgaaggtcgaatatctggctcaaatctggcatattccgaatcgcggcgcgtgcggcggtgacatcagcggctgcgcacgaggcatgtgctgcgttgatgggaataacacatgccgtctcaacagcgttgccaaacgacgcgatcaccgtggccatggccgatgcggcaatcaccgacacggcattgccccacagcgagcgctccttcctcagccacgaggacagcatcgacagcgcaaccagcactatatataaaggagcccaacgcagtatgccggtatgcgtaatcaggaatggcaagccgatgacgatgagcgctacggcataagtgagcatcggcggcagataacggcgtgaaaagtgtgctttgaaccagtgcgcggcgctgaactgcacgcaatagcacacggcccatgtcgccaacagccaaagcgtatcaagattaggcccgccgataaagaagccagccgcagcgggcagcataaccattacccatgcgccaggttggttgtcgaaccaatcgcgtttaagagtcttgcggcgggaagtcatatctgtcatgatatcgcagcgaatggttctcaataagaaagatgtgagacctgcattgcgacaatcgaacataggaagtgcgagaagccagtgcttccgccattatgcaacatgtgcgattgttcggaaatgttcatttggctcacattgtgtttatgtgagactaatctcgttgagtatcgccctcggcgctggaaatggcctcggctatcggatcttggctgaagtcgtggttgcgatagtcagggtcgtccaccggcagatgctgcaccaaggtatcgaacacctgactgtagattttgccgcgctcgagcaccgcatcgagcacatggccgccgaacgtcttgtcgtcggacaggaagtgctcgtggaatccggccacagccgcgccgtgaaacatcacgggggagaagtacccgagcatggtgcccttgacgtcgtggcgcaggaacacggcctgccggtcggccacctccaccagcgtggggtagggtgcctgctgcttgatgaccgcgcgtgtcttgatgaagctgaacgtgccgcgcacaattaccgaaaagaacgtgttcgcgcggccgttcgccttgacgatcttttcgttgagctcttctaggccgatatcatgacgctcgcactggtactggaaggccgcgcgatggctattagcgaatggcatggtgaagtcgtccggcacgcgttcggccacaccggattggcctatcttgtatgccacgccatccaggatgatgagctcgccgtccaagccctcgccggtgccgatgccggtgtcgccatgcttgagcaattcgccgatggtggtggtgccttccagcagccccggcacgagtaaggccaaagtgccgtgctgatataacacgttggcaccgtgctcacgaataggtttgatgttctttgccagtgattgtgtcacgagccttaagagtaattcgcgttaccgtccaactcaattaatcaatccatattcgccaacgtgagctgtgccactatatataggtaagtctcagaaggatgttggtaggcgacgccgagcggctatgccgcgaggtaatacgaacggcatgagcgcgacacgcgcgaattcctccgcgctgtcccacctcaatgcttgaataaacaagttgcctgatttgggctcgcaaattggaattaaaaaagcgagcgcgggccgggagccacttcaagtgaagtgacagccggaaaccgcgcactgatgtcggatgaccgccagaggacgtatgtccaagggaggccatgcgcgccggtgccctagaagcaggttggtaaacagtacaacgaacatcgctagaaagggcggacggcaatggcgggacagaaaatccgcatcaggcttaagtcctatgaccacgaggtcatcgaccaatcggcgaagaagatcgtcgaaacggtgacgaacgcgggcgcaactgttgttggccccgttccgctgccgaccgagaagaacgtcttctgtgttatccgttctcctcacaagtacaaggattctcgcgagcacttcgagatgcgcactcacaagcgcctcatcgacatcgtggacccgacccccaaggccgtggactccctgatgcacatcgatctgcctgcggacgtcaacatcgaaatcaagctgtaagggaggaggaagcattatgtctaatcgcaaggctctgctgggcaagaagctcggcatgtcccaggtgtgggacgagaacggcttcttcgtgcccgtcactcttgtcgacgtgtccaccaacgtggtgaccgccgtgaagaccgaggaatctgacggctacaaggccgtccagctcggctacggcgccatcgaccccaccaaggtgaccaagccgctggctggccactttgccaaggccggtgtcaccccgcgtcgccacctcgtcgaggtgcgcaccgacgacgtcgatcagttcgaggctggccaggaactggccgctgacctgttcgaagagggtgctgaggtcgacgtgaccggcaccaccaagggtaagggcttcgccggtaccatcaagcgttggggcttcaagtcctaccgccgtactcacggttctcacaagaacgagcgccgtcccggttctgtgggcgcatgcgccactccgagccgtattctcaagggcaagcgtatggccggccgcatgggtcatgtgaccgccactacccagaacctgaccgtcgtctccgctgatgtcgagaacggcatcctcgccatcaagggcgccattcctggccccaagggcggcatcgttctcgtccgctcggctgtgaagggagcctgataaaccatggcaaacgttactctgaacgtcaccgacgccaagggccaggccaccggcactgttgaagctcctgaggctctcttcggcgtttccgccgaggatgtccaggctcacatcccgctgatccaccaggttgtcaccgctcagctcgctgctgctcgtcagggcacccacgccaccaagactcgtggcatggtttccggcggcggcaagaagccgtggaagcagaagggcaccggtcgtgctcgtcagggctccatccgtgcaccgcagtggtaccacggcggcaccgtgttcggcccgcagccgcgtgactactctcagcgcacccccaagaagatgaaggccgcagctctgcgctacgccctgtccgatcgcgccaacgccggtcgcgttgccgtggtggagttcggtatcaccgagccgtccaccaaggccgctgtcgccgccctggccccgatcaccgcggacaagttcaccacggtcgtcttcactcgcgacaacatcaacgagtggctctccgtgcgcaacatcccgaccgttcacccgattttcgtcgatcagctcaacacgtacgacgtgattacctcgcagtacgtggtcttcaccaaggaagccttcgaggctttcgtggctgccaagaccgagccgaaggaggcctgatttagatggtcgctattcacaagcccgctcacgacgtgattcttaagcccgtcgtctccgagaagagctacgccgcttccgaccgtggccagtacaccttcgtggtggctccggatgcgaacaaggtgcagatcaagcaggcaatcgaagagatcttcaaggtcaaggtgacgaacgtcaacaccctcaaccgcgctggcaagaagcagcgcactcgcaccggtttcggccagcgcgcttcccagaagcgtgcgatcgtgaccgtcgccgagggccagacgatcgacatctttggtaactgaaggctagccgagaaaagttaaaggaagaactacattatggctatccgcgtttataagccgacgaccgcaggccgccgcaacgcgtccgtctcggatttctccgagctgactcgttctacgcctgagaagtcgctggttcgcaagaagtccaagaccggcggtcgtaactcttacggccgtatcacctcccgtcatcgcggcggcggccacaagcgccagtaccgtctcatcgatttcaagcgttgggacaaggacggcgtgcccgccaaggttgccgagatcgagtacgatccgaaccgctccgcccgtatcgccctcctgcacttcgcagatggcgagaagcgctacatcatcgcgccgaagggcatcaagcagggcgacgtcatcgagaccggtgctcaggctgatatcaagccgggcaacaacctgccgctgaagaacatcccgaccggtaccgtggttcacgccatcgagctccgcccgctgggtggcgccaagatcgctcgttccgctggtgctgccgttcagctcgtcgccaaggatggcgcctacgctcagctgcgtatgccgtccggcgaaatccgcaacgtcgacgcgcgctgccgcgctaccgtcggcgaggtcggcaacgaggaccatgccaacattcagctcggcaaggctggccgcgcccgctggatcggccaccgtccgatcacccgtggtgagtccatgaacccggtcgaccacccgcacggcggtcgtacccgcggtggtaagccgccggtctccccgtggggcaagggcgaggttcgtactcgtcgtccgaagaaggcttcgaacaagatgattgttcgtcgccgtccgtccggcaagaaccgcaagtaagggagtatcgagaagatgactcgtagcatcaagaagggccccttcgtcgacgcccacttgcagaagaaagtcgacgagcagaacgagaagggcaccaagaacgtcatcaagacgtggtcccgtcgttcgatgatcacccctgatttcatcggacacaccttcgccgttcatgatggtcgcaagcatgtcccggtgttcgtcaccgaggccatggttggtcacaagctgggtgagttcgcccccacgaagaccttcaagggtcacgtgaaggacgacaagaaggcccgtcgctaaggataaggaatagaacatggaagctaaagcaatcgctcgtcacgtccgcgtgacgccgcgcaaggctcgccgcatggtcgacctcatccgcggcaagaaggccaccgacgccgtcaccattttgaagttcgcccctcaggctgcggccctgccggtccgcaagaccctggagagcgccatcgccaacgctcgcgtgaaggccgacaaggccggcgagccgttccgcgagaacgacctgtacatcaaggagacctacgttgacgaaggtgtgaccctcaagcgcttccgcgctcgtgcccagggccgcgccgctcgtatcaacaagcgcacctcccacatcacggtcgtcgtggctaacaaggaaggagcccgctaaagatgggtcagaagatcaatccgtttggctaccgtctgggcatcactgagaaccaccgctccaagtggttctccgactccaacaaggccggcgaacgctaccgcgacttcgtgcttgaggatgatcagatccgcaaggagatgagcaaggacctcgagcgcgctggcgtgtcccgcatcgtcatcgagcgcacccgcgaccgcgtccgcgtcgacattcacaccgcccgtccgggcatcgtgatcggtcgtcgtggcgccgaggccgagcgcgtccgcgccaagctcgagaagctgaccggcaagcaggtccagctcaacatcttcgaagtcaagaacgccgcgctggacgcccagctcgtcgctcagggcatcgctgagcagctgaccaaccgcgtcaccttccgtcgtgccatgcgcaaggcccagcaggacgccatgcgcgccggtgccaagggtatccgcatcaagctctccggccgcctcggcggtgcggaaatgagccgttccgagttctaccgtgagggccgcgttccgctgcagaccctccgcgccctcatcgattacggcttcttcgaggccaagaccacgtacggccgtatcggcgtcaaggtctggatctacaagggcgacatgaccgaatccgagttcgaagagcagcaggctcagcagaacaaccgtccgggccgtcgtggtggcgatcgccgcccgcgccgtggcaaccgttccgccgccccgcaggccgtcgaagcccccaaggctgaggctcccgccgaggccgctccggctgcagaaacgaaggagtgagcaagaatgcttatccccaagaggactaagtaccgcaagcagcaccgccctgtgcgttctggcatgtccaagggcggcaacgagatcaacttcggtgatttcggcatccagtccctcgccccggcctacgtgaccaaccgtcagatcgaagccgcgcgtatcgccatgacccgctacatcaagcgtggtggccgcgtgtggatcacgatcttcccggatcgtccgctgaccaagcacccgctcggtgcccgaatgggttccggtaagggtgccccggagttctggattgcgaacgtgcgccctggtcgcgtgatgttcgaaatcggtggtgtgtccgaggacgtcgctaaggaagccctccgccgcgctatcgacaagctcccgatgaagtgccgcattatcgcacgtgaaggtggtgatatctgatggcagtcggtaccgctgattactccatcaagaatctcaacgagaagaccaacgcggaaatcgaaggcttcctcaagaagtccaaggaagagctgttcaacctgcgcttccagcacgccaccggtcagctcgagaacaccgcccgtctcaaggctgtcaagagcgacatcgcccgcatgtacaccgtgcttcgcgagcgtgagcttggcatcagccaggagccggccgccaccgaatccaaggagaagtgattatggctgaagagcgtaacttccgtaaggttcgccgcggctacgtcgtgtccgacaagatggacaagacgattaccgtcgagctcgagcagcgttcgacccacccgctgtacggcaaggtcgttcgttccaccagcaaggtcaaggcccatgatgaacacaacgacgcccacattggcgacctcgtgagtattatggaaactcggcctctgagcaagaccaagcgctggcgtctcgaatccattatcgagcgcgccaagtaagtaaagttcggcaaggctcgccatttaccggggcattatgggcaaccacgatgccccggtaaatggggagaaccagctcggctaaggagaatcaatgattcagcaggaaacgcggcttcatgtcgccgacaacacgggtgcgaaggaactcctcgccatccgcgtgctcggcggatcgaagcgacgctatgccggcatcggcgacgtgatcgtcgcctccgtcaaggacgccattcctggcgggtcggtcaagaagggcgacgtggttaaggccgttgtcgtccgtaccgtcaaggaatcccgccgtgcggatggttcctacatcaagttcgacgagaacgccgccgtcattctcggctccggccgtgaaccgaagggcactcgtatcttcggaccggtcggtcgtgaactgcgcgagcacaagttcatgaagatcgtgtccctcgccccggaggtgatctgacatggcagccaagatcaagagcggcgacctggtcaaggtcatccgcggcaaggaccgcggcaaggaaggcaccgtcaagcaggtgctctccaacgatcgactgatcgtcgaaggcgtgcagatcgtcaagaagcacgtgcgtgcaacgcagcagggccagcaggctggcatcgtctccactgaggctccgatccatcgctccaacgtgatggtcatcgacccggagaccaagcagccgacccgcgttggcatcaccgttaaggaagaggcgcgtgacggcaaggtgaagaccgtgcgcgtgcgcgtcgccaagaagtccggaaaggagctggcatgaccgatactactgtcgaagcgccggccaccccgcgcttgaaggtcaagtacaacgagcagatcattcctgagctcgagaaggagttcaagtactccaacccgatgcaggttgcccgtgtccagaaggtcgtcgtctccatgggtgttggtgccgctgcccgcgactccaagctcatcgaaggtgccgtcaaggacctcaccctgatcaccggccagaagccgaagatcaccaaggccaagaagtccgtcgcgcagttccacctgcgtgaaggccaggccatcggtgcgtacgtcaccctgcgcggcgaccgcatgtgggagttcctggaccgtctgctgaccctcgcgctgccccgtatccgcgacttccgcggcatcaacggccaccagttcgatggccagggcaactacaactttggtctcaccgagcagtccatgttccacgagatcgatcctgattcgatcgatcacgtgcgcggtatggacatcactgtggtgacctccaccaaggacgacacggaagcttacgcgctcttgaagcacctcggcttccccttcaaggagaactgatatggcaaaaaccgctcttaagaacaaggcggccggcaagccgaagttcaaggtgcgcgcttacacgcgctgccaggtctgcggtcgtccccactccgtctaccgcaagttcggcctgtgccgcatctgccttcgtgagaaggctcaccgcggtgaactgcccggcgttacgaa

SEQ ID NO: 75 - DNA, 9189 bp, Unknown
  R206_24m  MAG No. k141_7792
aatccaccgcacggcccacaccacgccgaatccgaggaagctcgccacggcgaacacgatgacgaaatgcaagacctgatccatcgagccccaggagaggtatcggtcgccgatcagcgtgcaggtacttcctatcgggcacgtgtcttcatacaccgtgatgagcgccatgagcatcggcgcaggtaccagtgtgcacgccaacgggaacagcaggcttttccacggatacgtcagtgaggccgggcgtagcgcgtagatgccgttgatgaccagcaaggcgggcggaatcacaaaattgattagcaacgcggcggccatcgcagccatgccgccccgtaaggtcagcgccaatagcaagccgtacatgattgccgtcgccagccagcagccgaagcgaatcgcatcctgacgaatccatgtgagcagtcgtccgctcgccgtctgcggattcggatccacaaacaattcgcgcagaccgtagcgtccgattgcatagcagatgaacgcaacggccgtataacagatcaacagcatggccgagccgatcaacgaatgaaccaatagctgatggccgctttcagcgtgcattagcttccaccactgagcccaggaacggtatgggaaccccggccgtaagcgaagattggtacagccgaatgccagcggtccgatgattgcgctcgccaatgggaaagacagactgccggatcgtatcgaaccgagtatcaggttggtgattcccaacaccaatggccagtgcagaaccataccggggaaccatacgaacaggtttttggcagccctgtcaaggacctcgtcgggcatgagatacattgatgagctccactgcagcagcaacaacaccgctatcagtacaaccatgccaatccaatgcgcgcggttccacgcgaatattcgttgcgtcccgcgctcggcggcggcattgcgcatatcgctcctgttgagcttgctgagtgcttgtgcacggttcattgcagtcctcctttaccgccttgtcaaggattgatgatgattccatcgtaaatcgcgcaggaaatgtggaatgatagttgtcatagtgaccatgacatgtcaggacggagcagttcggcgtcgggcacactgaaggggtgaatgtaatgggagaagcgcgcaaccgcaacatacgcatcggcattgtggacaatgacccgtatgcgctgaaagtgttcggcgcgctaatcgagcgcatgtccagcgattttgccgtgatatggacctgcgatttgggtgccgtggccatcagccgatgcctgagccccaccaagcggcctgacgtgctggttacggatatgtctatgggcgacgtgcccggtaccgaagtctgtcgtgcgattcgtaccaaaacacccgaggttgggctggtgggtgtcacctcatacgcgctcgcgtcatttcacgacgaggcggctcgctgcggggcgcaggccttggttggtaaaaccgatttgaacggcattgcgctcgctattcgcaatgcagcccaaggattgtcgaccaatgagctggtactgggagatgaggggagcggtaattcgctgtccttcatggatgccgcaaccgcctacgcggtgctcgaagatacgtcatacgtgcaccgtggcgcgctttccggcaaagaacgcgacaccctgcgtatgtatgcggatgggtcgaccaccaaggaaatcgccgagcgattgggcatcagcgtggccactgtggcgacttttgaacgccgcgcactcgccaaactcggcgctcgcagtcgcgctcatgccatatcaatctgcgtgaaacggcatgagatttaagagttggcatgggcggtatgtgcaacggcatggatggtaggaaaggaactgctatgaaagcgttacgacaccgattggccgagctggatagcggtgttcgcaatgcatggctgttgattgccatactggttgttgccttgatatgcacgatggaaaccatggcgggcttggctgctgacagtgtctcggcggcggactgccttgcggagttcatattcgttgccattgtggggtggatggcgtttcgtccggtcaccggatgcgtggcggtagcggtggcttggatagtgttgtgcatgagtccgatctggatgccgtcgggtgcaatgctcgccgtgttattggcggtgggtattgccggatacgccgataagcgattggcgctggcggttgccggcattgccgttgtggtgtggatgttgtcgcgtggtggcgtggccattccttggcttgatggcggctcagacacgatgagcggttctgcggatggcgcggcgagtagtagtgccctaaacggtagtgttgctgatggtggctcttcatccagtgggtctgacagcgcagggcagtcgggaagcgacttcaccggaagcgcctatgaatcgagcggttcttctgccgagcatcgcactgggcaagtgattcttggtgcgattgccctctatggtgtgatgccagtggccgtgctgtttattggcttcatgcttggtggcatggcggcgcgatggaatcacgaacgcagcttggctcgagcggagttggctcaccgccgtcagcaggaacgcacagctcaggacattcacgattacgtatccaatgatttggcatacctgattttgcgattcgacaaggatattgccgatggcaagaccccttctgaagaagaattacgcgaactgcgtagcgtggctatgggcgcattggatcgcacgcatcaggtcattgatgttattgaaggcaggggagaagcggcgcacagtgcagtgactccgcatgattcgaccgttgatgccgcttctggcattgcatgtggcatcacagacgctgattgcccgctagccgagcaaattcgtgatgttgcgagcaatggtgaccgccgattatcagagcttggctttgaaggtcagacgattatttccggtgctcatggcgcagccggtcggagtggcctgatcgccgggctgctggaggaactgtacggcaacatcgccaaacatgccgacccggaagcgggctatgtaatgacgattggcatcggactggacaccatccgcatcgcctgcatcgacatggcccgcacgtcatcggattcggatgcggatggcagtgcggacctatccaccggtaccggtctcaaccgttaccgacaattactagaacaacaaaacggcgccctgcatatcaccacgcaagacgccgaatggacattatcagcagttattccactgtgaggaaaccgatcacccaaccgacttctgcgcagtctccgcgccaaagaagccgacaatcagcatcgatgcaatagcaattgcgctgatggccacaaagatggacgtggcaccaagcgaggtaagcatccaacccaccaccataggcatcaacacattgagcagcttggccacggcgttcgcgaagccgacgcaacggaagcgaaccttggtggcgaacagttccggagcgtacacagccaccacggaagccataagcacgtacaggcacatcatgagcaggaagccaacgataattgcgctcacggtagaggtctggaaggcatacattaaaccgaacacgccagtgaacaggaaggccggcacaatcgtgcgcttgcggccgatgcggtcgataagcagagagccaatcaggcagccgaccggggcaccgagcatcatcgccgtggaggtgagcagcgagctggacaggttaataccacgcttgaccagaatcgtcgggacccaagaagtgaaggcgtaggagcacacgttcgtggcggccacagcaaccacagctacaagcaggcagatgccgagcgaacggccgccggcgttgcgggtgtcgctggtgtcggccttggcggctgcgtcgatcagttcggagccgttggcctcaagctgcttgacgatggcgtcggcctcatcgtaacggccgtgcacggcgagccaacgcggggattcggggatgtcgcggcgcagccaccagatgatggcggcccccagaccgatggccacgaacagcggacgccaggaccagcgggggatgatccatgcacacagcagcatagcgatcggcacaccgcagttggccacgagcgagacaatcgcgcaccagtggccacggcggttcatcggtgcgaactcgttgaccatggcgaagccggtgacgatttcagcgccgaggcccaggccggcacccagacggcacagggacagcacggccatgttcggggcgaatgcgccgaggaaggtgaagccgccaaacagcagcaggttgatttggtaagccacgcggcggcccttcaggtcaccgacgaagccggccagcagcgaaccgaccagcagacccaggaagcctgcggacataaaggtggaattttgcgcaacggtggaccagtgtgtggccaacgcgctggaggcaacggcgctgccaatatatacgtcgatgctgtccatcagcatgccagcggcgaccagcgccacgatgcgatggaacatcggggtttcatgtgcgcgatccacgcgcgagataatatcctgaaccttggcttgatccgtcacggtggtacgtgcttgtgcgctttccatagccgcgggattgccggaaatctgctgttcagcagcagtcatatttgagccctcttcttgcaaacctgcccgcgtgcaactgctcaatgatgttgcggcgagcgaactcttgattggactgcgtgttccgttcgccctcccattgtgtaggatgaacgacgtttgcagtccaagtcttgaattccacgtagcgagccaatcgttgtgagatagctcactacatggggcttaactataggttcgatcctgtggcacgccgcgttgcggtcacattgtgaacgataacagagtttgtaacgctcctatatatgccccacttacgctcttaccccgttgaaagaaggcaaaaccgtgattcccatggggcggtaaaacactcatggggcggtatttggcccatggggcggttagcggattttgcctttccgcagaatagagccgttttcgcctaccgccccatgagggttttaccgccccatgagatatttaccgccctatgggtgagttaccgccccatgaaacgtgtaataacaaagcatgcccttgctggtggaagcgatgctttgctatttcgcctgcttgccggcgaggatctcatccaccagcttgggcttttcggtcagctggccggtgaagccgggacggatatccatgtgcagcaccagagaagtgcggtagccctgctcggcgagcttcttggcggcctcaccggccaccttgagcacgtcgtccagattgccttccacgttggtgaacagggcgttggtttcctgcggcagggcggattcgcgaatcacttcgacggcctgagccacgtatggcgagacctcggagcccacgccattggccgacacctggatggctgccacggtgttgaggtacggtttgccggtttccgggtcgatcggcacttcctgagtaacggcattacggtcaagaaccatgattctcctttttcagtagtgttaagctcccctggcaaggggagcttaacaaccacacttatgtcagcgatacttccagaaatgatccatcgggccggagccgtggccgagattcagctgggccttcagcgcaccggtcagatacttcttcgcatgcttgatggccttgggcaacgtgtcgccaagcgccagatacgaggcgatggcggagctcagcgtgcatccggtgccgtgcgtgttcggattcttgatacgcgcgccatcaaaccaggtcacggttccatccgtctcggcaagcacatcgttggcatcctcggtgccatgaccacccttgaccagcgcggcacagccgtaacgctccacgatgcggtgggcggcggcctccatatcctcctgatcgcgaatcagcgtatcggtcagtacttcggcctcgggaatgttcggagtcacgaccgtagccatcgggaacagcttgccggtcaaggccgcaatggcatcgtcactgatgagcttggcaccggaagtggccaccataaccgggtcgagcacgatgttcgtggcgtgatggaaggtgagtcgttcagcaatgacgtcgatgatgtcagtggcagacaccatgccgattttcaccgcgaccggcggaatatcctcaaacaccatgttgatctggtcggcgagaatgtccggtttggtgtcctgaatggaacgcacgccggtggtgttctgtgcggtgagcgcggtgatggcgctcatgccgaacacgccgcaagccagcatggtcttcagatcggcctgcatgccggcaccaccggacgagtcggagccggagatcgcgagaacagcgggaagtgtagatgttgcaatctgtgccatagtgttcattctaagtggggcccatgatgtttttcggagcgatttccttgatgttttgccgctcctgtggtgagatggggagggtttgctgattgcgattgattcatgaaatgttcgggaggggacatggctgataacgatgtactgcgccgtgacggcgtcttggtgcgcatcaccggttttgacgatgaacgcaccgcatattttggcgtaatgcctaatgggcacaccacacagctcacatttccgcgtcaggaggtgttcgatgtgggcgacgtgttgctcgtcggcacggatttctatcgtaaagtgccgcatgatgtgtggccgttgaagccccgtgtgggcatcgtgcgccgtgcgctcaacgaaggcgtggtcctggagacttccgatggcctcgaactgcttgaaggcgattacccgaattcgatcatgcccggcaacaccgtgcagttcaccgacctgttcggcatcgaacgagtgctgtggcccacggccatccgcccaggcgaatccgatcacgatgacgacatcaagcagtaccgcatcacgccgggcagcgatccgtcgcttaccttcgattcgttcggcggttatgagcaggtgatcacgcgcgccaaggagcttatcgaaacgcagctgggcaacagtgcgcagatgcgtgcgatcggtgccaagcccatcaagggcgtgatcttcaccggtgctccgggcaccggcaaaacgcatctggcccgcatcatcgccaatgtggcggacgcgcagttctatctggtgtccggcccgaccatcgtgagcaagtatgtgggcgatagtgaggaaacgctgcgcatgattttcgccgccgcgcaggcggacaagcgcgccatcatcttctttgatgagatcgattcgattgcgtcctcgcgcgagaacgataccaatggcgtcggcaagcgcttggtggcgcagttgctgacgttgatggatggtttcgagtccaagggcaatgttgtggtggtcgctgcgaccaatcgtattgaggacgtggatcccgctttgttgcgtccgggccgtttcgactggcagattcctttcccgatgccgtctgagcgcgaccgtttgggtattttgcaggtgcaagcccgttcgctgtcaatcgagggcgaactgccgttggcggatatcgcacagcggaccgaaggctggagcggcgccgaagtgtgcgccatctggaccgaggccgctctggtggccgccaaggaccgccgcggcgcgatccgggctgccgacctcgtcaccgccttcgagcgagtcgagcgtcgtcccgaattaagacaccaccgggcataataattggctcccctcagagaggggagccagagaggtttactcctgggcggtggagtagagcttgccgccttgggcggtggagtagagcttgccgccttgggcggtgtacttttcgctcatcgcatccatgccggcgaggatttcttcggggctgagcacgttggcggacaccacgtcgttatcgacattggccttggccttagccagtgcctcggagtcgatgccagcagcagcctccttcacgatttgctgctgagcggcctcgccaccgaatgccttgcggatgttctgggagatggccatcgagcagaacttcgggccgcacatcgagcagaagtgcgccatcttggccggctcggcgggcagggtgtcatcgtggaaggcgatggcggtgtccggatcgtaggacagattgaactggtcgagccaacggaactcgaagcgagccttggaaatcgcattgtcacgatccatcgcgtgcgggtggtgcttggcgatgtctgcggcgtggcaggcgatcttgtaggcgatcacgccctgcttcacatcatccttgttcggcaggccgaggtgttccttcggggtcacgtagcacagcatagcggtgccgtaacgaccgatctcggtggcgccgatggcggaggtgatgtggtcgtaacccggagcggtatcggtggtcagcggtccgagggtgtagaacggggcgcccttgcacacggccttctccagctcgatgttcatacgcacggtgtcgaacggcacgtggcccgggccctcgatcatcacctgcacgtccttggcccaggcgcgctcggtcagctcgcccagagtcatgagctcggaaagctgcgcggcgtcgttcgcgtcggccagggagccggggcgcaggccatcgcccagagagaacgccacgtcgtacttggcgaagatgtcgcacagctcgtcgaagtgcgtgtacaggaagctctcctggtggtggcgcaggcaccagtcggccatgatggagccaccgcgggagacgatgccggtcacgcggttggcggtcagcggcacgtaacgcagcagcacaccggcgtggatggtcatgtaatccacaccctgctcgcactgttcgatcacggtgtcgcggaacagctcccagctcagcttggaggcatcatcctcgaccttttcgagggcctggtacatcggcacggtgccgatcggcacgggggagttgcgaagaatccactcacgggtggtgtggatgtcgttaccggtggacaggtccatcacggtatcggcgccccacttggtggcccacgtcagcttctccacttcctcgtcgatggaggaggtgacggccgagttgcccatgttggcgttgagcttggtcaggaaggcggatccgataatcatcggctc

SEQ ID NO: 76 - DNA, 44490 bp, Unknown
  R206_24m  MAG No. k141_7843
caacaaggtcgccgacccggccgacaagctggaacaggtcaccgtggtggatgaccagtacggtcgcctgaccttcaccaaggacatggccgaggcgattttccacctgctcgacagccacgccccctacggcacctacaatttgaccgggtccggtgcggtcaagtcgtgggcggagatcgcccgtgaggtgttcgatttgacgaacggtaacggcgacaaggtcaagcccatctcgacggccgagtatttcgcgaacgcgaccagcccggtcagcccgcgccccgtgcacagcacgctcgacctagcgaagatcgaggcggccggatacacgcccgccgactgggaggaaaccctcaaagaatacgtcacccgcgaacttaacaagcggtgaaacaggaagtgaaggaaaacaccatgaaaggcattatcttggctggtggttccggtacgcgtctgtatccgttgacgacggtgacgtcgaagcagttgctgccggtgtatgacaagccgatgatctactatccgctcagcgtgctcatgcttgcgggtatccgtgacatcctgatcatctccacgccgaaggacctaccgaacttcgaaaagctcctcggcgacggttcgcattacggcgtgcacttttcctataaggtgcagcccagcccggatggtttggcgcaggcattcctcttgggagaggagttcatcgacggcgagccgtgcgcgctcgtgctgggcgacaacatcttctacggcaacggtctgggcaccacattgcgcaaggccgtcgccaaggccgaaggcggcgggggcgcaagtgtgttcggctactatgtcgacgatccggaacgctatggtgtggtcgagttcgacgagcacaagaaggccgtgtccatcgaggagaagccgaagaagccgaagtcgcattacgcggtgacgggtctgtacttctacgacgagcgtgtggtcgagttcgccaagcgggtcaggccgtcggctcgtggcgaactggagatcacggacctgaacaagatgtatttggaggacggctccctgaacgtgcgtacgctgggccgcgggtacgcgtggctggatacgggcacgatggattccctgtacgaggcgggcgagttcgtgcgcaccgtacagcgcgcccagggcctgcccatcgccatcgtggaggaaatcgcctacgaaaatgggtggatttccaaggaggagctcctcgaatcggccgaacgttacggcaagagcccctatggcaagcatctcaaggatgtggccgaaggcaaagtcgtgattgttcctaacgactgattgactcggacgaatgcggaaacgccatagtattttgagattaatgctgagtgcgatagcagattacgcatttgccgatgtatatgacgacattgttcatcaatagtaaaaggggctgctgcattgcagtatgcagcagccccctatagcgtgcaataacgcgaattcctgtaccttggtggttattctgcctttttgcggccgcggcgcttcatagtttcggaggtggcattggcggcatcgaaaatcacggttttgctttccggataggcagcaccgttgacggactggtaagccacgtatccatagccgaatattaggtaaaacgggtgtcggaactctccgatgatgggcataactgcctgcgatatgcgagccgatgcatcctgtctttttccagaggctcactctgttgcgtatgcctgtgtgctattgcgacgaggcgtacgggaatggaccatgggcatattaccgtcagacatgctcgtgctttacactgaaatccactccacgtacactgatacccagtagcacaggaatactgggcacggcgacccgcccgcagacgacgggacgatactgcgtatacgggaaggaggtgtgccatgggcgacagagacttcagattcaaactggattgcgccccgcgggacgtgaccccgaaggcgttgagccaggctgtgtccgcattcgcaaggatactgtccgcagcggatgcgtccgactggcgcatctcccgcatggaactgcacagcatcgaccttgccgcgaaacccgtggtggtggacgagagaacggaacgctcgttcgccacactggacaccatcacccgcctggccacacgagacgacgtgaatcgggacgaggcattccggttctccggcgtattttccgcgttgagtgatctggccaaggagaccaacgcgaacatcaccgtctcctcgcacgaggcggagggcacgttcacgcccggcgtgctcaccggcatcaaccgtctgctgatccgtggatcacgccgctcgttcggtcatgtgcgcggcatggtggataaggtcatcctgcagcgcacgcaccgcacgctcgggctggtcgaccacgtcacccgcagccgcgtcgacgtgagattcggccccgaactcgacccgatcgtcaaacgcatccaagtgggcatggaggtcgatgcgcgcggcttcgtacgcgccgacgacggcgaactggtgtccgtggacgccgaggacctggagatcatcgccgacggccaccgcgccccggctactgccgaagacctggaagggatcatcagcctcgacttcactggcgctctcggctccgtcgatttcgtctccacgctgcgcgagacccatgaccacggcaccaccacgggaggcgggcgatgaaaatcaatgagagcgaatcttcacggcgctatcccgaacgcgccgtggtagacaccaacgtcatcgtcaacgtggcgctcggcaaggacgacaccaccgacccgtcattcctgccccgatccgaacgactgctcaacgacggcatcgccggggagctggaattgctgctgccctcgatggtgatgatcgaactgtcctgcaacttcgtcatccgctccggccaatccggacagacacgcagtcgggcacgtgaccacaagcaacggctgatcaaatggtgctatgactgtgaattgcccatggtcgatctgacggccgacgccgctggctggttcagcgaaacaccggcggttcagaacctccggccgggtgacgcggcgattcttgccagcgcgaagtacgcccacgccacccatgtctacacttgggacgacaaattcatccgcacggtgcagcaggcccgcgagcaaggccagaccgatatcatcgcatgcaacccgcccatgctcccgcccactcaaggcgaactggaactggctggaaactgacagacgcatagcgaatgagtcgtgtgccaatggcgatcggtcagggcacgactcgtacttgctttaccagcttgacgtcgtatccgtcgtatgcaggtgcatgttcattatatgaatccgaaagccaacgttacaacgatgacctatccatcgtttcaagccccgatggagagactggaccgccatcggggacggcaaaggcaacacgaaccgtgtaaagacagctggaatttgaaaaagtaaaaaatcatcacttgttccgcatcgggcactggtcataatcccacgggcatccattacgataggtcaactgcttataaccgtcagagacgctctgcccgatcatgcgtgagcaataatccagatcgatgattctcgccagacaatagatggtcactcgttgcgctccagactgtttaagcatgatggaggctgattcggcggtgcctcttgacgtccatgtatcgtcgatgagcagtacatgtcttagtgtctcatccgaatacgagccatccagcgagaacgtggatggtgcaatcgctcgatgtttctgctcattagccagcaatttcacctccgggatggttttattcagcatcggcgagaccaatccgttgagtgggtgtggctgaccatagcgttcgctggttgtggtcgacggtatggtagcccatgcgctcggcatcactccatcagacgtatgagttagacaactccaatggacgacaagcgcatcaccaagcacatatttcagcgtctcgcagtaatccttcttggattcagggcggttgcgcttgtatccatccatgacgcggtacatctgatcgaatttaatagcgtagttggcatcctgacccgatccgccatcagatgtgcgacgccgagagcctcagcctgttggcgcagactagtgcagctgtagcaaagcgatgtgctgtcccgcttgggaccgccgcaggtaggacagacatgatgcttagcactgcggtatatcactgttttggcatagctgcccaacctccaccccatactctgttcaaagcgggcgtatgcagccagcagatttagattcagcgtagagtcaagcatattgcgccttcgcgtcgagaatgtttcccagcaatgtgtctacatcgttgtcgaggaatgagatcctatcaagtgctttaccgacctcttcgacactgtgcacgacgaacacgcctggcttgttgcgatattcctgcgcccattcggtgcgttccagtacgacgtcacggaaaatcaacgggcgtccgtgacgttgcgcctgacgggcctgaatacgtgtgccggaatgttccgatgcctcaaccaccacagtggccagaccatatcccgacatcagcgcgttgcgcatcgggaatgtctgtttggttggcggactgtcaggccagaactgggatagcaccagtccccgcttttcgatgcttttctgcagttcacggttggatgcgggatagcaacggttaatgcccgtgccaatgaatgcgaccgttcgtccgcctgcttccaatgttgcacggtgggcgaacgagtcgacgccttcagccagtcctgcgattacagtcaatccacgttcgcacagcatgcaagccgtgtcatgggcgaacgtggcaccctccggcgagcatttgcgcgatcccacgacgctaacacctaaatcgttcgagagcagagaacccttggcgaacaggaatggcggcacgtctacgaccgatcgcagccgcgaggggaaccggtcgtcgaacacggtgaccaagtcaagactttgctctcgccactgcgtcaccttctggttggcttgattccacgcggcattcgctttcgccgtgtattcgacggatggcatgtcctccacctcaaacagtgagccctgttcattcgtcggcacatattcgtgttcacgaagcggattatgcaacggatccatccgatgcctgagcacacgcacagcactgccttcaactagacactcgttggccaatgaagaccacgtatcaggccgttcgcagcactcaatcaatgcgatcagagcagcgttttcaacatcgagctgtctcctatcatcaaaccgcaactccaatcacctccaacatcgtagagtctcgctcaaccggaaaacaacgagatatcgacataccattttaccggcaaagaagtaaattattctcttcccgctgtctatttagaaggctgtggcacttgaaacgtacctgtacaatagtcgaaactgcgatgttgcggtttgtgtttcgtgaccgaggaggggtgattgtggacggtcgttgtgtgagagggcgtgccgtgaattatcagtggcgggggaagcctattgaacatgtagatggtgagtccgctcaacgtgccgttgctagatggttcgctgctatggcagctaatcaggaatttgcctggggattgctggattcaaggcgttataacaaatacaagatgcgattagaggcttttgttgaggagaaattggatcgtgccgtggccggcagcctgactccaggcaatgaagtcatttttctcgctcattcgaagcgtggggacgcgccaatgttcgagtttcgctggcatcgcgatgcgcgtgaactgagagttggcaagcgcgaacaaatacggcattacgatgctgagccgttggatttaattgatgtggtgtggggctgcatatgcatctcaaggatgtgcggagtggcgatgatgagctaatacaaaaagcccaaaataaggaaatcgatagagcgattgcagtatatgagcagcaggcgtccgatgggcgagagactgtttcgtgagagataatcggcgatatatatattagatatagtaatattttggaatggcggtgagaatgatggggcgagctgagtacgactatcgcgaattggcttatgatttgtaccatagcggtgacgagttgctagatcagctcattgagatgcgtaggcgacgtggcatgactcagacgcagttggctgatgagatgaacgtttctcagggatatatttctcaaattgaaaacggcaagacaaatatggtgtctttgctaactgactatgctttggaagttggcgctcgtattgaatatgtggtggagcctgcggaggcgaagcccgatggcagtcgtcattatttgcgtgaggaaattcgagccgtggtgaatggagtagcttcttgggagagtggtgaattcacttttgaacggcagataggacgattgcgcgttgaatcgcacgcatctgggactaacggaaacgatatgctgggattctcccttctatatgtagataacgatgccctcgctcccgaaactgttgcgcaaggggaggcggtgccagcatgattagtaagattgcgttgatttcagaacggagcatgagagatctagcttatgccgatgatggctcaggggagtcaaatattgattttttatttaacatgcagactccggaagggcgtccttggcctcatgaactgacggtacatgtggagattcgtcccgaaaaagctccgaatgattctgagccagtattttctgcggatgtatgctatgcagttgcttttagtggcgaaaaggtgtcggataagttgaccccggaaatgcttgctgatctttggccgtatgtccgtccggagctagttgtgcaattgcgacggtatgatttgtcgtctgccattcttcctctgagcatagggtttgaagcgggtggacaccgttagcagaagggggccaatgccttgcggcgttggccctcgcttgtgattgaggttggaaagatattgatgggggcttcactgagtattcacagatatcatatttatacatatagatagaggaaggatttgtttgtgatgtaccttcgcgcatttccgaatgatttctcaatttggcaagctgcaatagaaattgcaacaataattattgctatagcttcgatttcggtagcgctgattgctgctgatcaggcgcaaagggctaaccaaattgctgtcgatacttacaagcatacggaggaaaaagattctaatgatttgaagtttgcccaagcaaatatgatttcgacatggttagtatctgatgccaatggtgagttgctcgtatcaaatgactcaaaaacagtagatgtcatagtcaataatgattccaagcagcccatttacaatgtcgttttgacaacaggtacataccaaggggctggacaaccattcttgaaaggaaatgagtttacgtcttcgattggtaccgtgccgccgggacgatataagactcgggttccatatccgggatctggaatgcatatcagaatcgaatcagcaattacatttactgatgttcgaggtctctcttggttgagagatgccacaggtgttcttcgtgagatcgatgacgcctataaagcattgggggttaaactcccaccaagtaattggcagtcgcttacaaaaactgaataatctatgggccaatcagccgtttagatcctctccgtggggctggtgcatgtattgttcaacccaagccatgctggtttttggaaattaaaagcctgaattatcattaattcgaaatccaggcttttacagtattcgtataatcgcgaattaagcagaaatcactcagccttcttgcggccgcggcgcttcatggtgccggcagtggcgtttgcgacatcaaaaatcacggtcttgtcttccgggtaagcagtgccattgacggaggcgaaagagacctcgccttctggagcttcgacaagcgtgaagtacttggaaattgcttcaacaagcacagcattcttgatacttacagacgtagtctgcttgccctcacccttgctgaatttcacggcattatccgccttggcggtagtcggcgtgacggcaatttgtctggttttatcgttaataaggatcttaacttgtgctggaaaattcagcacttctgcggtggccttattaaaacgtacaacggaatcggtaacggtcattaccgttttgccaacgggcttaactagctgaacttcttcgaatccttgaagcaaggatgccataatatactccttcacactgcataaatattattgacaattttgattgtaatgaatgataatttgaattacaattctatatatcacattctcaatttcaattcataatatggaatagggaaatagtgctgtcgcaaaatattgagtgagaatacattgtgattgcgattgtgtacagttattctgcagtcgtatcaagggttttggtcattgttcacaaggatacaaaagctcgagaagttcccggtaggtgctaaattatagaccatctgtgaaaatttcccgaagaggtaaggaagaacattgaccctcgctgatttgctgcagattgttcgcaagcatctcgcgtctgcgattatctcgtttgtggtggtgtttgctgcggttgcagctgtcacgttcatcatgccgccgaagtacacggctacggctgaagtgttcgccacgtatgccggtcagtccggcgagacgcagaccaccaacgatatgagctctggtgccaattatttgaatacccagatcacgacgtatccggaactggtgaagaccgaagccgtgctccagcccgtcattaaggacctcggtctggatatgaccacgaccgatcttgccgatgtggtgaccgctacgaaccccacgaacacgttcatggtggatatctcggcggaagtcggcgatccgcatcaagcggccgacatcgccaacagcgtggcgaagaacctctccgatcagatttcttccgacctgtacaacaactcctcttccagcggctctcccatcaagctcacggtagtgcagaaggctcagactcctaccgggcagagctccccgaacattccgctgtacctggccgtgggcctgattctcggcatcatcgtgggcgtcggcgttgccctgctgagggacatcctcaacaccaaggtggactccaccgatgacgtgcgcgaactgacccacgcctcttcgctgggtactgtgcctcaggcttcgattcttgacgacagccgtccggtcgtagtcgctcagccggccggtagcgaggctgaggaattccgccgcatccgcacgaacctttcgttcctcaccaccaccgctacgcagggtcatggccgactgctggtcatcacctctaccgatccgtccgaaggtaagaccacggtttccgccaatgttgccgtggctctcgccgaggaaggcaagagtgtgctgcttatcgacgccgatctgcgccacccgtccgtggctcacaagctcggcattgaaggccacgtgggcctgtctcacgtgctgtctcgccaggcgtccccggccgatgtcattcagaagtattggaagccgaacctgcacatcatgcctgccggcaagcgcccggctaacgccagcatcttgctgaactccgatctcatgaaggaaatggtcgagcaggccctcacccagtacgattacgtgattatcgatactgctccgctgtccgtggccaacgacgccaccgtgttcggacgtatggctggcggtctggtgctcgtgaccggtaagggcgtagtggagaagaaggagctgagaagcaccgctacggctctgcagaccgccgaagtgccgattctcggcttcattttcaacttcgctgatccgaagaagatacactcgaagaactattactactactattacgaggacggcaacaagcgcagctctcataagggtgccaagagcaagggcgagaagaaagcccgcaagtaatagtttggcgtttgccgatcgtcttgcaatataaaccgtgcggtacttctgtgccgcacggtttactgttataagactgagttgttggatttatggtgctggctgtatatcgaatagtaaagaattgtgacattcttgaataccagctggcacgctcggcatagggctggataaactgacagtttggaatgacttcaatgacgcaaaggaatgagaagagcatgggaacagatgaacgccctgaaccgaacgcggaatctggttcctctacgtcgccggctcgcggcgatatcgtcgataccttctgggacataccgcctatctcatttgacgggaacgcaggcagcgctgcgccgagtgacggcaacagtactggtgctgttgcggatggctctcaatctgcattccccagctttgacgaagtattggaatggcctactgcgagtgcggcgaatactgctggcgatgcctcttccccttccgatgctgtggctactgccccgatgacttttgcggcacctgatactgcggaaagcgctcagtcgcctcagcgggatgacaatgcgacgctgccgctttttgcgccggttcctgaagccaagccgcaacgtgatagtgccatagacgatttgaacatcgacttcagtgccattgaacagaaccccgagccggtggaggagccggaagaagaccgtgtggcagagactcctcgcggcggtaagggcggcaagaagaggaccaagggcattatcatttcggtgattgttgcgctggtggtgattgcagcgatcattggtggtgtatggtactggcgtttcagcgagcagcgtcaggaaagccatcagctgcatcaggatgcgttgacagcatgtactgaggccgtggaccagaattccaccgctcagaaggcgctgaccaaggcgttggttgataccaagagtgctcaaagcattacagctgatcaagtggctgacggtgcgaccgtggatgcgctgaagaaggcaatcgccgcggtaaagaacgtggaagcggtggagtgcaagacttcagcttccacgtcggacctcaaggaatatgccaagacggccactagccagaccaagaccgccaagaagaacgccactgcgattactgccgcggcaaaggccgtgacggacagcaagaacgctaaggatcaggctaacgctcagcaggcgttgcagggcaagatagccgaggctcagactttgctggacaacagcctgtatgccgtcgacgataattcaacgcgcgtgacactggaaagcgacatcgccaacgccaataccgtgctgtcccagcagggcactgacgtaaaggccatgcaggatgccgtcaacacgctgactgcgtccatggatgcagtcaacacgtccatggccaactacagcgcagctgttgaggctcagcaagaagcagcgcggcagaaagctctgaatgattattatgcacgattaaggcagcagcagttgttgcagcagcgacagcaaacacagccagacggtacagacgatccggggacaggtggccaggcggctgatcaggggacgaaaccgaaagatgatccggaaccgaaagatgatccggaaccgaaagatgatccggaaccgaaagatgagtcgaagtagtaagttatcgtgctctagcctaaattgtcaaaggaaccgcgaataacagtagtgcgcatttccaccatttgctgttgcaaaccagctcaatatacgcgtgctttgtgccgctatgccgtcacggattcgcataatcagttgtggagggcacttcgtatgacacggtaaaagtgatctctagggcgttgcataatgcaaggattcggctgataaggcgcagaaatgctgatgccggtccccgatgattgggaaccggcatcatgcgtatgagttcgctcggcgtttgggccgggtttcactcagccttcttacggccgcggcgcttcatggtgcctgcagtggcgttggcggcgtcgaagatcacggtcttgctgtctgggtaggcggtgccgttcacggactgataggagacttcgccttcgggggattccgccaaggtgaagtctccttgcggcgcggaacttgttgtgtacgtgttgatttggctggcttagtagctcttgtgcgcctgccaatacgcgtacgcgccggaaatcgagccataatggccgttgcaataattcacaaaccacttgaactgggtctggtagttggtctgccagtctgcacctgcggaagccatcttgctgcccggcagcgcctgcggcaggccataagcacctgaagacgggttcgtggcggtggggctccagccggattcgtggctgatgatgaagttggcggcggtgaagtcggcctcggagtagccgttggaaatcaggtagtcatgcgcccaggactgaatctcgccggccggcgtggtggtgccgaggctggcggcgctgggcgaagacacggtggcggtgcccaccagaatcaccttatcgaccggagccttcttgacccaggaggtgaacacattggaggaaacgacctgatctccggagcgggttaccagagacgtggtctccagcacgcccttctcgccttcggtctcgaccttctcctggcccttgggcaggctcgaggtctccttgcgcacttcattgaaggcgatttcggtgtcggtggtctccaccgtggtgttggcgcggttgatggaaatgactgtggactcgctgaccttggcatccaggctcggagtcacgctgtcttccggatcgaggacgatatcgccggtttccagcacatccttgacggtggtcatgttggctttttcgccgagaaccacgcgagacttgccattgaccttgactgtcacgtaggtggtgctcttgagcgcgccgcgggatgccgaacgggaagccgcaccatcagtggcggagaatgaggttggggtgatggaaggtgtagcggtgctcgactgatagaagtcgcgggatataacgcctgcagtggcaatgagacccactgcggccacggccgccgcgatcttcgcccactggccccgagacagggttttgacgaatgaggtccgctcagcgtgcttcgacattgcgctccttggttgggtacacactgctttccatcataggacgttgagtggatgaataaaaaaaccgtggtgggtgttcgacccgccacggatggcatatgtagtagttagcagtgcaaggaagcgctatatatgggcttttccgcgcttccgttgccgcagtgtgataaggcttactgctgctcctgcgctgcctgctgtgctttggcggcggccagatccagcgccttggcctgggcgatgaggtcgtccagatcggaggcctgcagcgcgccggcctgctggaagatgacctcgccctgcttggcaatcatcagcgtaggcacagcttgaatgccggcggcctgggccagatcctggttggcgtcgatatccaccttgacgaaggcgatgttcgcgttctccggctcgttggaggccgcctcgaaaatcgggccgaacgcgcggcacgggccgcaccaggtggcccagaagtcaacgaacacgatttcgttgtcggtaatggtcttctcaaactcagctgaagtgatggcggtggtggccattgaagttccttcctcaaacacagtgcttgatgctgtgtaccagtttcccagcaacacccaacatttcggcaaaagtttgtgccccaagctgaatggattgcgggcgcatggaggcgatgaggcgctttgctgagaattcacagacaatttttcggtgaattgtgcccatgttcatcaatgcgcgcgataatgagaccatgccagtcatgaatgatgaagtgcccgacgagggcgattatgatgccggccgtggccgcggcgaattcgacaacatcacgcccgaggacttcatccacgggggcggttccggccacggcaacccgccgggctggctgggaccggccgacatcaaccgggcgcgtcatcagatgcccatcgcatacgtggagatcgtgcccgtgcgcaccgatgagatgggccgcatctcccaggtgggctcgctgctgcgcgtcgccgaagacgggtcgatcgagcgtacgctgatcaccggccgtgtgctgtaccacgagacgctgcgcgaggccatcgcccgcaatgtggccaaggatttgggcgatatcgccctgccgctgctgccggtcgggctccagccgttcaccgtggccgaattcttccctacgccgggactgagcgaatactacgatccgcgccagcacgccatcgcactgtgctacgtggtgcccatcgccggcgactgcaagccacaggacgagacgctggatgtggaatgggtggatcccaagagcgacgtaatgaacacgttcgtgacgcagatggtcaacggccacgggcgcatcgtgcggcaggcgttggcctgggccggaatctgacagttgttttgcttcccgctggtggggatggcgcgtggcgacggagggcggtccgcgttgaaaccgctcccagccgactgagccgacagctccgccagtggggtgtgaatgtgaaggagtaattcatggcaatcgaattggccaatcatatctatcgcgatggcgaaggcgtgccggtggtgctgatgaacgcctacccggtggaccaccgcatgtgggacgtgtgcgcgaaggcgctcgccgacttcgccgacctgaacgatgtgccggacttcccgatttgggcgccggatatggccggctccggcgcatccccggtgccgagcgatgccgattccggcccgcgtatggccaacggcgcgtacagcgaggcgctggatcgcctggccggagcctacgtggacctgatcaaggccgccggctacgagcaggcgatctgggtcggactgtcgatgggcggctacgtggcgatggacatccagcgcctgtaccccgaaacggtggccggactggccttgtgtgacacgatggccgcgtccgacggcgtgggcggagagaaccgactgaagatggcggacgccgccgaacagacgaactcggtcgaaccggtcatgcacttcgcgcaaccggccgatggcgattccaccgtcaagaagactcctgaattcatcgcgaccatgaccgactggatcaacgaacagaacccggctggtctggcctggcgtcagcgcatgacctatggccggcccgaactgggggcggtgccggaaacgatcagcgcaccgagcctggtggtgtccggcgaactggacccctccagcaatccgagtgtgatgcgtccgctcgccgagcgaatcgccggcgccgaattcatcgacattccggactgcggccatttcagtgccgtcgaacatccggataccgtggcgcgagcactgctctcgctcgtcaggcgcgtgcagaacgcgcagaagaacgcataggagacctcgatgggcactgacattcatttttcgcccctggcgctgacccatgcgctgccgttcctgccgctcgcgcaaggtgacatcgactatcaggtggaccggcgcggtgaacccggtctgatcgacgagctgttggccgagccgaccaccaaagtcgtgcttacgcgcggcggacttgtcgccgtaccgcgcggccaaggcgagctcgtggactatgagaacgtgaaaatgcggctcgccacgttgccgggctcctatgtgtccgccgaactggcacgctaccccgaagcggtcgccatgttccttggctcctatgtcggggcgcgcggcgaatccgtggtcgccgtggatatcacgcgcgtgccggaagccggcgttcccggtgttggcgggattgctggtgtttccggtgctgccggcggcgtgctcggcacccaggattccggcaccgtggacggcgcgctgggcaagaacggcatcagcggaggtgctgccgccggaatacggcagccgggaaacgccaagggcaatggtggcgtaaccacagccaagatttccgggccgctcggtgtgccggattcggcagggcaaggtgcggacgatgccttcgatgattcggtcggcgcgcccgtacagcccttggccccgaagcccacgctgctgcaacaggccgtgacccggttcgactgggtggacctgcgcggattcgcccctcacgccaacgcgcgcgaggctgggcaagccaccagtgccatcaccttaagcatctggcacagccgccagcggttctgccccacctgtggcgcggcggtccggccggcgctcgccggatgggcgcagcgatgcaccaacgaggcggacggcaaccgtgtgctgttcccacgcgtggagccggcggtcatcaccgccatcgtggacgggcgcgatcgtctgctgctgcaacacaacgcggcatggaaggattcgaggctgtattcggtgtccgccggatttgtggaggcgggggagaaccttgaacacgcctgccgccgcgaggccatggaagagaccggcatcaagctcggcgaggtacggtacctgggctcgcagccgtggccgttcccggcttcgctgatgatggcgttcaaggcacatgcgatcaccaccgacgtgcatgtggacggcgaggagaccatgaccgcgcgatgggtcacacgcgacgaatacacggccgagctcatcgccggccgtatggcggcgccgggccgcgccaccatcgcccgctacatgattgaggaatggctcggtcgcgagctgtgacggaccgcgaagataggttaggcttatgactatgagtgatgacaacgaaaacgaacagccgctgaacctcgacattcccgaccacctcgaatactccgaggagcatgcttgggtggaccgttcggtcgaccccgcaatcatcggcataaccgaatacgccgccgaccagcttggcgaacttgtgttcgtggatttgcctgagcctggcgcccgtgtggaggccggcgacgagatcgtggagcttgaatcctccaaggccgtccagccgttgatcagccccgtggcgggtacggtcaagtatgtgaaccgtgacgtggcggacgacccgtccgtggtcaacggcgatccgtacggcgaaggctggctgctgaaggtcgagcttgacgacgatgagccggagctgctgagcgccgacgaatacgcgaaggtcgtgcggtagttccacccatggctcccctccctgaggggagccagtatgtggcatcaaacctatatgcatcgtgcctcttatggaggggagccaagaaaatgaggcgtatggcctatattggtgtctatgagaagcccacgcgaggattttgaggcggcaggcaagcgactgccttgggatgctgctgctcgcaatgcagcgctgtccgccaccgcgccagtctctgacgtcaaggcatccgccaatggcgccgacaatgccagcaatgccagcaatgctgaacattccgatgacatgcccaccgtgccgattcccgcacgcaaggctgccacgacgttcgacaccccctccaagcgtgagcgcatcgaggtcaagccgccgatcacccgcttcatacgtcgtgccatcacccgcgtgttcggcgtatggtcacacatctccactcaggtggtgcgccaatggggctggtatccgcgagtggaaccctatgtgggttatggcaccggcgattactcgcgcctgatctgccgcacggtatacgcccccaagcatgcgcaatccggcgaactgatccgcggcatccgcggcatgcttgccgtgcccgcgccgcgcacccacgtgcaggccagcattgatgacacgccgctcaacaccgtgcagatcggcgtctccgaggtctatgacaaggtggaccgcacgcgcgatctcggcagcgaatacgccatctccgattccgccggatacctcgacctcgtggccgagcatcgtctggtgcccggcatccatcgcgtctcctacagcgtggccaaccgcaaacccgtgagcgccaacctgtacaccatccccgccagtgccaaagtcggcatcatctccgatgtggacgacaccatcatgatcacacaggccccggtgccatggaaggccgcgtacaacctgctgttcctcgaccccaagaagaaagcctccgtgccgggcatgagcgtgctgttcacccgcatcgccgacttgttccccggcgcaccgttcttctatctttcgacatcgccctggaatgtggagagttcgattcgcaacttcatcactgaccatggttttcccgaaggcccgctgctgctgcgcgacctcgacccgaggcccaagaccttcgtgcccaccggcccccagcacaaacttgagtttgccgaacaacttatggccgacttcccggacatgaagttcattctggtgggcgatgacgggcagaaggacccgaccacgtacgccaccatcgcccgcagatatcccggacgtgtactggctatcgtcattcgtgagttgagcccgcgcgaatcaaccggattggcgtcggtgacgggactcacctcgacccagccgactccggtaaccgatgtaccagtattcaccggcaccaccggctcgaacattctgaagaccatgctgccgtatctgaagacggtgttgcgataagcgcggcgtgatgaacgccgaatgcgtcctggtgtggtgcctcgcctataatcgcgtggtatgactgacgagagcacaaacgccgcggccgcgatgccgccttacgccaagcgcgagccgaagcgccgcgaattccacggtgacgttttcgaagacgattacgagtggatgcgagacaaagactccgatgatgtgcgcagctacgtagctgccgaaaaccagtactgcgagcgtcgcatggcgcatctggcggatttccggcatacgttgtttgaagagctgaaatcgcatgtggaagagaccgatatgtctgttcctacgcgcgtcaatgattactggtacttcacccgcacgcagcagggcaaacagtatggcgtgcaatgccgcatccccgtgcgcgatgccgatgactgggacccgccggtcgtggatccgcaaggcgcgcccggctccatgcccggtgaacaggtcgtttttgatgcgaacaaggaatccgaggggcatgacttcttccggctcggcggcttggatctgagcaaggacggccgttggatgctgtacggcgtggatgttgcgggagacgaacgatatgatttccgcattcgcgaccttgccgggctggagaccggggagccggtcagcgaactgcccgaacagttcaccggcattggcagcgcatgcttcacgccggacggccaatgggtgttctgggtggaattggacgattcctggcggccgctcgccgtgtggcggcatcgtgttggcacggcggtcgaatcggatgtgtgcgtgtaccgagaaaccgatgaacggttctgggtgggcgtcggcatcagttttgatgagcgcaatatcgtgatcggcaccggttccaaaaccaccaccgaagtgctgatgctgccggtggccacgcctgaaggcgaattccaagccttcattccacgtcagaacgatattgaatatgatgtgagctttgcctgttttgaaggcgcgggggagaacggtgcggatgtgccactcgccgtggtctaccacaacgccgccaatccgaatttcgaaatcgacgtcattgacatgcgtggccatgagccgccgtaccgactcggcgaaggcgtgtgcatcgccgccgggtcgccgtacggctgtgaacatggtgagccggataagccgattaccgaggcatacttcaacgccgccaatccggcgatattgcagggtgcccacggtctgggcatcgaaggcatcgcgttgcatcgcaactttgtgtccctgagctaccgtgccgacggccagccgcacgtggcatacatgaccaagagcgcggctgccgccgacttcctggccggacggccgtggcggtttacggaactgctgccgcctgccctggaggacgactgggacatggttgccgccgatcgcgaaggcttcaccggcgatcatggcgagatcttgtggaccgaagatgaggcccccacggatcacacgtcatcttccgatggtgccagcgacgaccacctgcccggtgagacccggcgcttgtacaccatcggcgtcggcggcaacccatcgtatgaggcgccgcgcatgcgctactcgttcgccagctacacccgcccgggcgagctgcacgaaatcgatcccgccaccggcgaagatgcgctgctgaaacgagccaccgtgctgggcgacttcaatccacgcgattacatggaacgccgtgtgtggattaccgcgcgcgacggcgaacgcattcctgtttccctcgtctggcaccgcgattgcccggcgcaggattcgccgatgttcattaccggatatggtgcatacgagatttcctccgatccggggttctcggtctctcgtctgagcatgttggatcgcggtgtgctgtacgccgtgccgcacattcgtggcggcggcgaaatgggacgcgcctggtatgaacaggggcgcagactgaacaagaagcattcctttgaggacttcgtggacgccacgcgcgcgctgcagaaggcgcatttggctgatgcttggcgcaccgtggccaacggcggatccgctggcggcctgctgatgggcgcgattgccaatatggcacccgaatgctacgccggtgttgaggcggatgtgccgttcgtggacgcgttgacctccattcttgacccggacttgccgttgaccgtcaccgaatgggacgaatggggagacccgttgcatgaccctgaggtgtatcagtacatgaagtcgtacacgccatacgagaatgtgccggtggccgtactcgagggcggcgacgacgaggctgccggtgacggcagtgctgatggggctgccgccggcgcggtcgccgccgcgcaattcccgagaatcttcattaccacctcgatgaacgacacccgcgtgctgtacgtcgagccgctcaaatggctggctcgtctgcagtccgccggcgtggacgcggtggccaagatcgaggtcgaggccggtcacggcggtctatccgggcgttacaaacaatgggaagaggtttcctatgagaacgcttggtgcatggatgtgatggggctcgctcattaggtcatttcgtcgttcattaggtcggtgtcctcttctatgtgagactgaaatgccgccatttcagtccctgaaatgaacccacaccgacctaatgaacactaaaatgacctaatgaatgtctcgacacgatacgcatgttggttgtgtccactagctgagcgggttcgggccggcaggtggtcgcgcgagtaggctccttgaactatggcaaagacatataaaatcgccgttattcccggcgacggtattggcaaggaagtcactccgtgggctcagaaggctttggaaaaggccgctgaaggcgtagctgacttcgagtatgagaacttcgacttgggtgccgagcgttatctgcgcgatggtgcgatcctgcccgaggacgaagaggagcgcatcaaggccaacgacgcgattctgctcggcgccgtgggcgatccgcgcatcaaggccggcattctggaacgcggcctgctgctgaagctgcgcttcgacctcgaccagtacgtgaacctgcgcccctccaagctgtacaagggcgtcacctcgccgctcgccaaccccggcgacatcgacttcgtggtggtgcgtgaaggcaccgaaggtctgtactgcggcgccggcggcgcggtgcgccgcaacaccccgcaggaggtggccaccgaggtgtccatcaacaccgcatacggtgtggagcgtgtggtgcgttacgccttcaagctcgctatgaagcgcaagaagcacgtcaccctggtgcacaagaagaacgtgctcgtcaacgccggtgatatgtggcaacgcatcgtcgacaaggtcggcgaggaataccctgaggtcacccacgactaccagcacatcgatgcggccaccatcttcctggtctccgacccgagccgtttcgatgtgattctcaccgacaacctcttcggcgacattctgaccgatgaggccggctccgtggtgggcggcgtgggctactccgcctccggctgcatcaacgcctccgacgagttcccgtccatgttcgagccgattcacggttccgctccggacatcgccggtcagaacaaggccaacccgaccgccgccatcctctccgccgccatgctgctcgagcatctcggctttgatgatgcggccaagaagattcacaccgccgtcgaagcggacatcgaggagctcggctccaccgtgcgctccaccgaccaggtcggcaaggacattctggcccgcatgtgatgtcccacttggctcccctccagaggggagccaagtttatactgagttgcatgcaaatgcgacatggggaatgcaaaaccgttggcggcaaactagtcgccgtgaccgtatccgtcgatgatgacggcaccgcacagtcatgccatatcagcggtgatttctttattgaatcagtttcggatgccgaatctcatgctttgttgcgtgacttggaacaggctctaattagtgatgattcattgcggtccgtattggacgctcaccctagttgccaaattatcggcacagatgaagttgccatcaaaaccgcatatagccgagccgtaagcagcaacttgcccccgctggtgggggctcccgcgcagcgggtgggggcggtcggccccgatgcgccgaacaccccggcatccatcaatacacaaaccaagcagcccgacaaaagctctgaataccgggagcgctggaacgccctcagacctcaactcaccgtgatccacgaccatccgcgtactccggacgagcaaatggccattgacgagacctgggcgcgtgaagtcgcagcaggaacacgacagccgaccatccgattatgggagtgggcgggcccggctgtggtcatcggccgtttccaatcggcccaggacgaggtgaatctggacattgccaagcagctcggtttcgacgtggtgcgccgttgcacgggtggtggcgcgatgtttatcgaaccgggcaacaccattacctattctctgtatgcaccgctcgatttcgttcagggcgtaagcatcgaagaatcctaccggctctgtgactggtggctggtcgaagcgctgcgcgaacttggcttggatgtgcggttcgcgggcctcaatgatatcgcctcgcagtacggcaagatcgggggagcggcgcaacggcgcttccccgtaggctcaggcggcgcggtgctgcaccatgtgaccatggcatatgacatcgatgcggccaagatgagccgtgtgctcaacaccagtcgcgagaagatgtcagacaaagcggtgaaatcagcagtcaaacgcgtggacccgatgaaaagccagacgggtctcagccgcgaacacatcgtcgaacaccttattgactggtttgcggcgtgatttcaccgatggccgtatacgattttgccggtggccgtgcgtggttttgtcatgggcgagcgcggtaaccgcgacagtgccgtttttcgcggtaacacattcgtcagcatgtcgtacggctatcggatcgcgccacacatgaagtgacgaatgatggcatgcttctgacgaaacctgtggggcgcgttacaatatgacggatggccgacgacggtcgtaggacgataaggatggtgcgatgagcttggaaacgccaaacgcttttgctgacgaggagaacatcctgctgcatacggcattgttcaagcaggtatcgccagccgaagccgaggagctgctgccgcatttgaagcgtgcgaccttcgataagggcgactatatcttctccgaaggcgataccgatcagcgcatgtatctactggagcaggggcgcgtcaagctgattcgcacttcttccgatgaccgcgtgcagctgctgtccatccacgcgccgggcgaagtgcttggcgagattccggtattcgaccctcatggtggcccgcgcaccgcgtccgcggtgtccatgagccatggcacgcgcgtggtctggctggagcatgatgccctgttcgcatggcttgatgagcatccgcgtgtggccatcgacatgttgcaggtcatggccaaccgccagcgcggcaacaacgaacgcatctccgacttggtattcatggatgtgccggcgcgtctggccaagacattgctcaacttgggctcacgtttcggcgagccggtggaacagggcctcaaagtgccgcatgacctgactcaggaagagctggcccaactggtgggctccagtcgtgagaccgtgaacaaggcgttgatggacttttccaaccgcggatggatcgcacgtgacggtcgatcgatcatcatcttccagccaggcatgctgattcgacgctcgcggcgctgaccgttcggctgacttccagccaatgttacgctagtgcggttcttgtgatgatatgttcacggaagctgactgcgagcccggttggtagggcaccccatttagaatggggcccatgcccaaaaagaagtccctcactctccaacgtgtgcttgttctcctcttggcctatatcatgcttgccgtctgcggtggcgtggcggccagcgtgttgtttgtaccgggtgtggtcggtgccaataaagccgccaaagcggtgattccgtcgctcaaggtagaaaacgtggacttcgacgtgaccggtctgccccagaagtcgacgatgtacgcgcgagacggttccaccgttatcgcgacgttctacaaccaaaaccgtatcgtcgtgccgctgaagaagatttccaaaaccatgcagcaggcagtggtggcgcgcgaggaccgtcgattctggactcacgccggcgtcgacgtgcaaggcgtgatgcgtgcgttcgtgcagacctacctcgtcaaaggctcccagcagggtggttcgtcgctgacccagcagtacgtcaagaacgtgctgctcatgcaggcgatcgaggacgacgacccgatcgcccagtaccatgccaccgaagacaccgtcgcccgtaagattcgcgagatgctgatctccgtgcagatggagaagaagtattccaaggccgagattctgcagggctatctgaacatcgcccagttcggcaacaacctgtatggcgtggaaaccgcagcccagcgctacttcagcgtgtccgccgccgatttgaacgtggtgcagtccgccaccatcgcggctatcaccaagaacccgagccagtacgatccgctggtcgaggagaaccagaaggaaagcgagaaccagcgcaacatcgtgctcaagctgatgctgcaggaggggtacatcacccagaagcagtacaccgaagccgtgaacacgccgctgaaggacacgctgaaggtgcaggccgtgaacgtcggctgccaggacaccggcgactacgcatacttctgtgatttcgtggtgcatcgcatccagaactccgaagaattcggcaagactcgtgcggagcgtaacaagctgctgcaggagggtggcctgaagatcgtcaccacgttggatgtggaagcgaattccacgatgatggagaccgcgcgtaataccattccaccggacgatcccagcggcatggaaatagccatggccgcagtcaaaccgggaaccggcgaggtgctgagctttggcctgaatcgttactatgacgccactccggcagccgcgaacgatccgaccaagtcgggccagaactatgccgtcgatctggtggacggcggcggctccggttggaccattggttcgtcttggaagccgatcaacctgattgcgtggatggaggcgggtcattcgatcaacgacaacctacagaccaccacgacgtaccccacgaccgacttcgcctgcaacaactacaagggcggtgccgattcgtggaacgtgtcgaacgccatgggcgccggcacggtgaacccggaaagcccgttcctcggtctggtgcgatcgcacaacaccacccaggcctccatgggcgccatcctcaaactgtgcaaggtggcggacaccgcgaccaaactgggataccatgacgccgccacgggtgagaccatcgacaaaacccaggtgtatacaccatccatgatgatcggctcggtgaatgtgtccccgctgaccatggcgagcatcttcgccgtatacgcctcgaatggtgtgcaatgcaacccgattgccatcagcaaggtgaccgataaggacggcaacgatctcaaggttccatccgcgaactgccatcaggcggtggataaggacatcatccaaacactcgcttataccctgaaccaaggtacggtgcggccggatggtgccggttggtcattcagattggctgacgggcgtaagtcgtttggtaagaccggtaccagtgaggatcttgcggtgtccggtggatcgttcattcctaatcagattgcggcgttcgctgtggtcggcgatgcacagaacccgtacaccaaccgtatttccaacattgccatcaacggccggtacaacagctattgggatggttcgacaatcgcagctccggccgttaccaacttcttcaatagctacatttccaagaagaaaataccgattgacaacgattacggccagcccgtctcgaagtacaccacgactggcaagtacctgggcattggcggacgaacgttcagcgtgccgcagaccactacgaatggcaacagccaatcgcagacgaccaccaatggtcaatcccagtcgcagtctcagtcgcagaacactgggcaaaacaacacccaaacccagggcaccaattcagagcggtcgaatgatggccagtgattggtgattggcgtttgacatttggtgattgcaggccggctgagtctacgtaacatagtcgactgcgatacccaaattacgtagtttgcgggcgttacctgtttcaggtgacgcccgttttacaatacttaatgacaacgccagcgcgttcatcgaatattcgccatgaacgcgcattggaaaggggaacgatgagcaacgacgatctgacgcatgagaattttgattttcgtggattcgacgtgccggatctcaaagcggtgacgctggcttcgtcttcggacggcgaacagtccaagcagccgaagaccaagcacgaggatgcatcgaggaaccgtaggcacggtaagaagaagtcaaaatccgacgcacggtccaagaagcgggccggcgcgggcaagacgagcgaatcgttcgatgattatgaggattatgaggaaagggaagctgtgagcaaggcagataagaaagccagcaaggaccgtccgggactgtttgcgccaatgacgctgcgcgaagtgaccgtgcgtaatcgtatttggttgccgccgatgtgcacgtattcgtcgttcgcctgcgatggtaggcccacgccgttccactaccagcattacgtgtctcgtgcgttcggcggattcggcatggtgatcgtcgaatccaccgccgtggctcctgaagggcgtatcacgccgtgcgatctgggcctgtgggaagacgggcagattgatgcttggcgctggatcgtggacggtattcgcgaggcgggtgcggtgcctgccatccagctcaaccatgcggggcgtaaggcttcgaccggttgcttcgccgttggttacgacggtcagagtgtgccggaggaggcgggcggctggcccaccatggcaccgtctgaaatcgcgttcggcgggctgcgtacgccgcgcgcgctgtccgtggatgagattcatggtctggtcggtgcgttcgccgcggcggcgggccgtgcggtggccgccggcttccaggctattcagattcatgctgcgcatggctatctgatttctcagttccttgacccgctgagcaatgagcgtgatgacgaatatggtggcgatttgaccggtcgctctcgtttcctggtcgaggttgtggatgccgtgcgcggggccgtccccgagggcgtgccggttctggtgcgcatttcggccacggattgggccgctggcggttgggatttggatcagaccattgcactatccaaggtgctgaaggagcatggcgtcgatgtgatggacgtgtccactggcggcatcatgtcgggagtgtcgattccggtcaagccgaactatcaggtgccgttcgccgagcaggtcaagtccaaggccgatattccggtgaccgcggtgggtcttatcaccaagccgaagcaggcggccaagattttggcccgtggcgaagccgatgccgtggaaattggccgcgccgcattgcgcgatccgtactggccgttgcgtgcggccaacaagctgggcataccgtccacagaggtcccctacgccccgcaatacgtggccggtgcgtactgaatcctcatggggcggtgactttcccatggggcggtaaaaccctcatggggcggtaacccaaaacggcggtattctgcggaatgtgaaatttggctaaccgccccatgggacaatcaccgccccatgagggttttaccgccccatgggtaatagggcaatatgtgagttcactccacgtccacgccgacggcgtcggagacgtgctcgaatccgtcgcggcgcagcagctgggccagaccgcgcttcaacacggtgatctgctgcgggcctcggtacatcagcgagctgatgaacatgaccaggctggagccggaacgaatcttcgcataggcttgctcgggggtaaagacgccaccgatgccggcgatggcgaaccggtcgccatactccttatacaccttgcgaatcagctcggtgctggcgttggtgcacgggccgccggacaggccgccctcccaatcgcgcggaatctcgaggccggtgcggtccttctgcagattggcgatggacagcccctgcacattgtgctcggccagcacatcgagcagctccttgtactcgccccacggcttgttcaacggcatcttgaccagcgtgggctgcgggcggtcgatcttgtcgagcgccgtaaacagacggtcgagcgcttccggagtcgtggtgaacggttcgccgacgtgcgtgttcgggcaggagacgttgacctccaccatcgcggtgcggccggcggcgcggcgcattgaaatgcagtaatcctcaatgccttcgtccaaatcgccgcactggtcgtcgttggtgcgggcgatcgacacggacagctgcatctggcgggcctgagtccaagccttctcggcgcgctcgatgaccttgtccgaaccgatgttggcgaggccgacgtgcaccatcatcgaatcgtattcaggcagacggtggaaccacggcttggcgttgcccgggcagggacgcgaggtggtggagcctacggtttcaaaaccgaagccggcatggtccagcaccacgggcatgtcgcagttcttgtcgaggccggcggacaggccgaacgggttggtgaaatcgacgcccatcacattcgtttccagaatggggtcggtgtagtcgagcatcagctgctcggcgagcagcagcggcgggacgttcttgacgacgtggcagaactcgatcatctgatcgtgtgcctcatcggggcggtggttgaacacgaagttcggtttgatgatgtgcttgtagccgaaggtgaacagatcggtggtggctttgttgacggcgtcgtgccagaagctttcagaaacgtaagtcataccgcctattgtctcacgcttgggctggtgcggctaggcgattcctgcctaggcgaattggggaaggggctaccgcgtgtcgaggcgcacgcaggcgtcggctcggcagaagatacatgaatcgggatgcaccaggtatcaggcgtgactcgccgctgagcaacgcgctcgggagagtcgtcggtcgtgagtcatcgcgctagtggtcgctgcgagaatatcggttcgcacaatgtgcgattttgcgcggttttgtggaaatgaacacctgaattgcccggaattttcgagagattgtccccaaaacgctcaagccggtttggtttgtgagcttttgtgtgcgataatgttcacatgatttcgtcacaacgtcagcacctcatcttgagcaggttgcgcacgcgcggggcagtgcgcattacggcgctatcgaaggaactgggtgtgtcagcgatgaccatccgccgcgatatcgccgaacttgccgacaagggactgctgaagcgcgtccatggcggcgcggtgactaccagtaccttgctcagcgaacccctgttctctgtcaagtcccagatggatctcggcctgaaggacgccatcgcccaggaagccatcaaatatgtggctcccggcgatgtgatcgccatcggcggcggcaccacggcctatgtcttcgcccagcatctgctcgaatcgcagcagtccagcggcatcaccatcctcaccaattcgattcccgtggccgaactggtccaggccctcgaatccaaggacgtggaggtgatcgtcaccggcggcgtgatcacccgatcgaactcgcttgtcggtccgatcgcggacaaggtcgtcgcctcgctgcgtgtcaacaccgtattcctcggcacccactcggtgtcgattccccgtggcttcctgatgccgaattcgctggaagccgcaaccgatatggcgatgatggacatcgccgatcgtaccatagttttgaccgatcacaccaagtggagctgcacatcgctgtcgctgtttgcgcgcttcgaccaggtggacacggtcattactgacgacgggctcgatcccgactccgccgccaaaaccaaggatttggtaaaggaactcgtgctggcccaccagagcgagatcattgaggaaagtgagtaaacccatggctgatttcgccaactacacccccggggagtatgcgaaggagcacatccgcatcacgccgacgacgcttgccgacggtcgtgacttcttctacctggacgacgaccccgagttcgtctccggtgccaagacccgcgagctcaaggacccgcgcccgctggactaccgtttcgccccgcacctggacgccgacggcaacgaagtgccgtacgccgccccgcagatgcgccgcgacccgctgaccggcgactggatcccgatggccaccgcccgtatgaaccgcccgatcaccgccggccccggcgccaccgccaagggcaacccgctggccgcccgcaagcccggtgacccgtaccaggacggcgaagtgccggacaccgactacaacgtcgtcgtgttcgagaaccgcttcccctccatggtgcgcgtgcccggcgtctccgaggacgtgacctacgttgacggcaacccgctgtgggagaagaagctcgccgccggccgctgcgaggtcatctgcttcgacccgaacgaggacggcctgccggccgatctgccggtctcccgcctgcgcaccgtggttgaggcttgggccttccgtaccgccgaaatctccaagatggaaggcatcgagcagatcttcccgttcgaaaaccacggccaggagattggcgtctccctcgcccacccgcacggccaggtctactgctacccgttcatcgccccgaagatggagaaggaactccagcacaccgaggcctaccacgagaagaccggcggcaacctgctcaaggacatcatgaacgccgaactcgaagccggcgaacgcatcgtgatgcgcaaccacagctgggtcgcctacgtgcccgccgccgcccgctggcccctcgaggtccacgtggctccggtgcgcgacgtgctcaccctcgaccagctcaacgacgaagagcgttgggaccttgcctccatgtactcgcacctcctgaagcgcggcaacgccttcttcgacaagggcgacggcaagggcatggatctgccgtacatcgctgcctggcaccaggccccgatccacgacgcccgccgtgagaactaccgcctgaacttgcagttcttctccttccgtcgtgctgccaacaagatcaagtacctcgctggctccgaatccggcatggccgcctggatctccgacaccacgccggaactcatcgccaagcgcttccacgagctcggctccatcgatatcgccgactgatagaaagaaaacatcaatgactgctgttgaattcattgagccgctgacccatgaggaaggcgtctcgcaagctaccaagctgttcggcgacacctacggcgctgcgcccgagggcgtgtgggctgctccgggccgtgtgaacctgatcggtgagcacaccgattacaacgccggcctgtgcctgccgatcgctctgccgcatcgcaccttcatcgccctgaagccgcgcgaagacaccaaggttcgtgtcgtctccggcgtggctcccgacaaggtcgctgaagctgatctcgatggcctcaaggcccgtggcgtggacggctggtccgcctacccgaccggtgtggcctgggcgctgcgtcaggctggtttcgacaaggtcaagggctttgatgccgccttcgtctcctgcgtgccgctgggctccggcctgagctcctccgccgccatgacctgctccaccgctctggctctggacgacgtgtacggccttggctacggtgattccgacgccggccgtgtgaccctgatcaacgccgccatcaagtccgagaacgagatggccggcgcctccaccggcggtctcgaccagaacgcctccatgcgctgcaccgccggccgtgcgctgctgctcgactgccgtccggagctcaccccgctggagaacgtctcccagcaggagttcgacctcgacaagtacaacctcgaattgcttgtggtcgatacccaggctccgcaccagctcaacgatggccagtacgctcagcgtcgcgccacctgcgaggaagccgccaagattctcggtgtggccaacctgcgtgtgaccgccgacggcatctccaaggctgatgaccagttccaggccctcaaggaaacgcttgacgccctgcctgacgagaccatgaagaagcgcgtgcgccacgtcgtcaccgaaatcgagcgcgtgcgttccttcgtgcgtgccttcgctcagggcgacatcaaggctgcgggccgtctgttcaacgcttcccacgattcgctggccgccgactacgaggtcaccgtccccgagctggacatcgccgtagatgtggcccgcaagaacggtgcctacggtgcgcgtatgaccggcggcggcttcggcggctccatcatcgctctggttgataagggccgttctcaggaagtcgctcagaagatcgccgacgaattcgaaaatcaaggcttccacgcaccgcgcgccctggccgcgtacgcagcgccgagcgcttcgcgcgaggcctaggacaagccggtgggttgtccggcggatgcggtcgaggtcgagccaataggcgaggccgaggtaatgctgggtcggccgtaggtcgtccgtaattgcaggaccgcgtgcgcagcgccgagcgctttgcgcgaggcctgagccattgcaagctccctctgacgagggagcttcgttttatcccgcaccaccaccatgcccgccggcgcatccggcaccacttattcccataacccccataacgctcctgaaaccaggcatttcgaccatccgcataaggtgatgctcggcctgtacatcggcgcattcctcggcatgctgtccgagacatccatgaacatcgccctgcccgatttgatggacgagttctccgtatcctccggtaccgcccagtggatggtcgtcggctgcatactggccattggcgtggtgatgaccgcgatcggcggcgcactgttctttaccatcggcgtcaactcgggcgttgtgctggtgttctccttcatgttcaagggcggcaaacgatacatgaatcggtaatgaacataatggcgggtgtcttccctataattgggtagtcacccgctttttgtatacgaccagggagttccatgaacaaggcaatcatcaccgtcgtcggtcaggatactgtcggcatcatcgcacgcgtctgcacatacctttccgaacatcaggtcaacgtgcttgacatttcccagaccatcatcgacggttacttcaacatgatgatgattgtcgactacgccaacgcggacaaggacttcggcgcgatggtcggcaaccttgaggacctcggcgacgacatcggtgtgcgcatccgctgccagcgtgaggaaatcttcaccaagatgcaccgtatttgaggcggcccgctcagcaggccgccgcacgcgaggaggcggaaagcccggtgggctttccgctgacggagccatccttatccctctgatgagggtgaccgccaaattagtcttcaaatatcctgtaaggaacaaaccatgctgaacatcatggaggtccacgagaccaatcagatgatcgagcaggagaagctcgacgtccgcaccatcaccatgggcatctcgttgctcgactgcgcctcggacgacgtcgacaagacctgcgacaacatctaccgcaagatcactacctatgccaaggacctcgtttccaccggcaaggccatcgaacgcgactacggcatcccgatcgtcaacaagcgcatcaccgtcaccccgatctcgctggtcggtgccagctcctgcaagacgagcgaggacttcgtcaagatcgcccacgcgcttgacaaggcggccaaggaggtcggcgtcgacctgatcggcggctactccgcactcgtctccaagtccatgaccccggccgaggagttgctcatccgctccctgccgcaagccctttccgagaccgacatcgtctgctcgtccgtgaacgtcggctccaccaagaccggcatcgacatgaacgcggtcgaactgctcggccacatcatcaaggacgttgccgagcgcaccgccgacaacgactcctacggctgcgtcaagttcgtggccttctgcaacgtgcctgacgacaacccgttcatggccggcggcttccacggcgtcaccgaaggcgacgcggtcatcaacgtcggcgtctccggccccggcgtggtctcccgcgcgctcgatgcggccaaaggcaaggacttcgaattcctgtgcgagaccatcaagcgcaccgcgttcaagatcacgcgcgtgggtcagcttgtggctcaggaggcttcccgccgcctcggcatcccgttcggcatcatcgacctgtcgctcgccccgaccccggccgtgggcgactccgtgggtgaagtgctggagaagatcggcctcgagcaggtcggcgctcccggcaccacagcggcgctcgccatgctcaacgaccaggtcaagaagggcggcatcatggcgtcctcctacgtgggcggcttgtccggcgcgttcatcccggtctccgaagacaagaacatgatcgacgcggcttcttccggttgcctgaccatcgagaagctcgaagccatgacctgcgtgtgctccgtcggcctcgacatgattgccattccgggagacaccaccgcagccaccatttccggcatcatcgccgacgaggccgcgatcggcatggtcaaccagaagaccaccgccgtgcgcgtgattccggtggaaggaaagggcgtgggtgaaatggccaacttcggcggtttgatgggctacgctccgatcatcccggtgaaccagaccagctgcgaggccttcgtgacccgtggcggccgaatccctgcgccgattcacagcttcaagaattgattcggtagggtatctgctttcagagaggtacatttggcccctcgcggagagctatctgctttcaaagaggtacctatatgcggaaaccccgggtatgagcgttggaatatcaacactcatacccggggtttctagattgcggtacctctttgaaggcagatagcattctgcaaacgctcgaatgtacctctttgaaggcagataccagctcgaattacctttctggaggtctattcccgtttcgaggggctgattccgacctttctggaggtctacttccgtttcgaggggctggtatatatgaagaccccgagtacaagcattgatatttcaacggccatactcggggtctcgtcctttgacagccccttgaagcggcagtagacctccggcggatgccaaatccgcccctcgaaacgcaggtagccttatattcagcgttcatcactgcgcgaagctcagtgtttccgctctcgcgcctgtcggcgttcgttcggcgtcgttactcgaaggcccaccgggccttctcctcacgctccgcccgcaaaattgagctggcgccaggcttcgtagatggcgatggatgcgcagttggtgaggtttagggaacgcagggacgggcgcatgggcagccgcacttgttcggccacatgagggccctccatgatgtccatcgggtcggggatgtcgccgggctcggggccgaacagcaggatgtcagtcggcttgtattccacctcggtgtagagcttggtggcgtgcgcggtgaacgcgatgatgcgcgaattgggcatcgactccaccagattgtcgaaattcgggtgcagcaccacgtgggccatgtcgtggtagtcgaggcctgctcggcgcagcttggtgtcgcgcaggttgaagcccagcggctccaccaaatgcagaatcgtgccggtcactgcgcacaggcggatggccgaaccggtgttgccgggaatacgcggtgagtaatagcacaggtgcggcgtcacggtttcggtggcggcggccttttcagccgagagcatcgcgtccaccacggagatggggttgccatgcgcgtcggtcaccagctcgtccggcccgtaattcgacttgcgatagccgtattcgaacattttctcgactttggtttcgggattggctggattcggtgtgctctgggggttgtgttttgcctcgttcgtcatagctgctaagaataagaacgatgaacgacacagcaatttctttgcgattgggagcatggtgggaggccaatgcgcgtgacttgccatggcgcttcggacgggccacgccgtggggcgtgctggtatccgaagtcatgagccagcagacgcagatgagccgtgtggtgccgtactggaccgactggatggaacgttggcccgacgcccgctcactcgccgaggcccccaaggccgaggtgatcaccgcatggggtcggctcggctatccacgccgtgcattgcgcttgcaggaatgtgcccgcgtggtggccgagcagtacgccgacaaactgccgcgtacgtatgacgaactcactgcattgcccggcatcggcgattacaccgcctccgcggtgctgagctttgcgttcggtgagcgcattgcggtgatcgatacgaatattcgccgcgtgctgagccgtgtgttccttggcgtcgaatcgcgcgggggagcggccagcccggccgaacgcgcgctggcgaaccgcatgctgcccaaagacgagattctcgggcgcgatgctgacgtcgccgataatgccggtagcgccgaacataccgtgaacggcactatccgtggcggcaaacgctcccgactgcatcgtggcgaacgcccatcggtcacatggaaccagtcggtaatggaactgggggcggtgatctgcacggccaaatcgccgttatgcgacacctgcccgattgccgacgattgcgcgttcctcaaggccggccgccccggactgggggagcgtcgcacccgcccacgccaacgattccaaggcacggatcgacaggtgcgcggtctggtgctcgccgcgctgcgcgagcttcccgctggagtcacgttgcccagggaagatgccgacaagctttggaaggaccagattcagcttgccgcctgcatcgccagccttgacgatgacggcctgatcgagattctggacggcggcctgcgattacccagctgacattgtgaaaatggcgggctccccaagcgtgtatgggtgtggtgaccgtagactggaagggttatggcagtgcagaggaacacatcaggcgcgagaacggcacgcggagccggcaccggggacaatgggccatccggcgggcccgcccgaaacgaccgttccggcaagccgcgcaagcgcaggatcagcaaaaagcagcaggccatctatcgtcgtcggcgtatcgtggccggcacggtgttgctgctgataatcgcgctgattgtattctgcgtgtacagccttggccggggtatcggtgccgtgaacacgatgattcaccatgacgaggtgtatgcgatttcccgcgacgccacgccggctccgaagaaagtcagcaacgtcaaggattgctcggccagtgatgtgacattgcagctttccgcggcctcccaatccgtgccggtaggaggatcgcttgatttcaccgcgaccatcgtgcacgaggggtcaggcaactgtttggtggacggggccgattccggccgtgtgctcaccattacttccggtcaggaaacgatttacaagtccgatgtgtgtccggcggattcacgtctgctgctgatgtccaagggtgataaggacgttcagaaggtcacgtggaataccaatgcgaacgccacgctcaccgaatgcacggatgagtcgggttgggccaaggtcaatgcgggaacgtacgtggcgcagctgagtttgaaggatcatccgaaggtgaagagcgatccggtgacgtttacggtggggtaggacctgcggttggtgtttggacgctgggtctctccctcagtctcgctccgctcgacagctccctcgtcagcgggagctaaaaatgtcctcgcatatcagtattctgttgactttgcatgaggtgtgtcatattgcgggcatgccgtcgacaatgaagcgtccgcataggcatatggtggccatgccggcgctcccaggggaattaccacatattagcgagcgataaggaacgtccattggctactgagtctacgacgaacaccaccaccatcatcgcacgcgccgaccagcatgacattgatctgcacaaggcgtcggatcgcgtgaacttcggttccatcaaggaacccatcgatgtgccctacctgctgggcgtacagaccgacagcttcgattggctgatcggttccgaccgctggaagaagcgtgtcgaagaggatgaggctaacggcaccaacaccgtggcccacacctccggtctcgacgaggtcttcaacgagatctccccgatcgagaactttgcacagaccatgtccctgaccttctcggacccgtacttcgaggagccgcgccacaccgtgcaggagtgcaaggagaaggattacaccgactccgctccgctgtacgtgaacgccgaattcgagaacggcgacaccggcgagatcaagtcccagaccgtgttcatgggcgacttcccgctgcagaccccgcacggcaccttcatcatcggcggtaccgagcgagtcatcgtctcccagctcgtgcgttccccgggcgtctacttcgaccgccagcaggaccgtacttccgacaaggaagtcttcggcgcgaagattatcccgtcccgcggcgcatggcttgagttcgaggtcgataagaaggaccagccgcaggtgcgcgtggaccgcaagcgcaagcagtccgccatcgtgttcctcatggccatcggcatgaccaagtccgagatcgccaaggccttcaaggactacccgctggtgctcgatgcactcgagaaggaaaccctcgagacccaggacgaggcccttgttgacctctaccgcaagattcgtccggctgacaccccgacccccgaggccggcaagaacctgctggactccttctacttcaacaccaagcgttacgatctggcccgcgtcggccgttacaagatcaaccgcaagctgggcgttgaggccgacttcaacgaccgttccctccaccaggaggacatcatcgccaccatcaagtacttggtggccctgcacgatggtgctgcgaccttcccgggcaagcgcaacggcgaagatgttgacctgcgcgtggacgttgacgatatcgaccacttcggcaaccgtcgtatccgtcaggtcggtgagctggtccagaaccagctgcgtaccggtctgtcccgtatggagcgcgtggtacgcgagcgtatgaccactcaggacgccgaggccatcaccccgcagtccctgatcaacatccgcccggtgaacgccaccatcaaggagttcttcggcacctcccagctctcccagttcatggaccagaacaacccgctgtccggtgtgacgaacaagcgtcgtctctccgctttgggccccggcggtctgtcccgcgatcgcgcctccatggaggtccgcgacgtgcacccgtcccactttggccgtatgtgcccgattgagtctcctgaaggcccgaacatcggtctgattggttctctggcaaccttcggccgcgtcaacccgttcggcttcatcgagaccccgtaccgcaaggtcgtcaacggccacgtgaccgacgaggtcgagtacatgaccgctgaccgtgatctcgaccacgtcatcgcccaggccaaccaggaactcgacgagaacggtaacttcgtctccaagtccgcccttgcccgagtcggcgaggaagaggcagtcgatgtgccggtgagctccgtggattacatggacgtctccccgcgtcagatggtctccctcggcgcctccctgatcccgttcctggagcatgatgagggccaccgtgcactgatgggcaccaacatgcagcgtcaggcagtgccgctgatcgaatccgagcgcccactggtgggcaccggctccgaatggcgcgccgccaacgattccggcgacgtcatcaagtccgagaaggacggtgtggtcacctacgtgtccgccgacctgattcgcgtgatgaacgacgacggcaccaccagctcctacaagctggccaagttccagcgttccaaccagaccacctgctacaaccagcgcccgatcatccatgatggcgagcgtgtggaggccggctcggtgctggccgatggtcctgccatccagaagggcgacctggccctgggcaagaacctgctcatcgccttcatgccgtggaacggctacaactacgaggatgctgtgatcatctcccagcgcctcgtgcaggacgacaccctctcctccatccacatcgaggagtacgagatcgacgcccgcgaaaccaagctgggcgccgaagagatcacccgcgacctgccgaacgtcggcgaggacgccgtggccaacctcgacgagcgcggcatcatccgcatcggcgccgaggtcgaggccggcgacatcctggtcggtaaggtcaccccgaagggtgagaccgagctgaccccggaggagcgcctgctgcgcgccatcttcggcgagaagtcccgcgaggtgcgcgacacctccctgcgcgtgccccacggcgagaccggtaccgtcatcggcgtcaaggagatcacccgcgaggatgccgaggaggacggcgacgagctgcccaacggcgtcaaccagatgatccgcgtctacatcgcccagcaccgcaagatcacggagggcgacaagctctccggccgccacggcaacaagggctgcatctcccgcatactgccggaagaggatatgccgttccttgccgacggtactccggtcgacatcatgttgaacccgctgggtgtgccttcccgaatgaacctcggtcaggtgctcgaactgcacctcggctggattgcccactccggttgggacatctctttggatccgaatctggaagccgagtggaagaagctgattccgtccggtgccgagaaggccgagccgaacaccccggtcgccaccccggtgttcgacggtgtcaagcctgaggtcctgaagggtctgctgtccactacgctgccgaaccgcgacggcgaccgtctggtcggccccgacggcaaggccaccctgttcgatggtcgtaccggtgagccgtacaccaagccgatttccgttggctacatgtacatgctgaagctgcaccacctggtcgacgacaagatccacgcccgctccaccggcccgtactccatgatcacccagcagccgctcggtggtaaggcccagttcggtggccagcgcttcggcgagatggaggtgtgggcccttgaggcctacggtgccgcctacacgctgcacgagatgatgaccaccaaatccgatgacgttgacggccgcgtgcgcgtctacggtgccatcgtcaagggcgataacctgccgtcggcaggtatccctgagtcgttcaaggtgctcctgaaggaaatgcagtccctgtccctgaacgtcgaagtgctcaacgccgaaggcgtggccatcgacatgaaggacgaggacgacgatccggccagctccgctgacgacctcggcttcaacattggcgcccgccccgatgcggccgccaaggaagaccagaaggccgaagagcccgaataccagtgatccctcgggctgcatgcggtcaatacgccgcgtgtagctccgccaacgtgaaataaataacgtacagagacctttccggtttgcactacccctcagtcagccttggctgacagctcccctgacaaggggagcttgggaaggtctcaagaacagaaacggattaacaagtgctggacgtcaacgcatttgacaagattcgcatcggccttgccaccgccgatgacatccgtggttggagccacggtgaggtcaagaagcctgaaaccatcaactaccgtacgctgaagcctgagaaggacggtctgttcggcgaacagatcttcggcccgacccgtgactgggagtgcgcctgcggcaagtacaagcgcgtgcgtttcaagggcatcgtctgcgagcgatgcggcgtcgaagtgacccgcagccgcgtgcgccgtgagcgcatgggccacatcgagctcgccgccccggtgacgcacatctggttcttcaaaggtgtgccttcccgcctcggctacctgctgaacgtcaccccgaaggatctggagcgcgtgatctacttcgcctcctacatggtcaccgaggtgaacgaggacgagcgccacaacgatctgcccggcctgcaggacgagttcgattccgagatcaagcgccttgagcagcgccgtgactccgacatcgaagctcgcgccaagaaggtcgaagaggatctcgccgcccttgaggagaccggcgaggccaagggcccggcccgcaccaagctgcgtaacggtgccgagcgcgatatggccgccatccgcacccgctacaacgaccagatcgcccgtgtggacgccgtcttcgacaagttcaagaagctcaagcccggcgacatggtcgacgacgtggacctgtggcgcgagatgcaggaccgctacggcgattacttcgacggctgcatgggcgccgaagccatcaagaagcgcctgcagtccctcgacctggagaccatctccaaggaactgcgcgaggagatcaaggacgcttccgagcagcgtaagaccaaggctctgaagcgcctcaaggtcgtcaacgccttcctgaccaccggcaacaagccggaggccatggtgctcgacgtgatcccggtcatcccgccggacctgcgcccgatggtccagctcgacggtggccgtttcgccacctccgacctcaacgacctgtcccgccgtgtgatcaaccgtaacaaccgtctgaagcgactgatcgagctcggcgcccctgaaatcatgctcaacaacgagaagcgcatgctccaggaagccgtcgactccctgttcgacaacggccgtcgtggtcgcccggtcaccggtgcctccaaccgtccgctgaagtccctgtccgacatgctcaagggtaagcagggtcgtttccgtcagaacctgctcggtaagcgagtcgactactccggccgttccgtgatcgtggtcggcccgtccctgcgcatgcaccagtgcggtctgccgaagccgatggccctcgagctgttcaagccgttcgtcatcaagcgcctcgtggacctgaactacgcgcagaacatgaagtccgccaagcgtctcgtggaccgcggcgacgccgaagtgtggggcgtgctcgaggaggtcatctccgagcacccc

SEQ ID NO: 77 - DNA, 22303 bp, Unknown
  R206_24m  MAG No. k141_8098
actccgccaaggctctgctgtacgccatcaacggcggccgcgatgagatgaccggcatgcaggtcatcgacaagggcatcatcgacccgatcaccccggaagccgatggcactctggactacgcgaaggtcaaggacaactatgagaaggctctcgagtggctgtccgagacttacgtcgaggctctgaacatcatccattacatgcacgataagtacgcctacgagtccatcgagatggccctgcacgacaaggaagtgtaccgtacccttggttgcggtatgtccggtctgtccatcgccgccgactccctggctgccatcaagtatgccaaggtctacccgatctacaacaaggatgccaagaacctcgaaggccacgagtacgagtacgtcgagggcgctgacgacgatttggtcgtcggctaccgcactgagggcgacttcccggtctacggcaacgatgacgatcgcgccgatgacatcgccaagtgggttgtctccactgtgatgggccaggtcaagcgcctgcccgtctaccgtggcgccgtcccgacccagtccatcctgaccatcacctccaacgtggagtacggcaagaacaccggttccttcccgtcccgccacaagaagggcaccccgtacgccccgggtgccaacccggagaacggcatggactcgcacggcatgctgccgtccatgttctccgtcggcaagatcgactacaacgacgccctcgacggcatctcgctgaccaacaccatcacccccgatggcctgggccgcgatgaagccgagcgcatcggcaacctggtcggcatcctggacgcgggcaacggccacggcctctaccacgcgaacatcaacgttctgcgccgcgagaccatggaggacgccgtcgagcaccccgaaaagtacccgcacctgaccgtgcgtgtctccggctacgcggtgaacttcgtcaagctcaccaaggagcagcagctcgacgtcatctcccgtaccttccaccaaggtgccgtcgtcgactgatgaccaaccccgcgaaccgcggcaatgactaactgaaggggtggggcacggctccaccccttccttattttccacagactttcgcatcatttggaacaggaggacaactatgcccgcaacacccacgttccgcaccacgaccaggcatatgctcaaggaatcgaagacctatgcctcgcagactttgatgggcggcctgtccggctttgaatccccaatcggactcgaccgacgtgaccgcctttccgccctgaaatccggcgatatcggcttcgtccactcttgggacatcaacacctccgtggatggaccgggcacccgcatgaccgtattcatgtccggctgcccgctgcgctgccagtactgccagaacccggacacttggaagatgcgcgacggcaagcccgtctaccttgacgccatgatcaagaaggtcgatcgttacaaggacctgttcaaggccacgcatggcggtatcaccttctccggcggcgaatccatgatgcagcccgccttcgtttcgcgtgtgttccatgccgccaaggagatgggcgtgcacacctgcctcgatacgtccggcttcctcaacacgagctacaccgacgagatgctcgaggacatcgacctgtgtctgctcgacgtcaaatccggcgacgaggagacctatcacaaggtcaccggcggcaccttgcagcccaccatcgattttggccagcgactggccaaggccggcaagaagatctgggtacgatttgtgctcgtgccgggcctgaccgactccgaagagaacgtcgaaaacgtggcgaagatctgcgagtccttcggtgatgccgtcgaacacatcgacgtgctgggattccaccagcttggccgcccgaagtggcacgaactgcgcatcccatacccgctggagaaccagaagggacccaacgccgccacccgttcgcgggtggccaaccagttcaaggaccacggcttcaccgtgttttaaattgcagggccgaaccgcgcgtaaataccacgattcggccggttcgcccataccctagagatatggccgacatctacgcatttcctatgggagcgtccaacgatggacgccccgtacgccctcagggtgtgccggatgaagtatgggcagctgtcgaatccgtcagcaccatgaagcgcatccatgacgtgcgctatcgggagattcccgtgccttccaccttggccgattatggtatcggcgtggaattcgaagcgggagagcgtgccctcggcgatgccttttccgccggtcttggcaacgatgccgaatcacgaatcgccacaggctggatcatgatgctttatgctcatgagctgcgcattgaccgggattccaactggcgttgcgtggcgttcgcgcggctgccgctggaaaccgccgaaaacgattctctgacccccggcatgtactgggatgacatgtgcgactatttcgacggcatcgagccggattcggtatccggcacagtcaccgtgacccaaaacacggcttttggttcgatggccggctccaccagcgccgggtgtgagattcgcgtctcatggaccccgcttgacgggaccggaccggacggtactatggacgccggcgcacaaatccgctcgtgggccgcattcatcagatccaccatccgttttgaggaggatgacgccagttgagtgacgtccgtgacaccgaaccccgactgctgaaagagcctcgcgggggagtgcccgatgtcacttcgtcgctggatggctatcatcgtgcctgcgatgcgctggccgaggcgacgggctcgctggccgccgacgccgaacgggcgtccggattccgctatggacatgaggattggctgattcagttcaaacgtgaaggtgcgggcatcgccttgcttgatcccgtcgccctgacacgggccggagctgactggaatgaattcaatgacgccgtgggcgatgctacatggattctgcatgattctctgatggacttgcccggattcgccgaaatcggactcaaacccaaggccttgttcgacacggaaatagcggcgcgattgctcggcctgcaccgcttcggtctggccgccgtcaccgaacactacctcggcatcacgctggccaaagagcattccgccgccgattggtcctaccgtccgctgccgcgcgactggcgcaactatgcggcgctcgacgtggaggtgcttatcgaactcgaaaccttgatgcgtcgtgacctgaaagccgcaggcaaggacgagtgggccgctgaagagttttctcacgctttggttgcgggccttgccccgcgcaaacctcatccgattccttggctgcgtatctcgcgcatcacccagctgagtcgtgatccgaggggcttggccatcgccaaatccctatgggaggagcgcgaccggctcgcccggcgatacgacatcgctcccagcctgttattgaccgattcgtcaattatcgaggccgcgaccaacaagccgcacaatgccgcccaattccgcgcactccgatccctgaacgagcgtgtgcgcattcataccggcaccgagcaggacaaaatgttcgagcggtacgcgccgattcagcgtacggtcaagccgaaggtctggaagcaggccatcgaccgcgccatggccctgaagcccacccaatggcctaccatgcccgcccccgaacaggacgaaaacggtgtggtgaacgcgccccgatccatgcgactgtggcaacagcgccatccggagcgttatgaccgtctgcagcgggtacggcgtgtgatcaaccgcatcgccgaagacacccgcacgccggccgagatgatcatcaagccacagatcctacgcaacctgtgctgggtggaagacccggtggaagtggacgtcgagacgttcctgatcgagcagggcgcaagaaactggcaggtgaaactcattgcaccgtccgtaagtggcgttatcatgtagaggttgccttacggcagaactgtaagaaataacgacttttgaggagtcattagcgtgaagatcagcgttcgtaacctcgagcccaccaaggtgaagctcaccgtcactgttgaaccggaagagctcaacccgtatctggatgcggcccgtaaggaaatcgccaagcaggtgaacgttcccggcttccgtaagggccacgttcccggcaagatcatcgaccagcgcatcggtttcgccgccgtcgccggtgaggccgtgaacgacgcggtcccggagctgtactccaaggccctggatgagaagaagattcgtccgatggctcagccggagttcgacgtgcaggatgttccgcagtccgccaacgacgagaccaagctgaagttcaccgccaccgtcgagcgtcgtcctgacatcgaactgccggaaatcgacggtcttgagatcgccatctccaagccggaagtcaaggatgaggacgtcgacaagcgcctcgagaccctgcgtcagcgcttcggcaccttggtcggcgtggaccgcccggccgccaagggcgacttcgccaacatcgacctgactgctgagattgacggcgagaccgtcgactcccaggaaggcgtgagctacgagctcggctccaacaccatgctcgacggtctggacgaggctcttgacggcctgtccgccggcgaggagaccaccttcgaaggcacgctggaagccggcgagcacgagggccagaaggccaccgtgaaggtcaaggtcaactccgtcaaggctgaggaactgccggagctgaacgatgagttcgcttccgaagcttccgagttcgacactctggacgagctcaaggctgacatccgcaaggctgccgctcaggacgccgaaggtcgtcaggccaccgaggctcgcgatgccttcatcgccaagctgcaggaaggcctcgagatcccggtgccgaagggtgtcaaggccaacatggtcgaagagcagctcaagggcatgaccccggacccggagaaggccaccaaggagcagaaggctcaggccgaggagaccgtggagaaggatctgcgcgatcagatggtgctcgacgctctggccgagaagctggacgttcaggtgtcccagtccgacgtgttcaacttcctcgcttccatcgcccagcagtacggcatggacccgaacaacttcatccaggccatcatcaagaatggccagcttggctccgctgtgcaggaagtcggccgttccaagggtctgctcgccggcatgcgcgccgtcaagttcaccgctgatggcgaggttgtggacctctccggcttcctgggcgaggccgctgaggacgaagagtccgagtccgtcgaggccgcttccgctgctgccgccgtggccgacgaactgtccgccaaggatgacgccaaggacgctgagtgagcatagcctcatcgcgttagcgtgattgtttgagcccggaatcgtgtttcacggttccgggctcttcctattctggtaaaaggactatttctttggctcccctttggggggagctgtcgggcgtagcgagactgaggggagttcccaaggcatactcgttgcatagcgtgcggaggttgacatgcagccaacggttactatcaaacgccttggttggctcgctgcggcgaccattgtgctcggcgtgctcatcggtgtgggagcaggtctgctgaccctgttgctctacggcgttgaacatgtgctgctcggctacatcgaaggcccagaattgtctggtccattcggcgtgcccgctgcacgccgtgtgatatcggtgaccgtgggactcggcatcgcgggcattatctggtatctgctacgacacaaaacgactgtggtgccctcagtcaagaaggccgtggcgggaaagcgaatgcctttctggcaaaccattgtgcatgtggtgttgcagattttcatcgtcggctccggtgcctcgatcggccgagaagtcgccccacgcgaactcggcgccatgatcgcgcaacgtttttgcgacctgttccatatcgagggcgttgatggtatcgaccggcgcatggtggtggcagtggctgccggtgccggtctaggaggcgtctatgacgcgccgctggccggcatgttcttcgccgtcgaaatcctgttggtggatgtgacgatcgaaaaggttgcgtttggactgggcgtgtctgccattgccgcattcgtggcggttgcgatcaaagggcattgcctgttctacgacatcaccgccatgcaaccggaatccacgccaacgttaatgctgttcgctctgatctgcggtgcggcatgtggagtgggcggcgcattgttccgaaaaggttcgcaatgggcggaagcgcacaagccgaccggcaaggccattctgtggcagatgccgctggctggtctcatcaccggtttggtggcgattgttgtgccgcaggtgatgggcaacggccgtgccgcagcgcaacttggattcagcacgttcattcctgaaaccgccggcactgctggtgccatgcagtcggcatcttcagcggccgcctctccatggaacttgctgacgggcggcggtaatgtatccgattcggcctctggcgggggagcgggctctggaatggcctcgttttgggccatgcttcagggtgggagcggctcttctggatccgtgatgaacgccggtttcccgctgtcccagtccaatatctggatgttgctgggtgtgttggcactcacctttgtcgccaaggcgctggtgacgctgatgaccattcgctccggtgcatcgggcggtgtgctgcagcccggcatcgcattaggttccacgctgggtgcgatgctcggcctcgtatggatactgatgtttccgactgattcggtaaccgcgtgtgccttgatcggtgcggcttcgttgctttcggcctcacagcaggcaccgcttatggccatgtgcttggtgatggagctgaccgaagcgccgattaccttcttcgtgccagtcggcatggccgtggccacgtcgtcgttgatatcaaagtggttgctgagtcgtaagtaagtagatgcatatattctggctcccctctctgaggggagctgtcgaacacagtgagactgaggggagccgaggtaaagaaagctatgtcagaaaacaccgaagtccgtgcggcacttgaatcgcttgccgctgagccgctcactgagcagattgactactatcgaaagccattcatggtgttgtgggccgccattcaggaggccgccagcgatgtggccgaagactacgacttgcctgcggatatggcccaattatgggtggccgaacagatgcgccaagtcgccgattcactggtcgatcggctcgcggaaaaagccgtggcccatggtgccagcaagtccaacgtggcgcgagccgccggtgccagccccgccaatgccgcccgtcgcttcccgcgtctgggcgacgatgccgcctcccagacccgcctcctcattgacgacgtcctcgacaccttggaataacccgaaatccctacgctacccgccaaaaagcacgcgaaaagccgccttcagtcgcttcaaggcggtagtctgaacaatgttcgagtaattagaaggagaatcaaggtgagcaatacctttgcgaccttgccggtcatggcgggcgatgacgtcccggccggccccgtcgacccgattttcaaccgtctgctcaaagaccgcatcatctggatgggtgaagaggtcaaggacgatatggccaaccgcatctgcgctcagctgctgatgctggccgccgaggacccgaagaaggacatctggctgtacatcaactcgccgggcggctccatcaccgcaggcatggccatctacgacaccatgcagctcatcgagcctgacgtggcgaccgtgggcctgggcatgtgcgcttccatgggccagttcctgctgagctccggcaccaagggcaagcgttacctgacctcgcacgcccgtgtgctcatgcaccagccttccggcggcatcggcggcaccgccactgacgtgcgcatcaacgccgagctcatcatggacatgaagaaaaccatgagcgagctgaccgctgagcagaccggccacaccctcgaggagatctaccgcgacaacgaatacgaccactggttcaccgcccaggaagccctcgactatggcttcgtggacaagctcgtgaccacgccggacaccatcggcaacaaccagcagggggagtgagactcatggcaagtgaagaagcaaagttcgccgcccgtgccgaccgcttggccggccgtcatggcgtagccggtttcatgccggccgccgcccgcgcagcccagcccgcgccgaccaaccgttacatcatgccgcagttcgtggagaagaccccgtatggcatgaagacccaggacgcctactcccgcctgttcgaggatcgcatcatcttcctcggcgtgcaggtggacgacgcctccgccgacgacgtgatggcccagctgctggtccttgaatcccaggatccgaaccgtgacgtgatgatgtacatcaactcacccggcggttcgatgacggccatgaccgccatctacgacaccatgcagtacatcaagcccgacgtgcagaccgtgtgtctcggccaggccgcctccgccgccgccattctgctggcctccggcaccaagggcaagcgcctgatgctgccgaacgcccgtgtgctcatccaccagccggccatcgaccaaggattcggcaaggccacggagatcgagattcaggccaaggaaatgctgcgtatgcgcgaatggctggaggagaccctcgccaagcacaccggccaggatgtcgagaagattcgccgcgacatcgaagtggacactttcctgaccgctcctgaagccaaggaatacggcatcgtggacgaggtgctggaacaccgccagtaaaacttccgaacattgcaataccctcggtcggcaacgaccgggggtattgtatttcaaggatgacaatgataatgcgcagcgtggcggttcgacggtgcggcgcggtcggcaaaggagaatcatgggacgtgtggtgagctacaacgaggacgtaccccgttgcacgttctgcggcaaaaccgaacgtcaggtcagaaaactggtggccggtcccaacgcctccatctgcgatgaatgcatcgccctgtgcgtggacatcatctccgaggagcgtgtcaaagatgccgaggtcaattcgctgagcctgcccaagcccgctcagatcttcgattatctcaaccgctacgtcatcggtcaggagaacgccaagcgcgcattgtccgtggccgtatacaatcattacaaacgcgtcaatatggagcttcaggagtccgctgagcagcttgacgggaataacgggcacggtggccagaccggcaaacaagccaagcaatccgctcccgcccagacgcgtgctacccgccgcaacagtgaccctttggctgacgttgaggtcgccaaatcaaacattctgttgctcggccccaccggtgtgggcaaaacctatcttgcacaggcgttggcccgcgtaatgaacgtgccattcgtcatcaccgacgccaccaccctgaccgaggccggctatgtaggcgacgatgtggaaaccgtgctccaacgtcttcttcaagccgcggatggcgacgtaagccgagcccagcacggcatcatctacattgacgaaatcgataagatcgcgcgcaaatcaggtgagaacacctccatcacccgtgacgtgtccggtgagggcgttcagcaggcgttgctgaagattttggaaggcaccatcgcctccgtgccgttggagggcacgcgcaagcataaggagcaggacactgcgcagatggacacacgcggcatcctattcatctgcggcggtgcgttcgtgggactgacggatattgttcgcaagcgattgggccgtcgagagaccggcttcggcgcgaattggcacgacgccgacatgaaagacgaggaattgctcgaacaggtcaatgccgatgatctggccgagttcgggctgttgcctgagttcatcggacgtttgccggtcaccagtgtgctgaaggaacttaccgtagacgatctgacggcgattctcacccagccagccaacgcgctgatcaagcagtaccgtaagctgttcgccgtcgacggcgtcgacctgcagttcaccgaacaggccattcgggcgattgctgatatcgccatcaagcaggggaccggtgcacgcgggttgcgttcgattatcgaacgtacgttgcaggacacgatgttccagttgccgagtttggatgatgtgaagcaggtgattgtggacaaggcgtccgtagagggttccagtacgcccaaactcttgcgcgaagccgtggatgtgccgcagggacgcctcaaagttgcgtagtcggttttgcttgaccgagtccgtacacatgcggcgtgaggccagtaaatacgccgttgcggtggcgattaggatggtgcgactcgccgcaacacgccgagttgcattcatctgaacggcgtgtattatatatcgagttgtctgaaaagacaacatgcgccagtagcccagcggattagagcagctgactacggatcagcaggtcgcaggttcgaatcctgtctggcgcactcccgaaccacggggacaacagtggtatgcgccagtagcccagcggattagagcagctgactacggatcagcaggtcgcaggttcgaatcctgtctggcgcacagtaagcctcgaaagcgaaatgcttccgaggcttttccaattgtattggcccgtttgagtcggccacacaggggtggggtaaggttgcccttcgcgactcagcccggagcggaacgtcctgagatattccgtactattacatacggttcatccaagaaagtacagcaaggagacgcgatggccacgaccgccggcgcgaagaagggactttggtccaccattaggcgaatcgccgcctcagaccgtatttccggactcatcatgctcggcttcgcgctcaccggcctggtgctcgcgaacctgcccgccaccgcgcatgcgttcgagaccgtagcggaaacgcatctgttcatcccctacaccaatctcgacctgccgattggccattgggcccaggatggtctgcttaccatcttcttcctgaccgtgggcctcgaactgaagcaggaactcaccaccggctcgctcgccaatccgaaagcggccgccgtgccgatgctgtgcgcggtgggcggcatgatcgccccgcccatcctgtttctggccgtcacggcattgttctctcagatcgggcctggtgaacccggcacgctgattctgaccaccaccggcagcagcattccgttctcggagatgtcgcacggctgggcagtgcccaccgccacggatatcgcgttctcactggccgtgctcgccctgtttgccaaggccctgcccggttcgatccgcgcgttcctgatgacgcttgccaccgtcgatgacttgctggccattattctgatcgccgtattcttctcctcgatcaacgcctggtattggttcatcggcatcgtcgtgtgcgccgtcatctgggcatacctcgtacgactgaaaaaagtgccgtggattgcggtcggcatcgtcggcgtcctcgcttggatcatgatgttcgaggcaggcgtgcatcccacactggccggcgtgctggttggcctgctgactccctcccgtgaaatgcacggcgaactttcaccgcgtgccgaacgctatgccaacaagcttcagccattctccgcactgctggccctgcccatcttcgccctgttcgccaccggcgtgcacttcgagtcggtgagcccgctgttgctggcttcgccgttggttatcgcactgattgtggctttggtggtcggcaaacctttgggcatcatcaccaccgcatggctggccacgcatgtgggcgggctcaagatggccaaggggctgcgcgtgcgcgacatgattcccgctgccgtcgcctgcggcattggcttcactgtgtccttcctcatcgcctcgctggcgtacaagaatgcggaactttccgctgaggcgcgcttcggcgtgctggtggcctccctgatcgccgctgcgatttccggtgtgctgctgagccgtcagtccaagagattcgagaaggccgcagccgcagcagcggccgatgcggaggatgacgaatcgattgatggcgatggcgctggtcagaccggtcgcaccacaaagtccaccacgcccacggaacaccccggcaccctcgccgacggcaccgccagtgtggagattgacttccgccactgatggcttagacgatccctactccattgttggccttgtttcgtgaaaaccgtacgctgaggcgcgctcaccgtacgttcttcacgagatgaggccttatttcgtgaaaaccgtacgctgagtgtcactcaccgtacgttcttcacgaagtcaaggatgatttcgcggaaaacgtatgcagagcttcaggcgctagaatgcgaagagtcgatagcaccgtacaggaggatattggatggcaaagaagcagaagaaatccaagaagaacgacggcaaaaaggccgctgaagcaaagaatctagccgaggccgcatccaagtccacagtcgtggacgatatggaaccattggaagccacagccgcgaatgatgcggcaacgttggaggccgagacggcaaccgaggctgccgcaacgccggtgaacccggtcgacttggaggacgtctcgccgctgggcgacacctatcatcgcggcccggtgattctacgcggccagatgattccctcggacaataccaccgccaatctgctgaaacccgaccaggacaccgactggctgcacatggacccatggcgtgtgctgcgcatccaatcggaattcgtggacggtttcggggcgctcgccgagctcggacctgcggtctctattttcggctccgcacgcacccagcgcaccgaatcgatctacaaggcggcccggcgcatgggtagccagatagccaagcgcaacatcgccgtcatcaccggcggtggtcccggcatcatggaagccgcgaataggggagcggcactggctggcggcaaatccgtgggactcggcatcgaattgccgcacgagcaggggttgaaccagtgggtgaacctcggcatgagcttccggtacttctttgtgcggaaaaccatgttcgtcaagtattcctccggcgtgatcgtgtgcccgggcggcttcggcacactggatgagatgttcgagctgctgaccttggtccagacccacaaggtggcgaatattccggtggtgctctacggcaaggaatactggcaggggctctttgactggctcaacggtccggtggccgagcacggcatgatttcggcaatcgacccgaaactggtcaccgtgaccgatgacgccgacgaagccgtggaggtggctgtcagcgcaattgtgaggtaagcgagatagagtggctcccctctccgaggggagccaagggcagagttactttttgtaggcgatgagcaggcctgtgccgtcaggggtaagcgtggactcgaaaccttcgtcatcttcgacggtggtgagcagctcacgcatggcgatggccttgtcgctgcggtcggccggattaatcatgccgccctgaccgtcctccaacgccagcacatcggtgaacacgatcacgccgtgcgcgcgcagcagacgggaggcctgggcgaacgtggcggcatagttctcggcgtcgcccgccaccacgatcagatcgtaatcattggcgttgaggcgcggcagaaacacgctggccggggcgttcaccgcacgcaacgtggtgtcggtctcatcctgcagttcggcgaacgccttgcgaatcagcgcgatgccctgagcggtggaatcgaccgcagtcagcaggcccttgttatccagcgcatgggcgagctgcaaggtctccaccagcgagccggtgcctacggcgatgaccgaagcggcaccggtgatgcgcaccagcatgcccagcagacgggcctgcgcggccgaaccctgcaactggccggacttgtcggcggccgtacgggcgtcggtcaacgcattggattcacgttcgcgcgcgtgttcctcggtgaattcccatgccttggcgaggttggtgtactgcgttctgtccataattcgttcctttatgtcttctctcgtgcgggcacccggtggatgtatcgactacgtgttgcagcgattgccgtagctggtcgtggcgcggcttagcgctcgcggaccttggccacgatctgccacatctcctcgcccacatcgatgccgcgcgggcagtggcgggagcaggcgcgcacggactggcaggcggccacgccgtcggcggtgtcgatggcgtccatacgctccatggccttggtgtcgcgcgaatcgttgacgaaacgggaggcccaaatcagcgaggccgggccgatgaaagcgtcgccgccggcgtacaccgggcaggcaccttcgcacacgccgcaggcgatgcagttgctcagcagctcgtatttggcgagttgttcggggttctgcaggtattcgaacacgtccaccttgccttcggcggtggtggcgagcacgccgtccgcctgaagatatggggtgagcttccttatttggttgagcatcgggtcgatgtcggcgatgaggtcgcgctgcggcgggaagccgggcagggatgccagttcgatgactcccagcgagccgtttgcggccgagtcctggtcggctgccgcgtttgcgtcgttttccgcggaatcgtcggattcttcggactcggtgccggtgtgccggaacccttcgtcatcgacttcggggatggcgccgggctgcttggcccaatcgcggatggtggccgtgcacagcagggtgggggtgccgttgatggccacggcgtccgaaccgcacatgccgtgaccgcacgaatagcggaaggccagcgtcgggtcgacggtgcgtttgatggtcagcaggcagtcgagcacggtgtccgaggggcgcgcgggaatcgtgtattcctgcacccactgcttgccgcgcggacgacggcgtgccgccgaatccgagccgccgccgaatggggagcttttcttggcgaacgggctgccgccgcgtgcacgttcggcgcgctcgggtcgcggcgtgaaacgatgcacttgcagggtaaccgtcgtgttgctcgcctcagccatgttctgcctccatgaaacagtgggatgtcaagtccaatatcagccaacctattgtgccacaagccctaggcggcttggtattaccaccagcggatcagtactcgcgcttcttgggtggatagtcggtgatgtgcactggcttgaaacttgccggaccatcatcggcgaccatcgagtgagcaaggaaatgctcatcgtcgcgttcggggaaatcaagtcgttgcatggatccgcgggattcctgacgggattcggaagcgtgcagcatggcctcggccagttcgattagatgacggacttcccagatggcggtgacctcctgattgaaagcggcggtcttgtcatgggcccgcaaggtatcggcaaccggtgtgatgtcgttgttgatctgagtcaacgccgtatcgatggtctgagcggtgcaacgtacggccagagcctgctccatcactgatccgagttgggccatgagctgataaggattggcggtgggcccgccatcgtctgaatcgtccatcggtccggcgagcagttcgtcaagctctgccttgcgggaatcggcagcctgatcggcggcatcggtcagcatgtcatcggtcgaatcatcggccatggaggagtcaaccgggttctcgacgatgcgtgcggccatcgtctgaccagcacgtgtaccgaacaggcaggcgtcgagcagagaattgccgcccagacgattcgcaccatgtacggagacacaagagcattcgccagcggagaacagtccatcgactacctgcacggcaccgtcggcccaacggtacacctcgccattggtggtgatggggatgccgcccatcgtgtaatgcgcagtgggcttgataggcaccaggtccttggccggatcgaggttcgcgtactgctcgatggtttcgaccacctgcggcagcacttccttcatacgttcggggtcgatgccggtcatgtccagccagacgcagtccttcggaccatccgggtccttcgggtcggcgacgccgcggccggcgtcgatctccgccatgatggagcgggagaccacgtctcgcgcggccagatccctatgctccggggcgtagcgttccataaacggctcaccgtcggcgttcctcaggatgccgccctcggcgcgggccgcctcggacagcaggatgccggtgtgcgcgagcccggtggggtggaactgcacaaattcgatgtcctccagctgcaggccggcggccaaggccaatgccatgccgtcgccggtcaggtcccaggaattcgatgtggtatggaacagtcggcccgcgccaccggtggcaagaagcacgttgcgcgcgtggatggcctgaatcttgcccgaatgcgtgtcaaatgccacgatgccggccgcctgcttgccgtcgtcggcgagcaccaggtcggtcacataccattcctcggcgaactcgacgccggcggccacgcactgctgccacaaggtgtgcagaatctggtggccgatgcggtcggccgcataggcggcgcgcttgaccggggcaccgccgaactcgcgcgtgtggccgccgaaccggcgctgggcgatatgcccgtcatcggtacgggagaaggccacgccctgacgctctaggttgatcacggtctgcggcgcgtattcggcgagcagtttggccgcgtcctggtcgacgagccagtcgccgcccttgatggtgtcgtagtaatgccagtgccagtcatcggactccacattgcccaggctcgcggcgatgccgccctcggccgaaccggtgtgcgaacgcagcggctgcagtttggagaccacgaggatcttcgggtccacgccttgttccttgagctcggtgattttgggggagcgcagcagtcccaacgccgccgacaggccggccgctccggcgccgacgatcaccgcatcatacatatcttccaaacgtttcggactcatgggttcgattctcgcacacccgccgaacagtcttcgagccgtgtcatgaaagccgattagccgacacggctgctcagcttgagtatgccggcatcccgctcgatcactcccttcagctccaatgcgccgagtagctcaagtatggtgccgatattgggaatctcgtcaggtaccgtctctcgcgccacacgcaatagtgcgtccggggtgacgatgagatgtcgtttacggcattcacgaatcaatgccactaatgtgcgttccatttccggcagcttggcgataatgatacgttgttgggcttccttctcgggatcgagcttcggcttgacacgaagatccggcatctgatgcgacgagggcggctcttcacccttgctcttgttggcaccggcctcggcagttgcgctcgccggcccatccttggattgaacgagtgtaggctgagtatgcttggtcctaagacgtttcgaatgacctgaatcttgtgacgactcctgtgacgccgatgattccgaggatgctggcgataacggagtcgttgccggcacttccatggcctcctcgttttcggacgagtcctgacctgtggatttcggtatgcctgggcatgccgccataacgggcttatgccgttcatggcatatatcctcagtggatgtggcggcacacagaatcatcgcccggtggtcgccgatcatcttattgcacccggcgttgcaaggctgattgatgtcaccgggaaccgcatacacttcgcgcagcaattcgcatgcccatcccgcggtgttgagcgctccggaacgcaaccgggcttgcgtcacaatcaatgtggaagacatggccgcgataatgcggttgcggagtagaaaacgacgggcttcgggaatcgtccctgggcacagttcactgatcagtgcaccaccctgcgcctcgatacgttcgaacagcgtgcggttacgcatcggtccgatatggttgagcccgccggcgaatacggcaacggttctgcccacattggcgggcattctgccgtgcagcgcattcaacgctccccaatgtgccgccgcatccgtgcccattgcgcctccggacacgaccagatgcccggcaacgactgcctgttcggctacggtgtgtgccacataccggccgtattcggtcacgtcccgtgaaccgacgatgccgaccggtttggcgcaactggtcaatgcgcgtggatcgcctttgatccacaaacacagcggtggcgcccaatcggagcgaatggacaggtcggccaactgcgagggccaacatggatggccggggccgataatccattgcgtgccatccatagtgaaccagtcggccagttggatgatgtcttgcgagggcaggtccatcatgcggttatgccagccggccagtgcattgcggaaggagcgcatcgcattcgccgacgccttgcggccccatcgggtgaggccatccacgaacatgcggtcaatgcgtgacagcgccgggccgcagattccagatggctggcttggatgggattgcgccaacgcgtgccagagggattcggcgctttccgcgcctttgagcgtggcgtacatcatcacatccgccccatcaagacagaacgtgagcgcggcgcggtataacgtatccgtgggaggcatgggaatggtgcgcgaaacagcgaggcccgtatcggtgtgatccacactgcctgcggtgccgccagattgtcggatatcagtagcgttactcatgtcatcctcgttctcatttcgatgccctgatggacgtcctgctcggtgggggacacgcggccggccagatcggcgagcgtccaagacagacgcatggcgcgatcggccccgcgcaatgtgagttgatgattggacagggcccgattgaccaattccatcgctttcagcgacgtattggcgtgcagccattttcccgaagcttgcgcgttgcacacccatccgtactgtctgaaccggtccttggccacttgacgggcgcgaatcacacgagcttgtattccggcactggactcgccgattggctcgctttgcacggcaatgcgcgagaccggtggcaccgccatctgaatatccacacgatccaatattggtccggacaatcgcgagaaataacgtatacggtctttttcccggcaagcgcaacgttcgccggtgccgtaatagtatccgcacgggcaggggttggccgccatgatgagttggaatgaggccgggtaataggtgctgccttttgaacgggaaagcgccacatacccggattccaatggttcgcgcaacgtctgcagggcgcgtgcgctgaattccggtgcctcgtccaggaacagaatgcctcgatgcgcgcgcgtgatcgcgccgggaacggcgatgccgctgccaccacccaccaaggccgccgtgctggaggtgtggtgcggtgcctcgaacggcggcatgtcggtgatgccgtactgaggcagtatgccgcacagcgaccgtatcgacgccacctccagttgttccgcctcgttcaacgggcacatgatgccgggcatacgtgaggccagcatggttttgccgctgcctggcggtccggtcatgatgagattatgtccgcctgccgccgccacttgcagcgcccatttggcatgttcctgacccagaacctcgttcatatcgccacaatcgttgggatggcttgtgggcgattgatccgtggtggtctcgtcggcaaccggtgtatcgggaatcgtataggtggcatcgccgcccatcagttcgatgagctcacccacatgcctcacgcccactacatccagtccatccaccattgaagcctcgtcaagattgcgatggggaacaatcattttgcgcacgccacgttcctcggcatgcagcatgatcgggagcagcccatgaatcggcagcaccgagccgtcaagattcacttcgccgagcacaatggtatcttctaggcaatcatgccctatggcacccgccgcgcataggacgctggccgcgatggccagatcatgcgacgaaccacgtttgggcatggccgcagggctcatgttcacggtcacgcgggtttgcggccaaccgaatccagtggcttgacacgccgatttcacgcgctcgcgggcttcggacaacgatgcatccggcaatccgatgatgctgaagtatggcaagccagggctgatgaaagcctgcacttggacgatgaaggccttaaggccgatcagtccgactgagagagtgctaccgatagccatgtctactcctttcgcaatgtgtttcgcaacgtggctgttttttttggggggggggacgaattcagaaggcgttttcgatgtgatgcacgagcggtctgcccacccgaagcacgatggtgacgacatcgaaacggactgccgtatgcggcacacgattacgccggtcaagcagccaatcgcaggcggctttcctgagattgtgctgtttcgccggcgtgacggcctcttgcggatatccgtaatgcatggaccggcgtgatttcacttcgacgaacaccaccgtgtactcgggattgagcattacgatgtccaattcgccgtaacgggtatgccaattgcggctcaaggtcgtccaaccgtgttcctccagccacgcggcggcatactgctcgccgagcgcaccgaactgtttgggcgtcagattgcggtcgcccatcgtggccgcaatccgttccgaaggcagcgttgcctgcggatcaggtgaagccagcatgggctggtgaaaggcaagaccggcgtcgatgccggacttcgtcgtcggctgggtaagtggtaaagcgttcatgattccactgtgcgggttacttatgtaagagcacaagcgcaaccggcaaatgtggatactatgacgcggtttggcgtgttgtggataacgtgtggatgaaaacctggttatccaccattagttcagaaggtttaccaaggctccccagtcggcttccctgtgacgacagacaacccgccgagttgttcgctgaatacgtcagacccagtgagcggagaggggagccaaggtgcggtcacttcaccaaatcggtgagttcgccaaggttcagttcgaagctgacgccacgatcctcgaaatgcggctggtcacgggtgctgaccatggcgtgtcgcacgaactcgccggcgatttcggccgactcggccaagccgcggccggccatcaccgcgccgcacagggcagatgcgaaggcgtcacccgtgccgtgaatcatgtatggcagcttttcatgagccagctcgatcttgccggcaacaccggtggaagcgctggccatatagttgacgattttgccatcgccatggtcgatgcccttcagcaccacgttcttggcacccaacttcagcagagcaccaagcagctcgtcaaccgtggcctcatcaatatcctggccgggatagtcacgcttggtgagaatgctcgcttcggtgaggttcggcatcaacacgtcggcaccatcggccagcgcgcccattgcctcgcacagctccggtgtgtacgtggggtacatttcaccggcgtcgcccatcaccgggtcaaccagacgtagcgcattcggatattcgcggtagagacgctgaatgatcgccacctgatcgggggagcccaggaatcccgagtacacgccgtcaagctcaacgtcttccttctgccaggcatccagatagccggagaggatatccgtggtgtcatggaacgtgaacaccgcgtacttcgtgtgtgcggagaacagggcggtcggcaccgggcagacatcgcagccggctgccgaaagaatcggaatcgcggcggtcagcgagcacttgccatagccacacatgtcatgcacggcggccacgcgcgggatgtacttcggatcgcggtcgtacaacgtaacgtcggacactaga

SEQ ID NO: 78 - DNA, 6770 bp, Unknown
  R206_24m  MAG No. k141_8130
cgcggcccgcaacggcaactatctgtggagcgggcgcgccaaccaggccgatattctgcctgatgacatctattcgctgggcggcatcgccgtctacctcggctacggcgcccaccgcggccagcatttcgagaacgacctgctggccgtgatgcgcaaatgccgtgacgtatgccagcgcctgttctacgggcaggccgaagacgaggcgactgcggcaaccaccgccacggcctccgccgcaacgcagcagccgcaaaccgcgcttcgcccgcgtatgcacgtgatcgcaccgcgactggagcggaaccgacgccgcgcgcagcgatagacctttcttgtattgcgttcactacgttcattaggtcgattcatcgttcattaggtcggtccgccgccgcataccttgttggaatggcggcattccaacaacagatacgagggtgcagtgacctaatgaacgtcaaatcgacctaatgaatgagctctggcgttccaaagcagatatcagctatacagacacagcatattcgttggattttcaggtgaacactcggtgaatgcggctgtccgaaaaatggcgtaagttatattaggtcacacaagggtggccacctgaaaaccacgagcgaaaaggtgagccttgtctgaagaaacgccaatggtcggcaaaagcgtcgtaacgctggacggcctgtctacaaaccagattctcgacctgctgcataaggccgaatacatcgattcccaccgcaaagaggttgcccatacctgcgatgggcgagtgctggccacgctgttctacgagccctccacccgtacgcgcctgagctttgagacggcaatgctgcgtctcggcggcaaggtcatcggattcgccggcgcgcagctggcctccgtgaccaagggcgaatccatcgccgacacgttgaagaccgtgtccaactacgtggacgtggtcgccatccgtcacccgaaggagggtgccgcgctggtggcctcccgcgccgcatccgtgccggtgatcaacgccggcgacggcggccacatgcatcccacgcagacgctggccgacctggccacgctgcagtcgcgcttcggccgcatcaccgacctgaccgtgggactgtgcggcgatttgaccttcggccgcaccgtgcactccctgatcgagaccctgtgccgcttcggcaacgtgcgcttcgtgcttatcagcccggacgagctcaagaccccgcagtacgtgatcgaccgcatcaacgccactgacaactgctcctacgtggaagtgcgcgacctggcctccgtgatcggcgacctcgacgtgctgtacatgacccgcgtgcagaaggaacgcttcttcaacgaagacgactacctgcgcctgcgcgacacctacattctcgacgaagaaaagctgcagctcgccaagccgtccatggccgtacttcacccgctgccgcgcgtcaacgaaatctccgtggacgtggacgacgacccgcgtgccgcctacttcgaacaggtcaagaacggcatgctcgtgcgcatggccctcgaaagcaccgtggtgggcgacgaactacccggatacgaaccgctcaaccccaaggaggttcaggcctgatggaagtcaccagcattcagaacggcatcatcatcgaccatgtgccggccggaacctcgctgaaggttctcgaatacctgaaaatcgaaccggccaaaaccaagcttgcgctcatcatgaacgccaactccaagcgttacggctccaaggacatcatcaaaatcgaggatgacaaggacatcgacctcgacgtgctcggcttcgtggcctgccaggccaccgtagacgtggtgcgcggcggcaagatcgtcgaaaagaagcagccgaacctgcccgagcacatcgtcggcgtgatctcctgcgtgaacccgcgctgcgtgaccaccaccgagcccggcatcaagcagatgttccacctcgtgcactctgaacggctcgaataccgctgcgactactgcgacgaggaagccaaactgtgagcatcaccctacgcaacatcaaggtctggaacaccggcgaagtcatcgacctcgtggtgcccgggaccgctgccgcctacttcgccgacacctccgccgtggctgacggtgccgatatcgacgccaccggactgaccgtggcccccggtttcgaagacccgcacgtccacttccgcgatcccggccagacctacaaggaatctatggtctccggctgccgcgcgtccgcatccggcggatacacgaacgtgctcatcatgccgaacacgttgccggcactggatgggcagaccgtgtctgacctggaagcggccggtgcgaaagaggttctggatgccggcttcgacaacgtcatcgacttcctgcagcagtacgatactgcgcacgatgttcaattgccggttcgttacgatctgtgcgtgtgcgcgtccaaggatcgcgccggtcatgaggcaagcgacgttgccgactggctcaggtacgtgcccggattcgaggacgacgccaagacgccggccatgctcacgcaccccatcaccgcaattagcgacgacggttccgctgtgacgccggagatcctggaccaggtgctggagaacgtcaaggcctccgacctgtacctaatcgagcattgcgagcatcacgatacaggtgccgtgaacgaaggcccggtctcgcgcgaacttggcgtgcccggcattccggaagacaccgagctcaagatcgtggcccgcgatatagaagcggcccgccgcactggtgtccacgtacacttccagcatgtgagcactgccatctcgttcgaggcgattcgcaaggccaaggccgaaggattgccaatcacctgcgagaccgcgccgcactatctggcgttgagcgacgaggcgctgctcaagtacggcacgctcgccaagatgaatccgccgctgcgctccgaagcggaccgcaaagccaccatcgcggccatcgccgacggcaccgtggatctgctggccaccgaccatgcgccgcacacgttggcagagaaggaactcggcttccttgaggcgcccaacggcatcatcggactggaatgcgcgtacggcgtgtgccacaaggtgctcgtcgacggcggcttcatttccgatgagcgtctgatcgagctcatgtccgtgggacccgccgaactcatggggcgtgtgccaaccgacgtggccgcgctggtcgaggactacgccgaacccgcgcccactggggatgatccggatggcgtgattgcgggggagagcgacgctcagccgcagcgtgaaggcgtcaaccgactgctcgacctgagccgcgtggatgacgccgacaatgtcgacctcgtggtgctcaacaccgctgaggaatggaccgtggaccctgaacagttccactccaaggctcgtaacaccccgttcgacggctggcaggtcaccggacgccccctcgccacgatcatcggctcccagctgatgttcagccgtctgtagataacataaggagcagcatggatcgcctgatcgaagcgattgacaacactcagaaccccagcgtcgtgggcctcgaccccaccgaggcgttggtaccgccgcaggtcgtggcgagctttgccgacgaggtgcgtgactcggtcgaatccccggaggaaatcgaatccgcgcagctggccgtcgcctacttcgaatacaaccgcacgatcatcgacgccatcgccgacatcgtgcccgccgtcaaaccgcagatcgccatgtacgaggcgctcggccccgccggcgtggacatctacacgatgacctgcgaatacgcggcccagcagggcctctacgtgctcggcgacatcaaacgcggcgacatcggctccactgcagccgcctacgcccaccacctgaacggcgtgggcgacttcgacccgtggcatgaggatgcggtgaccgtcaacccgtatctcggcaccgacggcatcaccccgttcgtcgaggccgccgccgaagccgacaaggacatcttcgtgctcgtgcgcacctccaacccgtcctccagcgaactgcagatgctcgacctggccgacggcacgaaggtctacgagcatgtggccgatctcgtggaaggctggggcgccgagaccatcggcagccacggctactcccgcgtgggcgcggtggtcggtgccacccaccccgaggaaggtaaggcgttgcgtgaacgtatgccgcacacgttcttcctcgtgccgggctacggtgcgcagggcggcacggccgcggacgtggcaggcatgttcgacaagcagggcagcggcgccatcgtcaactcgtcgcgcggcatcatcggcgcatggaagaagagcggcaagtactccgaatccatgaccgccgacgaggcgctggaccttgtggcgagcagcgcgcgccaggcggcgctcgacatgcgcgataatctgcgggttgccgtatataggtaggtagattgtccggctgtgggctatacgtgagtgtgggctggaaaccggagccgagtgtgtttaactacccctcagtcaacctgcggttgacagctcccctgatagggggagcttgatgtgctgaataggaatgaaatgacaactttcacccccacccatgatgtggttgcggaggcgactgcggccggattcttcccgccgcgccacaacgtcgaaatcacgcaggttacggaactgaccgaccgcgtgatgcgactgacgttccacgacccgttcatcgcctcccacgccaagcccgcccagttcgtcaacctgttcacgcacgacgacttcatgctcatgccgcgtccgttcggcgtcagcgaagtcgacggcgacgaagtcagcgtgatcttcgccgtcgtgggccacggcaccgaacagttggcaggactgcaagacggcgacaccgtcgacgtgctcggcccgctcggccgcggcttcaacctcaaggaagacgccaactacattctcgtcggcggcggactcggcgtgcccccgctaatctacgccgcgcaaaagctcgccgaacacgacgcctcctttgccaccgccgtattcggctaccgcaacgaccacttcgctgaggaatacgtctcccggtacgcggactggtcgtggagcatcgacgacgccgaaggcaacgtggtcgacctgctcaacaaactcgaacaaggcgacgacctgaaggcctacgatcgcaagccgatcatcttgtcctgcggaccgctgcctatgatgaaggccgtggccgcttgggccgccgaacgcggcatccccgcgcagctgagcatggaacagcgcatgggctgcggctacggcacctgcgtgctgtgcaccatcgacaccgtggacggccggctcaaggtctgctccgacggacccgtgttcactcgcgaacagctcggatggggggagtgacgatgagcgcaaacaaccagtccgcgcagggcagcgacaaccacatcaacctgtacgagccccacgtgtggaagcaccacaccaaggtggccggtctggaatggaagaacccggtcggcaccgcctccggcaccttccagtacgccgccgtccgctggttctacgacgtcagccagctcggcgccgtatgcaccaagggcgcctcgcccgtgccgtgggagggcaacccctcgccgcgcaccgccgaatcgccggccgcgaacatcaacgctgtgggcctgcagaaccccggcatcgaccattacttggccgaagacctgcccaagctcaaggccgcgggcgcgttcgtcatctccaatgtcgccggacattgcgatgacgattacgcggcggtcgtggaaaagctcgccgactccgacgcggacatgctggaaatcaacgtcagctgcccgaacgtttccgccggcggcatgagcgtgggcaccgacccggtggccctcgccaatcttatggaccggctgcgcccgatgaccgacaagccgatgatcgtcaaactcacgccgaacgtcaccgacatcaccgtgccggcgcgcgcggccgtggaacacggcgccgacgcgttgagcatgatcaacacgctcaaaggtatgcgcatcaacattcgcacaggccagccgatcatcgccaacgtcaccggcggcgtatccggcccggccgtgctgccgatcggcctggcagccgtctatcgggtgcgcaccgcactgccggagattccgatcatcggactcggcggcatcgacagtggtgagaaggcgctcgaatacctgtacgccggcgcgaacgccgtcgaagtgggtgcggccgcgctcttcgacccggtggccccgctgcgcgtcgcccgcgaacttgacgacctgctggacagccgtcccgaactcgctgctaaactggccgcaggacagacttggaggtaaggaacatcatggcagaaacactcgcacatcgcttcactgaattcctgttggaatccaacgcgctgaagttcggcgacttcacgctgaagtccggccgcaagagcccgtacttcatcaacgccggcgccttcgacgacggcaagaagatcgccgcgctcggcgcgttctacgccgaaaagattagccacgccatcgtgcacaacacgattccccgcaacatcgacaccgtgttcggccccgcctacaagggcattccgctggccgtgtccaccgcgatcgcgctgaccgccggccacaacatgaccgtcggatacaccttcgaccgcaag

SEQ ID NO: 79 - DNA, 4136 bp, Unknown
  R206_24m  MAG No. k141_8321
ctcttccagaaggccacggtcttcgttggtcatcgaatcctcgtccagcggcggaatctcgccgaagttcttgttgatgaggttggccacgcggttcaccaggttgccccacgaggaggcgagctcctcgttgttgtggcgcacgaactcggcccaggtgaagtcggaatcagaggattcggggccggccacggaaatgtagtagcgcacggcgtccacggggtagcgggcgaggatgtccttgacgtagatcacgatgccgcgggaggaactgaacttcttgccttccatggtcatgaactcgctggccaccacctgctcaggcaggttgagcggacccatcgggccggtttcgccgcccttggagcccttgccgttgtatgcgagcatttcggacggccagatctgggagtggaaggtgatgttgtccttgcccatgaagtagtaggccgggcagctcggatcgttccaccattcacgccacttctccgggtcgccctggcggcgggcccattcgatggaggccgacaggtagccgatcacggcgtcgaaccacacgtacagcttcttgttcgggttgtcgatccagcccttcaccggcaccgggataccccagtcgatgtcacgggtgatggcgcgcggcttgacctccttgaacaggcccagcgagaagttgatgacgttggtacgccagcccttgcgggtctccagccatgccttgttggcttcggcgagcgccggcaggtcgaggaagtagtgctcggtctgctcgaagcgcggggtttcgccgttaatcttagagacggggttgatgagctcgtccgggtcgagctcgttgccgcaggcgtcgcactggtcgccacgcgcaccttcggcgtggcaaatcgggcactcgccctcgatgtagcggtcgggcagggtacggccggtggacgggctaatcgccacctgctgggtgcccttgtagatgtagccgttctccaagcactgcttgaacatctcctgcaccacgtgctcgtggttaccggtggtggtgcgggtgaacaggtcgtagctcaggccgaggtcgcacagatccttggcgatcacgcggttgtaacggttggccagttcctgggcagtgaggccttccttctccgcctcgacgagaatcggggtgccgtgctcgtcggtgccggacaccatgagcacgtcattgcccttcatgcgctcgtagcgcgcgtagacgtcggagggcacaccaaatcctgcaacgtgaccgatatgacgggggccgtttgcatacggccaagcaacattcaccaaaacatgactcataaggcttgattatccggcgcggcggggacacgcccggatagctgccgcgccgccatcctcatcccactcacctatccgcccgtaacttcccccacatacttatccgtacaccgcttgcgcgcttatccgcatacgcattcgcacacgtatccgtacatgcatccgtacacacgtccacgcacccatccgtacgcacgtccacgcacatccgcacacacttccgcctgtcgatatccaccgagttatccacatcattcgcgcacctagtgaagttatgcacttatccaccgttttcgcttatccggtggcgcgcaagccgtacttctgcatattgttcggtcatggatatcacagcaggtccgatgacggacatcacaacagtcacctcgccggcaaccgcgcagcccgcggtgccgccgatactgtttaccaaggatctgccgggaccgctcagccttaaccgtctggccgccttcggcgcgttacgtaagctcgacgattccgccggctactggatcgagcattcgggcacactgtatggtcgcgcaaaaatcgtcgcggaggtcgccccgtttggcactgtggtgtgttcgatgaccgccgcttgggtatggctgggaggccccgactttccgagcaccatagacgtgatctccacatcgcacttccgctcggcatccgtcagccgccgcatccgcgtattcaaaagattgacgttgccggagcaaatcatcaagctcggcgggctgcctgtcaccacgccagcccgtacggcttgcgacctggtgatgagtcctgaagacatccccgatccttccaccgtcaacgcactggtgtgtcagctgatgtccgcgtaccagtttcggccaaacgactgtctgcaaatcgtcaaggagcatcggcatcacaagtatgccggacgcgcacgcatgttttttgaatcggtgcagaaggagattgacgaaccggctttggagcaatgcgcatgacgaggggattcattgccagaggccatcgcagaggccgccatgccgctcaccgtttacggcatttgcggcaggcgcaacggttgcctcgccacgcggcggcggcacactcatccgaatccgcatcgcgcgcaatctcggatatgaccgcgccgcctgaaccacccatcagacttacgcccgcggtggcatgttcgcccgatacggatgttgccgtgctctggcacatcgcatatcacgtgcccgaactgcgtaaatggctggttgccaatcccaaagccgacgcgcctttgctggaattggtctcgcagcgtggtgggcccggggtccggcaggcgttggaaatattgttcgagtcgatggaggcgtaacggggagataatcgccggctgctgcgctatcccttgattttcagcacagccgcatacacctgcttgcgattggccaacgatccgtcagccagtggatgctcctgcaccacttgcgcgatggcgtccttgatacgcaggccttcctccaaagcacggtcgatggagagcacggccatgtcatccacgctcaacgtactgggcgcggccgcttcggcctcctcgttggacgcgccgccgatgaccagcaccatctcgccacggggcggatcatcaatcacactttggcgaatctcgccaatcgggccgcgacgaatctgctcataatccttggtgagttcgcggcacagggccatcgggcgattcgggccgaacgcgtccagcagatcgtccatcgaatcggcaatgcgatgaggcgtctcgtagaacacgatggtgcggcgttcgggcaacagcgtgcgcagatactgcacgcgctcggaatgctttcgcggtaggaagccctcgtagcagaagcggtcggtgggcaggccggagagggcgagcgcgtcgagcacagcggaggggccgggcgcgcaggtgacgggcaggccgcgttcgatggcacggcgcacgatggccaagccggggtcgttgatggtgggcatgccggcatcggacacgacgagcacggtggcgccggtttcgacctggtcgagcaggccgtcggccttgtcgcgctcgttgtggtcgtgataggcgatgacgcgaccgttcacatagacgccgaggcgacgggcgagatcgtagaggcggcgcgtgtcttcggcggccacgatatcggcccgctccaagagggccaccagacgggcggaggcgtcgccaacgttgccgatcggggttgcggcgagcaccacggtgccggcggggacggtcacggccgattcgcgggattgggtggcggcggattcgccggcatgaacttcatcattgcgttcaggcacttgcgtcacgctaccgtcagcgtcatactgctcattcaactcatctgcgcttgtcatactcccagtattgcccataccacagagcaatccacgacaatccatggcggaatcgaggcattctccctttgcaggggctgatttcacatgttccggaagtctacttccgtttcaaggggctcctcatccggtgaagcaccagtacaaacggctttgacgcaacgctattccgccattttggcggcatatctacttgaccatcagcccctcgaaacgcaagtagacctccggtaaaccccaaatcagccccttgaaacgcgagatggcacaataccaacgaagacaaatgaaaagaccctctgcggtggaatgaatgcagagggtctcgtggagctgacggtagtcgaaaccgcgacctcttcgatgcgaacgaagcgctctaccaactgagctacagccccttggatgttactttgctccgcaaa

SEQ ID NO: 80 - DNA, 32274 bp, Unknown
  R206_24m  MAG No. k141_8429
cacccagccgtccggcaggccgacgccaagcgactcatcacgcaaccctcgcacatatgcggcgaaccgttcacgattcatgccggccgctgggttctcgaatcccgtctcctccgccgggaatttcgcgaacaagtcaaatgcacgttctggatccgccagccatgtctcgatcagccgcatcggtcgcactcctcctgttgacacagcagaccacactactactgtgctcggccaacggccgcaagccttatctagagtgtgtttacagataggcagcaagtgtctgccaatgcgtttatcgcaggatataccaggttactttccccgatacacggcagcgacgccgaagacaaattgtatgatgaacaatcccagcaggaagatcagagctcctggccggtacgtgcggtagaagtcgaccatatccggctgcgccaaaggcgctgccatgatatacaccagcgcagcgaacacggcgccgagcgcggaaacaaccaagaacgcgcctacgacaaaacgcagcaggccacgatccgaggtcctccggcgcagaccacggcatcccacgaagacgaataccgagatcagcaggtagaacagcagcccgtacgtgggcagcatgtcgataatcagcagatcgttcatggcatatcctttcgtggcgcaatcccattcaacctgcgcatggccaaaagcgcaacatcgtgtcaagtaatcgcatgatagcaggttttgtccggctgcgaccgtggccacgatgagcggcatgggacatgatgacatgaccggggctgcggcgcggtcgatccgtatcgcccgtattggacaatgatccgttcgccctggatgcgatgtgcgcgatgatctcggccgtatccaaggacttccatgtcatgtggggcacgggttcgcccgcggtggcgatcgagcattgccataacccgcataccaggccggatgcgctggtgttggatatggcgttggggaaaaaatcacgggcgctgacgtgtgccggcgcatccgtcgcaggagcggcgggacgggcagcgtgttcacgtacgtgcaccgcgtggccgacaagctgggagtcgccagccgcaaggaggtgctggacgcatgcgccagatacgatctgctctgccccggctttccgaccggcttggcctgcggcatgccgggcatccggtgatcgcggcgtcctgcgccgtattgtccgtggcggtgctcgcggagtacgtgttctcgatggcggcacgggtccccggcaccgcgaccgtgcgcgatatcatgttggctctggctgtgcttgccggcctggtcggcggcatgttccgcccggaccggttcctgtggccggcgcttgtcacgggcgtaatcctcatgctggatgtcccgatggtcacgccgggaccgacggcatgcccgccgacgaacacgaataccagcaacagctcgacgaattgcgcgacgccgccagccgggccatgggccacacgcacgaggtcatcgactcgctcgaagaacacacaccagcgcaagccagccggacaccgaacaagcccactggcagcttgaggccgtcattccctttaccggcgtgttacagacaatggaatggtgatgttcgcgttccagttgtcggaatcatcggtgatgtcgaacgtcccggacatggattcgataacggttcggtatctcttgaggccgctgccgagtccgagccgtaccgcttcgtcctttagtacgtcgcttgccgaaatgatgacgtgccgccggtcgaaggagatcgtgacggcgtaccattcgtgcggggcggcgtgcttggcgatgttcgcgtacagttcgttgagcagtccttcgagaaggtcgaggatgtcgtccgccagtggatggtcgaacgtcccgaggatgtcgtcaccttggaatccgaggccgccaaggcgacgtcgttgcgattgaatgatgccgtcaagccgttcacgctgctgttcgattttcctgtcggttttgtcgtcgttatttgttttgacgatgcggctgcgatcgtctggtttgtcggtgcgttcaagttgtcgtatcacctggtgggtgtggtcgagcgccgtttcggcgatggcgcgcagatcggtgagttggcgctgatattgctcccgatcggcggggcaatcactgcggcttgcctggtcgatgcgcaggatcatgtaggcgaggtcgttgctgatggtgtcgtgcaggtgacgcgccgtgtgttcgcggtcgagtcgttgcctgagtgtcgcggtcgcctgccgttgggcgaacagcaggttgagactgaaccccagcgacaatgggcataggcacatgatgatcatgcctacgatgttcgacgaggtgaggttgttctgcatgttgttcgcggcgagggcggcgagggccgccagtgcggaagcggctccaaggcggggtttgacgaacgagaggaccgctatggaggtcagtgcggcgatcatgatggtcgtcaacggcgagaacagccacagcaacgcgtatcctgagaccgcgaacagcagacaggcggcccataccggtgccgctccgagcatggcgcacagggacggcgacgagcagcgatatgcgtatggtcgaccatgacagcaggttctgggatgagtacacgcccatctctacggggatcgccactgcgaggaccagccccgcggccagtatggctgggtggtgtatacggttcaaagcagatcgtatcgggcgcatatggcgagggcctccttgcggtcggcggcatggagcttgcggcatgccctgttgacgtaggtgaagacgctgcccttgctgacattcaggagcgcggctatctcgtcggtggatgatccatgcgcgtagaggcgcagtacgtcccgttccctggaggacagcgatggcttgtcgttttccggcagccggccctcggtcgcgtgtccttcgttgagtttgcgattggcttcccgtgcggtggggaatccggtgccggggacgggctcgccctgtgccgcgcatcgtatggcctgcgggagctctttgacgatgtcatctttggctatcaggcattgcgcgcccgcctcgaccgcgtcttgccgatatggatcaaggtcataggaggtgacgcacaccaagccgatcgtcggagtgcgccgacggattctggcgcatatgtccgcgccggtgatgcctcccaaggccatgtcgacgaccagcacgtcgggtcgcgcgccgtgggtcatgcagcgctgcaatgccatcgccggggacgtggtgctccagatgatgtggaaccgcggggagagacggctcgtcatcacggctatggcgttgagggcgagcgaatcgttgtccagcaccccgatggagatggtatgcgagtccgataggtctgtcatgccacccatcgtatgcgcatcccatgctcctcgacgtatcgttgtcatgcgcgcgcatgacagtcttttgctcccggatcgccgtctgtgggctaatggttggcgacagttgtgcaatcgtccgaaggagcatgatgatgaaatcgggaacacgacgcagggccgccattctgaccgcagtgatgctgctgctgtccggttgcgggacgactccgaacggcggcacctcgggaagtggcggcatgctgacctggcagcaggcgaacgaggaatacaaggcgaccgtcgaggatttcccctttgaactgatgaacggcgatgcgtttccagcgaatatacccaaggcgcaggccgcgtcctcgctgtatgccaagggaagtggggaaggacaggcgtatgtctactggcagtgctcggtggaacgcgacattctcgacaacagccagaccaacgcggaagcagcccgaggcgccctccagcagctgcgcaagctgctggataccgactggttcaagaactactacgaggacaaggatggcatatacgagaacgatgtgatcggcaaatccgaactcggcgactattcgaccatgcgggacttctacaccacggactgcacatggtaccggcatgagaacggaccgacgaaatgaatgcgatcgcaccgttcaaatgcctgttggcgtgcgtgacggccacgacgatgtgcgcgatgatgacggcttgctcgccgtcgcggacgccatcgtccgacgcctcctccacggcgaagcggccagcatccacggtcgaggtgcgtaggggcggcatcacgccgttatcctcttcctccaccggcgtgcaggtggctcctgtgttctcgcttacgactccggcgaaaggctggttccactccacgactgatcaaggagcatacgtgcatgcgggcgacgtgttgggtaccgtcggcgatcagcaggtcacggctccggtcgacggcgtgatcgaaacggtcgcgcaggacaacgacatggccgcggactatccgctgttctcgatacggtatggcggcatgagcgccagcgtggacgcgaccgcgctgctggcgaccatagacccggaccagccgttgacgggccgattccagatcaccgacgcgcaggggcccacggactgtgccgcggtagtgaatgacggcgtcgccactccgccctcatcagcggaagatacggccggatcggcgacgactgcgcatgggacggaatcgactcgcacactgcaatgcctgttcccaaaggacgtgcaggcgcgtcccgggcagaacgccaccgtggtactgaccgcgacggcggtcgaggacgccttgatcctgcctgtcaccgcagtcgccggcaggctcgcctccggccaggtcagcaggcgtgacggagattcgttcgccaccgtgaacgtgaagttgggggcatcggacggcacgtcgatcatcatcctcgacggtctcgaggaaggtgacatggtgtccgcgacagctccgaatctcacaccgggagcgcaatcatgagcacactcatccggttggaacatctgagcgccgaagtccggctgcccgacggcgaacgcctgacgacggtggacgatgtcagcgcatcgttcgagaggggaacgtccaccgccatcatcgggaaatcaggatccggcaaaaccagtctcgcctccatcgtcgggctgctcaacaacgactatgacggaacgctctcctatgacgggcgggactgcgccgcgtggaacgacgccgaccgggcgcgcttccgctgccggcatgtcggcttcgtgttccagaactactccctcataccgcatctgagcgcatgggagaacgtggcactcccattgcaataccggggaggcatccccctgcgggtcatcagaagacgagcctcgcgcatgctgcacaccgtcgggctcgggagccggacggtgtgcagcatgccgtcgcgcctgtcgggaggcgaacagcagcgcgtggccatcgcccgagcgctggtgggcgatcccgatctgctgatctgcgacgagccaaccggcgcgctcgacaccgaaaccggcgacatggtcgccgacatactgttccgacatgttcgtgaactcggggtcacactcatcctcgtcacgcacgacccgcagctcgccgcccgatgcgaacgccgactgacgatcgacagggggcgactgtcgtgatccgcatgatcgccaaggatctgcgcatcaacccgttgcgtaccagcctcaccgccctgtcgatgttcatcggcatcatcgccctcatcgccggcgttctcgtcggcacgctcggacgcgactatctggaagcggtcaacgcgcgactgggaggcaagtcacccacctatagcgccatcgtcgacgtgccatcatcggtgaacatacaagtcgtcacggctttgcaggaacgcctcgcgcatttccgtccgggaatcgcatcggcgcaatatcacctcaacgacctcgccatatgggcgtcgtccggtgacggcaacacggagatacgccgcgtcaccatcatcatcaccgacgccgaacggacaagaatcatgcccgcccccatcatcgagggcacatggctgaccggagcggacgaacccgccacgctggaaaccgcagtcaacgaaagcgcccgccaatacgtgcacgatggcaccgtggcactcgcccggacaggaaatccgcaacaggtgccggcacgggtgaacggtgtcatcgccgacgggacggacacacccaccatctacgtcaacgcgaccacactgcaacgctactggccgcaagcctgggaaccggatgggctgaccatcctcgtccatcccaatgaaggcgtggacgatcaacacgccaaaaccgtgttggacgatctgttgttcgacgtcgggaccggcagcatatcgtcatggaaccgttccgacaacgccgatgattacgagcaggtcatcggttttctccaactcggcgtcaccgtcaccgcgatattgctgttgtcggtatccgccatcggcatgatcaacatcggattggccggcatcgagcaacgctcgcacgagctgctcatccgccgcgcactgggcgcgaccagagccagcatagccatacaggtcatcggctcgtccgtgctgctcggcctcatcatcgccttcgccgcggtgctcatctccgcggtgctggtctgggcaattccgtggatgatgcccgccgactcgccgctggaaccgcccgcatacccatatacggcggcgatgattgcggcctgtgcgtccatcgtcacctcgcttgtcggctctcttgccccggccatcaaagccatacggctgcaacccgcgctggcgttgcgatgaaccagaagccattctggacaagcccgccgacagctggatggtcggcattccgatcatcgattgcatccggtaaacaatccgcttgcgggatgtgtaccatggtcgagatgccgcaaccgcagaatgttgactattagcatacaaatacatactattgtcttacgtaatgatgttggaggttaatgtgagcatggcatccgtcacagtccgcgtggatgcggacaccaagcagaaagccgcaaacattgccgaggatctcggtctggacttgtcttcggtcacccgcgccttctacaagcagattgtccgggagaggcgcattcccctaaacctttcctatacgaccgtgccgcctgaaaccatggaggcccttgacgaggcgaagaacaggctcgccgacggcaaacctcgtttcaacagtgccgatgagatgttcgattcgttgggaatctgatcaatgctcaaaccggattacacagcggcattccagcgagatatcaagaaactcaaacgcaagcacactgatttacgcccgctgaaagaagtcattcgtctggttcttgaggacacggcggactccaaggaagtattgaggcgtagacatcgcgcccacacacttaccggtgatttaaacggcgtattggaatgccacatcggcaatgccggcgactggctgcttctatggattcgcgatgatggtaccgccatgttcatgcgaaccggcagccatgacgaactgttgggcaaatagcgggtttacatcctgctttgaaccggccgatggcgatttgagtgcggcagtcggcccgtgcccgcagaagccggcatcgcctcgcagcgtgccggtctgcaatcgctgatcgacgaggaggagtccaggctcgaagccccgggattcaccggcgacaacctgctcgccgaaccacaccggccgctcacgccggagaccatgcgactgctgtcgggcttgccggcggaactgtacgcgaacatcgccgaacacgccgaccggggcgaatggtacgccatctgcgtcaccttcgacacggacgccatccacgtctccgccagcgacaccaccacacccgccgacatgggactcggcctgggcagcggcctcgaccgctaccggaccatcatcgaaacacacggcggcaccttccaaacccacaccgaacaagcccactggcagctggatgtcagcattgacggcagacgaacaagcaccccgaccaccaccgaacacgacaaaggaaaccagcatgaccaacacgacacacgccatccaaaccatcaccgccaccggcctcgccgccatcatggccctgggactgaccgcctgcatggacggcatcgaacaccccgaaaactaccctaccgacggcagcaagacaatcaccgcgaccagcaacccccaggacatcagcgccgaccagctcggccacacatggcccctcaccgtcgaccacggcaccgtcagctgcacgcacaacagcaaaggcgatcccgtcatgcgcttcaccgcgcccgacggcacccaatacgccctcaaccagaccagcgacaacaaggacctgcccgacatcaatcagctcctcgccgacggcaaatccaccggcaccctcaccagcttcgccttcaccgtctgcgacgtgaaataatcatgcgcccgctgccggcggccgtgtcgatgtcgaccaccgtgcgcataccgcgagaatcctgtgacgctgacggttcatcatcgtcttgcagtcaggaccggcgcggttccgccgccgttttctccgtaacaatcgcgtatagcaccagtgcgaccagcacgacgagccgggtccaatcggaattatggatgagcagcccgacgagaatcaggacgtcgtagaacagcgtgcgcgcccaccgccacgggtattccttacggacgcgcatcgtctccgccaatccccagatcagggcgcagacggcgatgataccgttgaaccacagcactatgggcctgccctgcggatcggtgtccggcatagcgagattgctgaagaacatcaccagagcacccgtatatacggcctcgggcgcgaccgacaatcttccgccttcaacgcgaggatctgacatgattacctccttattgggggatccgtcaacgctaacgaatcatgcgaaaaaccattatatttgaatggtatgagcggggctcaagcattcacaacatgctgtcaagcaatcgtatgacaagaatcatccgtttacggcatcgccgccggatgaccacaccagcagggcacccgcgagggagacgacgatgacgccgatcacggccaccgcggtgatggtctgtcgcaatatcagcgcggcgataatcacgctcatggcggggtcgatggagaacagcgtgccgaccacgcgcgccgacgtgatacgcccggacaacgtgtccatcgtgtagggaatcgcaactcccagcaccgccgaggctgcgatgacgccccactgggcggccgacacatgcggcgcgcgagtgatggataccggcgaagtggccagcgccgcaaccgtgaccgacagggcgagcccgtcgagcccggtgcctgccttgccgacccggtcggcgaagagcgtgtacaggccgaagcacacggccgagcccagcgcgaacaggtagccggccggattgaagtagccgcccggcgtaaacgagatcaagcccacacccaccagcgcgaccaccgcgcacaggccctcgcgccagtgatgcgaaccggccagggcgaccacgcagggtccgaggaattccagggtgacggccacgcccatcggaatgcggtcgatggccgagtacaggcagacgttcatcgccgccatcgcaagcccgtagattacgatgcccagccattcgcctttcgaccggccagccagtttcgggcgggtgagtgcgagaatgacgatcgcggcgaccagcatgcgcatcgaactgaccggaattggtcccaacgcgccgaacaacgacgccgacagggacgacgacgtctggatacccaacgaccccaccatcaccatgccggccgccgccatcacacggccacgcgccgaacgcggcgcccgaagcttgcccaatacccctcccctgtcacggccattcccacacgacctctgcgccaccaatgatagtgttcggcgaagactcgcgacgtgcggagtcgactttgtatggcgggatcagcggaaagcggcaggctcactcccgcaacggaatacggtgagaaagctggctgccggacgattacgatccgaaacagtgcacccgtatacggcttcggtcagacacgtttcaccgccttgaacagcagacatgcgcttatcgcggcgatggcgacgccgaccggaatcacgtaaccggcgaatttcaccccgttcaacacccatgtggttggtatgacggcgtacagcatcggcgcgtcctcgaacatgccggaactcaccgtaagtccggcgacgatgaagaaggcgacgacgttccaggcgacgagaggactggcatagagtcgcagaacgaagcatgccagggaaaggacgacggcggtgaacgcaagcatcagaatggtacgcgacgaaagcggctcgttgacgacgagcccgacggcaagcccgtacagcaaagtcaggcagacgttgatcacgacgccgagcgacagcgacttcacgctgaagcgaagcaggagccggtcgtggatgctgaaggaacggtacgaggagggcaccctcgcatgggagaagacgagaccggccgcggttacgggaagcgccatcaccatcgccgactgcaccaccgcacccgtgttcccgtaacgcaaaaagaacaacggaaacagcagcacggccacgaaggcgagcgtcgaccagcggatcaccgccacacgctcaatacgcaatagggacttcatttcctctccactccttcgcgacggaaccggctcaacagcacataggcaaccaaaagcaccacgatcgggacgacgaccatcacggggccgacggacgctcgactcgccgcttccgccggcgacatcacggtgccgttcaggttcagcccgacggtccgtagggcgttcgcgacgtagggcgtcgcatagtcgggaaggtcgcccggcaggagaatccatgcatagcaaaggatggccgagacgattccggcggttctgggatcggcggcgatctcgacgatcgagtagattagggaggtcgcaaggctctgcagcacgacgaagcacaggacagctgccagatgcgggtgcattccggtacccgtcaggaccatgatggcgtcgaagcacagtacgccaatcaggttcacggaggtcaggatcagggcccggaacacggccctgagcgagcatggcgtccacgcggaatacacgtggcgcggcaggccaccgtagtgcgccttcgcgaccctggcatcgcatgcgaagagcagcgaaagacagatcaacggctgggtggcggtgaaatagacgcaataccctccggttatcggggttccgttcgccgcgcttgagatccacgcacccagcagaagggacgagacggccccaaacaccgcggcgaggaaataccacgtgttccagtagtaggcgaccaacgcgcgaacaggggaaacggcgttcaagaccctacctcccctgatacagatccgcgaggttcaccccggtcagatccgtgacctgcacggcccggccgtgacgaatcatgatgcactcgtccgggacgccctggatctcatgaagcagatgcgtggagatgacgacgcagttccccttgtcccggtaggcgcgaagcgtttcggacaaggaggctatgccatcggggtccagaccgttctgcggctcgtcgaggaacaggaacctcggatgcggcacaagggcgaggcacagctccagacgctctttcatgcccgtcgagtagtccttcgccttccgcccatacaccgcgcgattgatgcccacaccgtccaacgccgcctccgggtccacatccagaccccagaacgcggagaccacctcggcgttctctctaccactcaggtaaggaaagaaactgggatggtctatcgccgcggacatctcattgatattcgtccctgtgtacgtgacctctccgctcacgggctttatccgtccgagtagcgtcttcatcaacgtggttttgcccgcgccgtttgccccaagcagacagataatcctacccgtgctcaaccgcaggttaatgttgctgacgattggggaacccttgtacccgatcgagagattcgtagccgatataactggcataatcacccttcacgaaaggcgggcctgaaggcaaaggcaggatgccttgcccagacccgcgcgttgcaatgtcgccgctatttcacccttcagcggccgcaaacgcaacaacatgtcaggccaatcgcatgacgatagctccatgctccctcgattcgccgaaactatccatcggccaaaggaatgaacctgcgcatcatccgcaaggacgatgcatccgactcccatcgcacacttgccgccaccggtctctctcttcccccccccccaaaaaaaatggcgaagggcgggttccagtgatcgtcgcaacgcctggctgactgatgggagggccaggtggacaggtgggtgttcgagggcgtggagtacgcgacgcgtggcgagatgtgcgcggcgcggcggcgccgctacgccgagctgctggaggcgggcatgaacttcacgcaggccgcgcgggcggtgggcgtgtccaaacgcaccggcaaggtgtggcgcaacggaaggacacgatcgaacggcaggaacgagaagccatcggtggactggtatcgttccaccgtggacattccccaaaagatcagttcgaggtatctgagccaggacgagcgcatcagcatcgccgactggcggaaggccggcatgagcgtgcgcgggatcgcgcgcacgctcaatcgtctcgcgtcgaccgccagccgcgagctggtgcgcaacacgaatcccgcgaccggcatgtacgagccgtaccggccccagcagatgagcgcggacggcccagacgacccaagcccgcgaagatccatacggtgcccggcctgctcgcatacattcgtgcaggattgcgggcgcattggagtcccgagcagatcgcggggcgcctgcgcgccgatttcccggataatgatgctatgcatgtgtgcgcggagacgatctaccaggccatctacgtccaggccaaaggcgaactgaaaaaggacgtcatcaaggccctgaggagcgggcgcgcccaacgccggccgcacgggcaggcgggttcgcgcaggcccgtttccgcgagctcatgatcatgatcagcgagcggcccgccgaagtcgaggaccgggcgatacccggtcattgggaaggcgacctgatctgcagcgcggccaacaaaagcgcgatcggcacgctcgtggaatgctcgacacggttcacgatcctcctgcacctgcccgacgggcacgacgccaaacacgtccggcaggccgtcatccggaaaatgcaatacctgcccaagctcctgaggaactcgctgacctgggaccagggaagcgagctcaccctgcacaaacgcatctcgaccacgctggacatgcaggtgtatttccgcgacccgcattcaccctggcagcgcggcaccaacgagaacaccaacgggctcctgcgccaatacttccccaagggcaccgacctgagcgcataccccgaggactacctcgacgcggtcgccgaggaactcaacgaccggccccgcaaaacactcggctacaggaaaccatccgagaaaatactcgaactcatcaacacagcatgatacgatcgcaccaatccaagaccgccatcaagagcggcaaaacacacaggtgttgcaaccaccactaaaatccgccaagcccaccttgccgaatggggtgtcgaacatggaatccgtcttgggggggcgtgcggtagtcgcattcgtaacaacaatccgcttgaatgagctgctgagcaaatagcaggtctacatgcctgctttgaaccagccgatggcgatttgagtgcgattgcgcaggcccaaagttgcgaggatacgggtcacggcacgtttgacggaggcaggttcgacggtgagttgattggcgatttcctcgttgatgagcccttcggagatgagtgcgcagatttcacgctggcgaggggtgagtgcgtcgaaagctttgcgcatttcttgctggcgctggctgctggtgggatgcggaacgcctcgttcaagcacttgtctggtgattcgtggggtgagtattgcgtcaccgttggcgatggcgtgaaccgcgtcgatgaggttgtgcttggtgacgtccttgagcaggaagccgctggctccggcgtcgagaccgccaaaggcgtaatcgtcctcgtcgtacgtggtaaggatgagaatgctgatggtgggccagcgtctggtgatgcggcgagtggcttcgatgccgtccataccgggcatccgcacatccatgaggattacattcggcaatggacgatgctgaacggcgagctgttcgagcgtctcgatggcggatcggccgtcagcggactgggcagtgacgacgatgtcggaagcatcgtcaagcatgagttggaagccaagtcgcgcgaaacgctggtcgtctacgagcattatacgaatcatgcggtgtggtccttttcgttcactccgttggacgggatggtcgcctcgacgacccattcgccgtcttcgtttggaccgtattcgaagatgccgcttgccgattcgacgcggtggaatagacggacgagcccagtaccgtcatccttgcgcgcgtccttgcgcgcgggactgccgtcattgcggataatcacggcgacggtgccgttctcgctgtggttccaggcgatgctgatatgcaccacgttctgtccgtgacgtatggcgttggtgatggcttcgcgagtcacatcgaaacacaaatcagcctgagcttcgtcatcggcgcgcgtaccagtctcggtgaacaccgtgacgatgcccagccggcgtgcgtgcgcgagaatcggccgaatgtcatcccatgaatgctggtctgattcttgggtgtgcgtatcgtcaccgttcgccgctccattgaactcggtcagtgcgcggacggctttgcgcgtgtcgcccagactctctcgtgcgatttcgttgatgccgtgcagcgcatcctccacgcgtgggtcatcggttttgccggccagaccctcagacagtgcgatgattacggtcagatcctggcccacactgtcgtgcagttgaccggctatgcgcgaacggcgtattgcggcatcgcgttggaaggccagctcggctgcccgccggcattcctcggcagctttgtgttcggcttccttggcctgttgcctgccacgtactgcaagcgcgccgcctcccacggctgccaacgttaccactcgactcacccattcggtcgcgagaacgtccggatgcaccatgatggccgacgcggtcatcgacagcatcatgccgatgcctccaacgcacagcccgcgccccctcgctgtccgggcgaacgcatagcaggcgacgagcgtctgaatcatcacgattgagtccaaccgccagtacgaggcaactattaacaataccgcttcaagcgccaaggcaacggctggcagccagtaacggacaagcagtatcgcactgctggctatggtcatcgccagcagcagagccaatcccagcggatctttggcaaacgtatacatggtgtcggccggcgctccgatcgcatgctcccacagcatcgctgcacattcgaccacggcgatgaccagtggcacggccaggaccgtgaccttattggcctgcgcggattgcggtttcatggctcccattgtggctctttttgtatgatgttgcgtgcatgtcagcatgtgcgtatcgtgtcggccacgctgcggtgtagcgcggggcgaatctgcgtgaactggatgaggaacaatgccagccagcaggccgtgcccatgccgattacgcccggccatgggatttcggccacggggatgccgacgagcgccgcggatcttgcggcgaaaacgcttgcgctgacggcgaccgggatgagcgagagaatgaccgcgccggcggccagctgcaggctctgccagagatacatgcggatcacacgacgtggggacaggccgatgctgcgcagcaatgcctggtcggcgaccatgctgcggttcgacagggcgatgaccgccatgctggtggccagggacacgatgcacagcatcgttatgagcagcagcgagtccgcgtagttcaggctcttcggatggccgcccaaggcgagtatccggccataggatcgcgcgcaggtcagcagggtgaccgacagtcccatggcaagggcgagcggggcaatcgtgttcgtgttgctggcggccttcgcctcggcggaacgggcggcgagcacgccggtcgcggacccgcacaggcgacacacgacacgtccgatgcccaacagaatcggaatcagcatgctgacaaggatgtacatgccgaacgaggcgatgatgccggcccacagcgcgctgttgaatgtctgccccgcctcctggccgaacgcgagcgcccgtggcgtgcccatgccggagaacgccaatgccagcgccgccgccatgacaatcaaaccaagtgcccagtgcgcccaagaccgccaaccgtgccgtatcccgatggctcccgtgccgcgaatcacctcgatgggacggatcttcgctgcgcgcagcgaggggatggacgcgcccaacatgcacgtggccacacccaacagcagggatccgagccacgcggccatcgacggcgtgaacgcaggaggtgcgaacgagccgaatccatcggcgaagctttccgcagccatggcgttgaactcgggaaccgccagcaggctggccggcactgcagccagagagccgatcagggaaccgaacaggctcgccacacccacgagcatccacatgctggcaagcacctgactcgggctggcgcccataagccgccattgcgcgaacgtgctgtgaatacggttgaccgtggccgagccgaccaccgtcaacgagaagaacgcgagtaatgacaccaccacatagatcgtgaccgacaccatgccgaactcggccggatcaagacccgcctgccgcgcggccaatgtgaacgacggagacgaggtccacacgaattggttcatgcatatgcccaccagcgtggtcaccactgcgaccaccagaatcgtgggtacccatcccgtgacattgtcgcggaacacacgcagcacatacctagccacgatgagcctccttccgctgctgcggatacgccacgcgctggaccggtcggcccggttggacggattggataggctgggcgttcaccatcatcgggccgacagaccgcgccgccgcaaccaacggcggcgacccggccggtacgaaagtgcggcgtatgccatcggcaatctgctcggcggtgagtctgccagcgatgtgggtgacctgaccgtcgcgcaggaagatcacgtggtcggccaaagcggcggcatccgtgtcatgcgtgaccatgaccacgctggagcccgcatccgccagctcgcgcagcacctgcagcacaagctcgctgttcgcggtgtcgagcgcgccggtcggctcgtcggcgaacaccaccgccggacgcatgagcagcgcacggcacagggcgacgcgctgctgttcgccaccggacagggcgcttaccgccgtcttcgccctctggcgaagaccgaaccgggacagcagctgcgtgacctgcacgtagtcggccttgcgatgggcgagcgagagcggcaacatcacgttctcctcgaccgtcagatacggcacgagattgtattgctggaacacgaaaccgatatgcccgcgaatgaaccgcgaacgccgttcctcattcagtgcgtagacgtcggtaccgccgatggtcacccgcccggaatcgggcctgtccaatccggacagcacatacagcagcgaggtcttgcctgcgccggacggaccgacgatcgccgtcaagcccgctccatcgatatccaacgaaacattattgagaacagtctgcgtgtttgcgggtcgggaggcggttcgagcatcgaaccctgtccgtttcaccagtccgagcgcctgaatcggtgtgccggcattttgccaagtcatgaggtagccccctgtcgtgaaagttgacgccgtttttctcaaccttcgcgccaggggcatggcaggtcgaggtaaacacggaaagtgacaccctagggtgacagattccagtagcgttccatgaccggcacccaatatgccctcaaccagaccagcgacaacgaggacctgcccggcatcgtccaactgcccgcctatgccaagtatgatggacggctgctcgtcatacttggttcctccgggaagcgaatatccttctgtcgtttgcggaaacaagccctgccgatgcccaagaccgccagataaagcaggaacatcacgggcacgacccatgtcacgtaccgccacgggtcaatctggaacgtatcgaagacgatgaacatgacgccccacacgttgatggcgacgatcgccagaatctgggcggccgccgaatcgaacctggattcggccgggctggtatcgttcgcgtcggccggaacgtcaggcgtccgcccggcgcgacgcatgaagccgagcgccgcccacacgatggccgccaccaacgccacggccgccggcaccaccagcttccagaactccccgtcattccagccgtaccggatgacggcgcacgtgatggccgtgacggcggccacgcccaatgtggcggaagcgccgaaaaaccacagcagaccttgattccgacgcccaccatgggaggcccgcacctcatcgtccgcaaccatatcgtccccgcattccataaagttcgacgcgtacgcatgccatctcaattatggcactcaaagagtcaatcagacaacatgctgtcaagcgatcgcatgacaggaatcggctatccgtcaatgccttagggtgctgtcgatgcatatccgattgaccgatgcttctacatgcgtgccgacatgtgccggtccttcgcgtccgcgtacgcattcttacatcacgacctcaaactaatctacgaaaaactttaaacagatatctatttgattttaatattatttatggtatacttaattttattaaacccgccgtgaattgaaggaggcaggtatggatacgacgatgatcccgccgtggatgtcgaacctcgatgacgaggatatgacgttcatcaaacggtttctgctcgcatcaggctccatgaaggaggtcgccgcgcagtacgacgtctcctaccccaccgttcggcttcggctcgaccggctcatccagaaaatcaagttgggcgagcagatcgagaacgagccgtatatcgcgctcatcaaacggctcgcggtcgacgacaagctcgacttcgacaccgccaaaatcctcatcagcgaatatcgcaagcagctcaagcaaggagagtaatcatgattggcgccacaatatttgccgtagtgtttttcgtgtttctcatcgccatctgcatcggcttcatcatattgcagatcaggctttcgaagatggacagcaagtggcccggtctggtattgcccgccatcacattgctgctgtcgcttgtggcggcgattaccgtcttcgccagggcggacatcggtgcgtatggcaacatgtggaacgtcgtgctttccgcattcatcgcgttcctgtccaacaacgtatccaccatcgtgctggccggcatctacttgtatcagcgtgacaagatcaatcgtcgcgccgagctggcccgtatgaacgttcaggacctgtaactcactgtgcaaaacacgcagactgaaccctacgccgcttatgccgactcatcatcttttgcgccgcttcgcgcagcttggatgattaagccggtgacgtggtcgcagggttcgtcgcgcaatcggagccggacgccctgtcatttcggctgattccgtacatcctgttccgccgcgaaccgttcggcgatttgccgtgcgtggatgttcttggcttcgttgacgaagtcggcgcatgccttgctgccgtagagcgcctcaccacacgggtcggcgaaacgcggatcgccgaccagcgcggagcgaatggccccgaacgagccggacagcggcatggcgttcatcacggtcgcggtttgattctgtgccgcccgggtgcgggcggtcttgaccagaccggtctcgtcgcagtagcgcaacgtgcgcgtcgtcacgccgctgatcaatgccgcctgatcaatgggccacaaccggcccgtatccagcggattgccctccacatcgaacgcgccggaaccgttgacggcgttcgccgtgttgtcgttctcgttcatgatcgatcatcccccttgaagccgattatcctctacccgccgtgcgtgtttcgcggcgttgccgtcaggatagacgtttacgcaacgtcaaccgcaagcgataatgggatgtatcgttcaagccaggcaatatgccgtcaagcaatcgcatgacagcaccatgttcggcacataccagatggaagaattggcaaaccttaaaaaataccgcggttattgctgtgccgagaacgccaatatgaccatagacgtgctttcccgctacacgttattcacctgtcatgcgccgatatcaatcaaaagacacttgcataaccaccgctacgcatcgccaataacataccgatgagccagaatgaggcccaggccacgatgctaatccgtaaataatactggtcagagtggcaggtacattggtcctatggctaagcgcaaacatatcggcactgttgttattgcaatactggtcgctattctgctgacggtgggcgtttccggctggctattctggcagtcggtacaacgggtgatcggcgaggcgcagcaggcgggcgaatatgcggctgaagcacagcaatccgtcgggcagggcgacttcaagcaggcgcttgagcagatggacagcgctggcagtcacatcgtcacggcgcacgacgaaacccagggcgcgctatggcaggccgccgaatacgtgccatattacggttcggacgtgaaggcggtgcgcggcatgctggatgcggccgccgacgccgcgaccaacgccctgcccaaaatcgacagtgccgcgcagggcacgttggtggacttcaatatcgaagagctgctgtccggcatgaacttctccgacggcacgctttccattcccaaaatcgcctccatcaagcaggacctgtccgacgccggtgcggtcttgaagcgcgtcaagacgtcgatttatgcgctgtcgcaaccccgcacggaacagatcaccgaaatggtcaaccagggcaagcaggtagtggaccaaatcgatgagactttcgacaccttgaacaccatcgtcgaaaagattccgggctgacgttggttcgttcttgtcaggcgtaccattcgggccggcgcagtttcaggaatggtcgctgtttgcgcgctgctgcggtttgtgtgagatcgatgtcggtgataatcaactgttcatggtcatcagtctcgctgacgacgttgccgtacgggtccaccaccactgattggccggcgaacgccacatcgccctccttgccgacccggttgcacatggcgatggccacctggttctgcatgacctggacgcgaatctcccacaggaacatctccaatggttcggcgctgatgttcgcagtcgggatgatgaccagatcggcaccgcgcaatgcgcatgtacagatgctttccggcatgtgacggtcgaagcagatgacgatgccgatcttgccgaacggggtctcgaacacgtggaatccgtctcgggagggcgcataatagtcgcattcatagaagcgttctgcttgcaggatgtgcaccatggtcgagatgccgctgatatggccttgttcgttgatccatagcgaagcgtcgtagttgtggccgtcctgggctttgaggtacaggttcggtgaaacgtacatgccgtgttgcagggccttgttctgtaatgcggcgacgtgacggtcggtcaggtccatgagatatcgcgacgcatcgcggttctcatactgggggaagaacggggagaactgtatctcagggaagaacaacagatcggcaccggcctcgccggcctgatcgtagtaggccaaggccctatcggcgttttcgtcgatattgtcggtcatcgccatctgcgccatcgccagtctcatatcgtttccccatctttgagccgcaaatccacccgcacatgccaattgctgcccctgacgacatacgtcaatctcatagatgctcatcacaacccgacggagacactttttccatacgccgctcgccatacggcacctgatacggccatgcatcggctgcttttttcgaattactttccttaaacaagaaacgcgccgcacgctggaatatattttgagccccgagtacattaaccgttcacaagatcaatattgcaacggcgcatacgcgctaccacacgctcaaaaagcccggaaaaccgccaatccgagccggtctacaatcgccatacaacggcacgcaatcaccataggaggctgacagacatgtccaaggacacatcaaaacaaacaacattcgatttactgtcgggtttctggctttcggtcttctgtggagcagcggcctgtacgtggtggccaccgtgctgctccccagctgttcaaggacatcggcgtcgctaacccggatgcggcagtcggcacgttgaactcggtcaccgccatcgtgggcctggtttccaacctcgtgttcggcaacctctccgaccacacgcgttccaagatgggacgccgcaccccgtggatcatgccgagtgtcacgggcatgtacctgtacgcgggcatcgccggcttcggctatggcgtgtactcggccatcgaccaggcactcaacgtcgacgtgttgccgaacaaggaagaggccgacaaggacctcggcatcctcagcttggccaccacgctcggccaagcagtcggccccaccatcacctccgtggtcaagaccacgaccggcacctacacgccggcgttcgccatctccatcgtcatggccgtgtgcgctgccgtgttcgtgctgcgtatccagaaggtgaagtagccgctgcgagtgcctatctccgtttcaaggggctgattttgactttgcggaacatctacttccgtttcaaggggctgatgccaaagtagccactggttaaaaacggcggaatagtgatagaacaatgccatttctatctgcgttccgccagttgaccagccccttgaaacggaagtagacctccggcaaacgccaaatcagccccttgaagctgattttgactcagcatcatgcagcgcagctatatcctcagtgcgggtatactattccgggccgtcacgacgacgcctatggaacgcacgcatggcaaagagagaaacatgagtcagcccgacaccgacacggcggcacaatcgccgtcctcgcaacaggaaccgcagattcagacggatggccgtcgaagccattcggaacagatgaaccaaccaacgcaaaccagccagtccgagtcgccacatgatggcaaagacgagcacgccctacataccaacctgaagcgcggcatggaatcccgccacctgcagatgatctcgttgggcggcgtgatcggcaccggcctgttcctgagctccggatacaccatccagcaggcgggccccatcggcaccattctggcgtatggcatcggcgcgctgatcgtctacctggtcatgctcacgctcggcgaactgtccgtggccatgccggtgaccggctccttccatgtgtatgccgagaagttcatcggccctggcaccggcttcgtgatcgcgatccagtactggctcacatggacggtggcgctcggatccgagttcaccgccgccgggctgctcatgcagcgctggttcccgaacagtcccacatgggcgtggagcgcggcgtgcatcacactcatcttcaccctgaacgccttgtcggtgcgtttcttcgccgaggcggagttctggttcgcctccatcaaggtgttcgccatctgcgcgttcatcgtcatcggatcgctcgccatcttcggcgtcatcccggtcgccggctaccaacatgccccgatgttcggcaatctcatcaaggacggcgtcttccccaacggcttcatgccggtgttcgccacgattctgaccgtcaacttcgcgttctccggcaccgaactcatcggcgtgaccgccggtgagacgagggacccgcaaaccgccgtgccgaaagccatccacaccaccctgtggcgtctggtgctcttcttcatcggctcaatcaccgtgatgtgcgcgctgatcccgtggcgccaggccggcgtgggcgaaagcccgttcgtgctcgttttcaacagcatcggcatcccctatgcgggcgacatcatgaatttcgtggtgctgacggccgtgctttccgcctcgaattccggcctgtacgcctccacgcgcatggtgtggtcgatgggcaacgaaggcatgattccgcgctggttcgccaaaacgaaccgtcgcggcgtgccgatgctcgccttgtgcgccgcgatggccggtggcctgctggcgctcctgtcttccgtgatcgccgcctcgactgtgtacctggtgctggtggcgctttccggcctgtccgccgtggtggtgtggatcgccatcgcctactgccagatcgtgttccgtcgccgttggctggagtccggccattccaccagcgaactcaaataccgcacgcccggctatccgtacgtgtcttgggcggcgttcatcctgtgcaccgcatcgttcgtattggtgattttcgacgtggagcaacggttcgcgctcgtggccgagctcgtgttcatcgtggcctgctatggggcgtatttcctgcaacagtgggtacgcaagcgcaaaaaagcgaccgaggccgacgacctcgatacgctttgggtcgcgcgcgactgaacggctcgcgacctaccggcgcaccgctattcgcgccgtgaacgtgcactgatccaacgcaatgccagacccagcaaatccacaccgccacgattgcccatgatgtgggtttgagcgcggccggggagaacggcagcacctgcaggccaatgatgattaagccggcggccagcagcgaagctgagatgaccataccgaacttcttccagtcaaggccttcgcttgcctcttcggcactctgcggaatcgtgtcgaaaccggtgtagaagagcggcgtcatcaccagcactccgggcagaaacgacccgaccatggtaaccgcgccggacgtcgagccgatcggcagcagaaacacggcgcccagcacgaaggcgatcatcgcctcgaccgggccaccgccgacgatcatccagtcaccgaccagcagcacccatacggtgccgatgattgcgccgaatcccatggtgaagtagttccacaggctcagcgatctgaccatgccgccgtcgccgccgctgccatcggcactactgtcgccgttgccgttgttaccatcctcgtgcacaggaatagcggcactgggcaggccagtcgattccaccaaactggccgtcatcgtgcttgacgggctgaatgccgtggatgcggcgaccatgaccgagcctcctttaattcggcctgactgtgatgataacgccgttcacgatatgccgtattatgaacgcagtgagagcccgcttcaccggccctattcggttcatgaataaacttcacctatctgcggcactgaacacatgaccataatgtgatacacgtcacttcctgaaatatgtagtcgttatggaatcacccgcacgtttcccgtatcggagctgtacgatagctgtgagacaggagggtcgtcagatttcggggggagggttccggaaacggtccgactgcaggatgcaccgggccgtgcgacacatgtcaacttgcgtattcacgccaaactcaattgagcaagccgattctcgtaaatggccagaagcggaacaacgccacaccttggatatcgtcgtatggcactagcccattgttgccgtcgtcaagatggtatcgagaatctctggaattggagcgattatcaccaagcacgaacacgttgccgtcagtaacggttacggaaaaaggactgtcgcttggattcacgccggacttaagataagcgctttcatcaatgggtttgccgttgaccgtgatgggctccccggatcccttgcaggcgacggtatcgccgggcagaccgatgacacgtttgattaggtaacgattgctgtcgattatcgacatcagattggtgggaagctgctccccctccatccagtctgcgggatctttgaacacgatgatgtcgccacggtgcagtgcaaagagtctcggagtcaatcgcgaggcaaatacgcggtcgccgatttgcaacgtgtcttccatgctacgggatggaatcacatagacgttgaacacgaaggtgcgtcccagcaacacgaccagcatcaccgcgatcaccgtcagcagatagccgcgaatttcactccaaacggagggctttcgcgcatgtctcctcgactgtccacgcgcttttttgctatgacgccccaccatcatatcctttccgaccggtaacgcaacaccatagtcctcaaaccatgccgttacctacgcccatgtttgagctcagctgtcacaccagcggttcgcgcacgtctagttcacaggcgatgccggtttccttgcgggcccattcggccgcctgcagtgcggcgatgttccataatgcgcacggcactccgccaaggtccggatgcgatgcccagaatgtgaggtcatcagcgtatgcggtgatgaccgattcttccgtgactggcatgatcgtgtggtacagacggtccgcaagcgtggccacgaattcgttggccgcggcgaacgtgtcgataagatgctgttcggcggtcaccggcgggccgaccagctcccaggattcgacgtccgtggcgctccaatgcgcggcttcgccgtccacatcgcgttgcaaagagacgaacagcctggcgaactcatccgaagtcagtcccgtaacccggcgtcgggttgacaattcaatcggagtcatcagataccgttcctttcgcttcgttcattccgttgtctcgctggtttgatttgctgccaaccggtacaaagcctatctcgcacacctcacgatagcccaaaccaccggcatggccatgattgccagccctacgaccagtggccatgaggagccggcgattccggtcagattggtcatggcggcggagacgtcatacatgccatgagccacgatcagcggtgtaatcatgcccatacggcggtacagcagcacggcgagcactgcaatcagcacacgcggtggcgtgccgccggcacaatggccctatcgagcatcgccacatgattcgtgcggtccacaatcgaggcagcatccgtttccattcggttcatgcggccagactatcgcccgttcttgccgattgcctgtaagcaggttcggatagactggcgcgagaacaatgcgagaaagaggcaagaatgacccggaaacggtcacaacagcacgacgcacaacgcaaaccgtcctggcgcgtacgctggaagaccatgagccgagccgtaggcatggaaatccgcgaacacaaaagctcattcgcggtctatgtggtgctgcgcatgctggtgctcgccatggcaatactccagttctttaacggcgactacgaaaatgtgttcctgtgcatcctgacgttgctgttgctgttggcgccggcgttcatccaggtgcagttccgcatcgagctgccttcggcgctggaagtcatcgtgctggtgttcgtgttctcgtccgagattcttggcgagatcagttcgttctatgagatcttcccgttctgggacacggtgttgcacacgatgaacggcttcctcgccgcggcgatcggcttctcgctggtcgacctgctcaaccggtccgaccgggtgaagttcgagctttcgcccctgtatctggcgatcgtctccttctgcttctccatgaccatcggcgtgatctgggagttcttcgaattcggcatggaccagttgttcggattcgacatgcagaaagacgccatcgtgcattccatcagctcggtgatgctcgaccccacgcacaccaaccatgcgattcgcatcaacgacatcacccaggtcacggtcaatggccaagacttgggcctcggcggctacctcgacatcggtctgatcgacacgatggaggatcttatcgtcaacttcatcggcgcggtcgtgttctccgtgttcggcttcctgtacgtgaagaaccgcggcaagaaaaactccatcatcagtcggttcgtgccgcgccgcaagtccgccgaccgcgattatctgcgactggtgatcgatggcgggagcgcggctgatgccaaggccaaagccggcggtgccaacgctgacgatagtgctaacgccagtgcggccggcaccgattcagctgatgcagccggagccaaagccggcaatgccgacgccgctccgaccgtcaccgccaagccctgagtacgctctacagcactttcgaagcgtcgaaacggtagtgcccggtgaccgtcatgtgcttcttgaagacgaagtagtcgttttcgcgctgccgctgcgccatgttgtgaatcacgtacggtgcacgccccgcgatcggccggcggatagccgccctgatagtagccggaatcgtaagccggatggttttcggcgtccttgcgcgcacccgccacgatatccgcgtaatcgtccacaccattgtcattgaaatcgaccgaactggcgactctcgaatacttgcgggccgccccgccttgtgattcgatgattcatgaacgtattcgggtcacactgtgatcgtccgacccgccgcccgcacctcccaatccgcccggtgcttgaacttgtggggctttggcggtatcgcgaccgcagcatcgccatgctcatctccagccatcagctcaacgaattgcaggagttgtgcgggcgattcctgttcatcaaaggcggccggcttgcggacgaattcgccggagaacagaagcggatcacggttatcgagcttggccggccgctcggtgtcgcgaaacgtgcggcggtcgcggctttggatccggccgccgtcattcatactgattctgccggccgtgaacctgttcaactccgatttcatgaaagtcagaggaaagaccggttcggtgagtgtgctggatttcctcgctggcgagttcgtcgtacagaacatgcttgatgctgccgatggtggtcatggcctatctggtggctggtgccatctatacgcccgtggcctccggccgcatgttcctgtacaaggatctggaccgcgccacgatcatcaatgcgaaaatccttgccctgtttggtatctacgccgtgtacgtggcattgcagacggtggtgacggtcgctctctacatcctgtacatcgcgcgcttcgactacgcttccggcacactgctgccggccgcaggtgcggacatcgcttcggatgtggcctccatcgccggcatcctgtgcgccggtgtggtgactatactggtggtggccgcccttgccacccggttctcgaccggcagtacgaaagcgcggaccacaccgtgcacctcgatgtgaaggtggacgaggatacggtgtggcttaacagaaagcaattggccttgctgtttggccgcgatatcaaaacaatcggcaagcatatcggcaatgcattgagggaagagctcaatggattttcagttgtcgcagaatttgcgacaactgcatctgacggtaagacataccaagtcgagcattacaacttggatatgatcctgtcggtcggataccgcgtcaaatccaaggaaggcatctaatttccggcgatgggccaactcagttctgaagcagcatctcgttgatggttacaccatcaatcacaagcggcttgacgcacttcacgccgtcgtcaaggtgctatcgaggtccaccgaaccggaaattgctggcaccgcagagatcttggaacgatatttgccgagtcttgtgctgcttaacgactatgacacaggcaatgtccctatacccaagggcgacgagtcccagtgggtcttgacctatgaggacgcgatgctgttcatccggtcgatgccgttctacacgcaatccgatctgttcgggagggaacgcaacggttcgttccaaggaatcgtcgcaggactctaccagacgttcggaggcgaagaactataccgttccacccaggagaaagccgcgaacctgctgtatcaagttgtcaaggatcacccgttctccgacggcaataaacgttgtgccgccgcactgttcgtgtatttcctgaacggcaacagtatactgggcgacgatgactcccctgcttgtggagggtaatgccttggcggcgatgacgctgatgattgcactgtccgcacctgcggagaaagacacgatgatcgccttggtcgagaacttccttatacggcatgaatcgcaggagatcaattgagagaccgtcaatgaagggtgcacatcaatcacgttctagcattgcgcgactatctgtacgagtcgtctgaacgatctgctggggagcgctcttcgcagaaaaacaacagcagaccggaggccgcatccgctatgtgttgttcaacccttgggccgtgcgcagcaatggggcattgaacagtttcgattcgccactgatgaagctgctggcgcgtgccatttacgccattgtgggcgtcagcgtcgaggaggcgattgcccccatcacccacttgatcgacaacccgccgcacaccgcgctgtcagcgttcatcaagaccaaacccgtcgatctcactatgaacaccttcgacaggggcaaggcggtccggttggacgatatcaccaaaagctgctgaatcgctagctgtcatagcacaaggccttagacagaacacccagaaatcgaacgggtagatggatcgcgtctccccttgacttccggcaagcgcacgccaatcatggggcgtatgggtattgcaatcaaacgtatatatgaagagccgactgcgtcggacgggtatcgggtgctggtggatcgcctgtggcctcgcggcatgacgaaagagcgtgcggcgttggacctgtggctgaaggacgtcgctccctctcccctcctgcgcaaatggttcggccatgaccccgccaaattcgcggaattccgcatgcgttacatcgccgagctcgacgccaatgccgccgtggacaatctgcgccacatctgcgcggagcatcccgacgtgaccctgctctatgccgccaaggacccgcatatcaatcacgccctcgtactgcgcgattatcttaactgaatattgactcaggacgaccgtcgtttcagtccatctgctagattctcgccgattttcgtatctttgaatcgaagtgcacagtcgtcactccttggattgccaagtaaagggatgcctccaaaccaaatcaatccgtcatcgattatagcaaaatcggaacacgattcgacggtccggacaatgcacccaatagcacgcagccgattaatattccgttctattcgtgttctggttgccaccgcagcagtcgccggcaaacggacataaacttcgatgagcgctttcctgtcggccagtcggagcaattcatcgtcaattgcgctgagtccctgttgtgatacatattcagccgagataatcagggaacgtgcgcaaccggcaatatccttgcggagtatctctgcataattcgtggctgtaacgatgctgccttcgaataatccgtcagaccgggtgtcgagcaacgcatccgcagcatcttcgccctgcgtcgcggccgtcatgcaagcgcgcaacgcttccgcctttgcactgagcatgtccattttgatgctcctatacattgtcaagcgtttgggtgtgttgttttgggttggttgtcgagtgtatccactggatggcccgttgctcgagttcgggaaggtcgcgtgcgccgcgttcgatctcgctgatgcggctcgagggc

SEQ ID NO: 81 - DNA, 11421 bp, Unknown
  R206_24m  MAG No. k141_8473
ccaacgatctcgaccggggtgttgacggccagctggccacgctcgacacgaccggtgacgacggtaccacggccggagatggtgaagacgtcctcgatcggcatcaggaacggcttgtcgaggtcgtggaccggggtcgggatgtagtcgtcgacggcgtccatgaggtccttaacggactggacccacttctcgtggtccggagcgtcgtcgtgcagagcaccgtaagcggaggtgtggatgaccgggcagtcgcggtcgaagccgttctcgtcgaggaggtcgcggacctcttcttcgacgagctcgatgagctcctcatcctcaaccatgtcgcacttgttcagggcgacaagaatcttcgggacgcccacctgacgagcgagcagcacgtgctcgcgggtctgagccatcgggccgtcggtggcggccacaacgaggatggcgccatccatctgggcggcaccggtgatcatgttcttcacgaagtcggcgtggcccgggcagtcgacgtgagcgtagtgacgcttctcggtctggtactcgatgtgggcgatgttgatggtgataccgcgggcggcctcttccggagcagaatcgatctggttgaagtcgtactccgggttgacatccgggaactcctcgtgcagcaccttggagatggcggcagtcagggtagtcttaccgtggtcgacgtggccgatggtaccgatgttaacgtgcggcttagtacgctcgtacttttcctttgccattacttttgtcctcctggacgtctcgtgagtttcctgcgccctttcgcacagggactcgcttattctactgggtttctgggttatgtgccactttgaagagccagaacccagtcagcggtatacgatactaccgctgactggagacaccggccacttcatgatgtggcgcgtgtcactcgccgcgctgggccttgatgatctcctcggagacgctcttcggcacctcgtcgtaggagtccatctccatggtgaacatggcgcggccctgggtcttggaacgcaggtcgccgatgtagccgaacatctcggacagcgggaccttggcgtcgatgaccttgacgccgacaccgtcggtcatggactggatgttgccacggcgctggttcagatcgccgatgacttcgcccatgtactcttccggcgtacggacttcgaccttcatgatcggttcgagaatgaccggcttggccttcggggcagcttccttgaagcacatggaacctgcgagcttgaaggccatttcggaggaatcgaccgggtgcatctggccgtcggtgacggtggccttgacgcccacgaccgggaagccggcgagaacaccggactccatggcctccttgacaccggcctcgatggggccgatgaattcggcggagatgtggccgccggtgaccttgttctcgaactcgaaggtcttgccctcggtggtgtcgagcggctcgaagttcatcaggacctttgcgaactggccggaaccaccggtctgcttcttgtgggtgtagccctggtccatgacggccttgcggatggtctcgcggtaggcgacctgcggcttgccctggttgcactcgaccttgaattcacgacgcatacggtcgacgatgatgtcgagctggagctcgcccatgccggagatcagggtctggccggactcttcgtcggtcgtgacctggaaggtcggatcctcttcggccagcttggacagggcgatgcccatcttctcctgatcggccttggtcttcggctcgacggccacctggatcaccggatccgggaaggtcatggagtcgagggtgatcgggtcgttgatggagcacagggtgtcaccggtggtgacgttcttcaggcccacgaaggtgtagatgttgccggcgtcggcgcggtccatcgggttttccttatcggcgtgcatctggaagatcttgccgatgcgttccttcttctcgcgggtggagtcgagcacggagtcgcccggcacgactgagccggagtagacgcgcacgaacacgagcttgccgtagaacgggtgggtggagatcttgaagaccagggccgcgaacggatcggtcttgaccgggtgacggtcgatctcaacggactcgtcgccgggcttgtagcccttgatggccggcacgtcctcgggggacggcaggtagtcgacgacaccgtccagcatcggctgaacgcccttgtccttgaaggcggaaccacagaagaccgggaaggcttccttggcgatggtgagcttgcgcacgccggcgcggatgtcttccttggacaggtcgccgtcctcgaagaacttgttcatgagttcgtcgtcggcttcggcggcggcttccacgagcttctcgtggtactcctgggccttgtccttgagatcgtccgggatctcggtggtgtcgtacttggcgccgagctcctcggtgccgttccacacgtaggcctgcatctcgaccaggtcgacgacgccggtgaagtcgttctcggcgccgatcggcagctgcatcacgatcggagcggcgcccagcttctccttgatggtgtcgacggagtagtagaagttcgcgcccagcttgtccatcttgttgatgaagcagatgcgcggaacgccgtacttgtcagcctgacgccacacggtctcggactgcggctccacgccttccttgccgtcgaacacggcaacggcaccatcgagcacacgcagggagcgctccacctcggccgtgaagtccacgtggccaggggtatcgatgatgttgatctggaacttgtccttggtgtcgtgggactgacggctccagaagcaggtggtagcagcggactggatggtgataccacgttcctgctcctgcgccatgaagtccatggtggaggcgccgtcgtgggtctcgccgatcttgtagttcttaccggtgtagaacagaatacgctcggtagtggtggtcttgccggcatcgatgtgggccatgatgccgatattgcggacgtcgtggaggtccgaaatctcttcagccatctttttccttagttttactcagggcgagtgattaccagcggtaatgagcgaaggccttgttagcctctgccatcttatgagtatcctcgcggcgcttgacagaagcaccgaggccgttggaggcatccaggatctcgttggcgagacgctcagccatggtcttctcacgacgggcgcgggagaagtcggtcagccagcgcagcgacagggtgttggcgcggttcggcttgacctcgaccggcacctggtaggtggcgccaccgacacggcgggagcgaacctcgagggacggacggatgttgtccagggcgcgcttgagcacagccaccggttcctggtcggacttctccttgaccatatcgagcgcggagtagacgatgtcttcggcgatcgacttcttgccgtcaagcagaatcttgttgatgagctgcgccaccacggtggaaccgtagatcggatcgggcagcacgacgtgcttcttggaaggtcccttacgtgacatatctcttacttcgccttctttgctccatacagggaacgaccctgcttacggtccttgacaccctgggtatcgagcgcgccacgcacgatgtggtaacgcacacccgggagatccttcacacggccgccgcgcacgagcacgatggagtgctcctgcaggttgtggccctcgcccggaatgtaggcggtgacttcgatgcccgaggacaggcgcacacgagcgaccttacgcagagccgagttcggcttcttcggggtggtggtgtagacacgggtgcacacgccgcgacgcagcgggctgcccttcagggccaaagtcttggacttcttcggctttgcctgacgtcccttacggacgagctgttcaatagtaggcaacttgaattctccgattcagtggtttctcttgcttttgtgtgaccgccgcactgcgcccacacttttcagcacactcgcttggcatccgcctgttggcgacacccgacgaatcggaaaagatagcccagtccaccggcccgatggccttcgcccctcccgtcggcgcattgctgcgtgcgatcagcggtttgaaggatatcccagcatgctcgcctgttacataaggcgtgctgctggcacacacgaatatctatactacgattccgccggacaacgacgcgccgggcctcgactcactggtttgggggcctcctgcgccctgtacttctcccctcctcccaacgcaacaatcccgggaatgcgtcgcacaacacacgcacacacgccctcccaacgcaatattcccgggaatgcgtcgcaaaaaagcgaacgccacacagcaggtgcccccgcggagactatgtcacacgggggcaccgccaaggaggttacattatgtttcttttcaccacatgccgcttctgtgttatctgtttccagcacatcctcgtgctcttccatatccgatgggaacctctagcaacccggcctctttgccgtatcaccttgccgctttctgcattactaattatagcaaaaccgccctcgcgaaacgcccgatacattaatcgggagtaagcgggagcggctatgttatgcgaggtaggaaaggtgagtgaccgactgactggagtcgtaccttacccgacctttctcaccatctcaggatttcaggcagcgaccttggcggccttgtcggcgtcgaacgggtgggccacggaaacggtgctcttggcggagcccttctcgccgttgtcagaatcccaatgaatctcgtgccggtcgtcatggttgcgccaccagctggacaggatggagccggagatgttgtgccacacggagaagaacgtggacggcacggcggcgagcgggttggacgcgaaggaggtcagggccagcgtggcgcccagggcggagtcctgcatgccgacctcgaacgtgatggccttctgctgcgcgtagcggaagcccttcgggtagatcctgtacatcagcttcgagaagccgaagcccagcgagtagccgcacagattatgcaggatgaccaccgggatggccatcagagagctggccacgaacagcttcgggccattggcggcgacgaccacgccgatgatcagcaggatggccacctgagacacgatcggcagggccaccgtgaccttctcgatcttcttgccgaagaccatgtggcagatcacaccgagggcaatcgggaagagcaccaccttgacggcgttaaggaacagggattcgaccggcacgctcacatactgggaggccagcagctgcatcagcagcggaatcatgaacggggcgcacagggtggagaggatgccgatggagacatcgagggccacatcaccacgggacaggtagctcatcacgttggaggaggtgccggacgggcagcagccgacgagaatcacgcccacggccagcgggccgaacaggtggaagatcgcgcacagggccacggcgacgagcggcatgatgacgaagtgggccaccgtgccgacgatgaccatcatcggctgggtgaggatgcgcttgaaatcgtccagcgtcagggtcagccccatgccgaacagcacgatgcccagcatgtagccggtgtacgccttgccccacaggctggcggccggcacgaagtagttgaagacggcccagacgatgacgatgaccgtaaaccacttggtcagccaatccgcaaaggctttaaccttttccatggtgtttctcttcccttgttcggtgtaggtaacatcgcatgaaactaggcgggtcgcggttgatatgaaacataatgctcacattgtgaacgctcacgtaatcatctctgcaatccccagtcgcaccatcacgccgttgtgtgcccctgacttttcatcaatcgccacacaagacccactcgtccacatcccaccatttgagacagcccacagcctggccccaagaatgaaaccaaccacttgattccatcgcgacacaccgatgagcacacatccgcaaagttgtgtatagtattcacctgttgtgcgaattcagcttgctgaatacgacactatggtggccatagctcagttggtagagcatctgattgtggttcagaaggtcgcgcgttcgagccgcgttggccaccccagtaaaacccttccgttcgcggaagggttttgtttttctccatgaattccccgctcctgccgggaaccgccgcgttgtacactcgggcatatccaattcatctaacacaaggacaaaaggtccgtcatgctgtcttttgagaacgattactcccgcgccgcccatcccgcagtgcttgaagccgtggctgaagccaacaaccatctgtattcgggctacgggtccgacgaactgagcgatcaggccaaggccaagatccgcgaggcctgcggccagccggacgcggatgtgtggttcctcgtcggcggcacgcagaccaaccaggtcgtcatcgacaccatcaccccggcgtatgcaggcgtggtcgcggtcgcctccggccatccgaacgtgcacgaggccggcgccatcgagttctccggccacaaggtgcttacgattccccaacacaacggcaaaatggatccaaccgaactggacgagttctgcaagaccttctatgcggacggcaactacgagcacatggtgttccctggatccgtgtacgtctcgcaaagcaccgaatatggcaccatctactccaaagccgaactgcaggctatcgccgatgtggcgcataagtacgatatgccgctgttcgtggatggcgcgcgactcggctacgcgctgaccgccaccggttccgacatgacgctcacggatctggcgaccatcgccgacgtgttctacatcggcggtaccaaggtgggtgcgctgttcggcgaggccgtggtgtttaccaagcacaacacgccgaagcacttcctgacccgcatcaagcagcacggcgccttgctggccaagggcttcgtgctgggcgcgcagtttgacgccttattcaccgacaacctgtatttcaagattgcccgcagcgccaatgaggcggccgatcgtattcgcgaggccctgcgcgccaagggctacatgctcactttcgaagcgcccaccaaccagattttcgtgacgatggatcagccgaccatcgaccgtctggagcgcgaggtcaagctcggcttcaccgagaaggccgacgacacgcataccgtgatgcgcatctgcaccagctgggccaccacgcctgaagaggtcgatcagcttattgaggtgttgtaaaacccttcgctaatctctctctccgtcatcgcttcgcgatgccagctccctcatcagagggaggttttttcgtagctcccgccgatgagggagctggccgccgcaggcggactgagggaaagacctctccgcaaacaagaaggctcctactcccctatcgccttgcgttccatatccacgaacttgtggaccgaggcttccacggaataatgcgccttggtgtattcggcgtatttctcgccccattcggcgcgctcggcctgatgtgcgatccaccaatcgatgcgtcgggccagcagggccgcgtcccgcacggggaacaacgactcgtcgatcagcgcgaactggccggccgccgacaattcggacgcggcgatcaccggcaccaatccgcacgccatcgcctcgatcacgctcaccgattcgatgtcggcaatcgaacaatgcacgaacaaatcgcccgaacgcaacaaatcgggcatatcggcgtgcttgtggaatccgatatcggccttgcgcgccagcaaacgcccggcgcggaacttgagatactgcttgagcggcccagtaccggcgatcaccagctgaatatcgccggcgtgccgggacatcgacaccgccttgatcagcgtaatctgatctttctcgctggccagtcggccggaagcgacgacacggaacggcacgggagccgaggcatccggatcggccggcttcttcggagaatacaccggtgaataaccattggaaatcacgtgcaacttggctttatacccgtgcgcgcgcaacaggctcgcggtcatttcggtgggcacatggatgtggtcaatgtgcttgtacagccagtgcttgaacagccagtacaggaagctggaaataccgggaatgcgacgtagcgggccggccgaatacagcacgttctccggctgcaggtggaatccggcagtcacgggaatgcccatttggtgggcgactttagcggcacgacggccgaatttgaacggcatatagatatgcaccacatccacgccttggaaggcggtgcggaacaacgtgtcgctgggttcggcgaattgcatgagctgcttggcggccacccacgagacgagcggcaccttattcacgcgcgccggatattcgggcgcccctataccgacaagcctcacatgatggccttgccgctccaattccgcagcccattgcaaggccgaattggaggtgccgttgccctgattgcccaccgtatcgaccacaagagcgatagtcagcggacgatcaatgctctcttcaatcccgttttcgcgcattgcctcatcctaaaccaccgcgcggcaatagcgtcggccgcgctgcctgaacgcgtgtgaaatggtatgggctgccgcattttgcccaatattgaatcacgcgcttcgcagcgcacgatcggcgcgggccacggcctggaacaactcggcggtgtgcttgagcagactgatgcgcacccagccttcgcccgcctgaccgaagcagacccccggcatcagcgccacgccggccgtgttgagcaaccaatccacgaatgcggcggaatcgccatgccaccgcgccagccggccaccatatacattttggacagcgagccaagttccagcgccacgtccagcgcgcccggagtctccagcaggctcagcgagcgtacgtcaccgaattcgagccccgcataggcggaatcgttaagtacttcgactattgccagcgtgccggcttgtagcctgaaacgccggaaccggcacgccgctattcgctatatgtcgcatcccaaaatgttggcccgaccgccccatacttcatcggccggtaattgctaaggtacgacggctctgttacgcacgcaatggcatgtctatacgcagtatttatggcgggttacgggcatctgaatcttcatggggcggcaacctgcccatggggcggtatttaccccatggggcggtgaaattcccatggggcggtaaggcaaaacggcttaattccgcggtttcacaaaaccaacaaaccgccccatggactcattaccgccccatggggaatttaccgccccatgaagccggatattccgcccgtaattttgccgcgcgaggcactccgctcacgcgacataccgaaatcatcgcgtcatggcagaatgtgggtatgactgagaacgccgtgaatactgccgtgacttccgcctcctctcccgcaattcccgccgagacttccgccgtctcccccgcatctcgcgcagccaaccacccgctgggcacaccgctgggcaagcaccccacccgtgtgctgtttttgggcgctggcgagctgggcaaggaggtcacacttgaactcatgcgactgggcgcatgggtgtgtgctgctgactcctatgccggcgctccggcccagcaggtggcgcatgaataccgcgcgttggatatggcgaatgccgccgaattgcaggcattgttcgatgaaatcaagccggacatcatcgtgcccgaggtagaggccatcgccaccgatgtgctgtccggtgctgcggccgcgggcgcccaggtggtgccgagcgccgaaatcgccgcgatctgcatggaccgcgagcgcctgcgcgtactggcccacgaagaattgggcttgccgactacaccgtatcgttttgccggctcgctggaagagctgcgcgccggagcttcggaagtcggctatccgtgcgtggtcaagccggtgatgagctcgtctggtcacggccagtcggtggtgcgttccgccgacgccatcgatgccgcttggaccgaagcgcaggagggccgccgcgccgccgatgagggcgatgtgtcgcgcgtgatcgttgaggcgcttgccccgctggagcgtgagctgacggtactgaccatttcttcgtccgccggcattgtgacgtgcgcgccgatcggccaacgtcaggagtccggcgattaccgcgagtcctggcagccggctaccgagcccgatggcgaggccgagcgggcgcgcgacatcgcacgtaccgccgttgaaggcttggtggccaaggctcaggcgaccggcgaaaccggttggggcgtattcggcgtggagctgttcgtgctcaccgacggctcgattctgttcaacgaggtctccccccgtccgcacgataccggtatggtgacgatgacctcccagcgtctgagcgagttcgcgctgcacgcccgcgcgattctcggcctgccgatcacccccgagcatgtggcgctcacgattccggccggctcggtggcggcaagccatgcgattgtggtggccggcgacggtgaggccgagttcaccgatgtggccgctgctctggccgaacccggcacggacctgcgcatttttgccaagcccgaagtgcatggccaccgtcgtatggccgtggcactggccgtcggcgagtccgaagccgacgcccgtgccaaggccggccgtgttgccgatgcgttgacgattaccgtggagtagtccacggcctgatcagctcagcatggcctcaatattattgccgtccgggtcgtggatgaacgcggcgtaatacgtggggccatagttcgggcgcgggcccggaacgccgttgtcggtaccgccagaggcgagaccggcctcatggaacgccttgacggcgtcctcatccttggcgcggaacgccacatgagacggcaccaccgggttgccgtccttcggagactccagccaaacgctgtcgccatcctcgtcattggcaaagcacacggcggtcgggtacgccactttcttgacgtaacccagcggggccagcagcttctcgtagaaatccgcgtactgtgcggcgtcggaaacaaacaaaccaatatgatcaatcatgacgaacctccttgcaccatttcgtcactcccattatcgtgcgtgcgcggccgtacactcacgttttgatgctcctatacattgtcaagcgtttgggtgtgttgttttgggttggttgtcgagtgtatccactggatggcccgttgctcgagttcgggaaggtcgcgtgcgccgcgttcgatctcgctgatgcggctcgagggc

SEQ ID NO: 82 - DNA, 19139 bp, Unknown
  R206_24m  MAG No. k141_8627
cattatgagtccgacacggtcgtcggcgcctccccgtcgaggcggtgcatcgacacgcaggtcgaacgcaggagccgcaggctgttcgccaggttcgtccccgacaagagcgcgctggccacggcgcgcgccgaatacgacatctacaaggacatccccgcgccggcgcgcatcgaccgcacctgggacaacggcaccgaatcctcctgccacatgctcgtggacgaggcgctgggcatgctcgcctatttcgcggacccgtactcctcctaccagcgagggtcgaacgagaaccgcaacgggcgcatccgccgccaccttcccaagaggaccggtttcgacgacctgacggacgcggacctgcaggccatcgtcgatgagatcaacgacacccccatgaaggtcctgggctgggaaacgcccaacgaggtttggtaccgcgagctcggcaagccaatgtcaaagacaagccacccgaagacgagcgttgcacttacaaattgaattcgggtcgactatcgcaatgtcgatccgcgtctgggaaccatggacgacttcgacgccatggttgcagccgcacacgaagctggcatcaaagtcatcgtcgatatcgtgccgaaccataccgccgataagcacgtcttcttccaggaggcgctggctgcaggacccggttcgcccgaacgcgaccgctacatcttccgagacggccgcggcgagcatggcgagctgccgccgaacgactggatttccctgttcggcggcccggcgtgggaacaggtgcccgacggtcagcggtacctgcatatcttcgccaagcagccgccggacgtcaattggaacaatccggacatccacgaagagttcaagaagaccctgcgcttctggtccgatcacggcaccgacggcttccgcatcgatgtggcgcatggcctggccaaggacctggaatccacgccgcttgatcagatggacccgctggccgtgcagcatggcctctgccacgacttcacgagcccgctctgggaccgccgcgaagtgcacgacatctaccgtgaatggcgcgaggtgttcaacgagtacaacccgccttgattcgccgtcggcgaggcatgggtcgtgccggagcgccagcatctgtatgcgagcaccgacgagctcggtcaggtgttcaacttcgagttcgccgaagcgaactgggatgtggacgcgatgcgtgcggcaatcttcgtcggtctgcgctccgccgagaaggcgcacgattcgacgacgacgtgggtgatgagcaaccatgacgtgccgcgtcacgtttcgcgttacggcctgccgcgagtgccggcctcgtcgcatcaccagctcgccaaggactggctgctgcgcgacggcaccagctacttcgaagatcgcgagctcggcaccaagcgtgcgcgcgcggcgattctgatggagctcagcctgcccggttcggtgtacatctaccaaggcgaggagctcggcttgcctgaagtggcggacatcctgtgggatcgtctcgaggatccgacccccgttcttcacccgcgaacggttcatcgaaaagggtcgcgacggttgccgcgtgcctctgccgtgggtcgccgccgacgtgcctgcacccgctgaatggaacgcgggattcggcaccggagcatcgttcggattctccccggcgacgaaggccgacggctcggccagtgcggacccgcatctgccgcagccactgcggtacaaggattatgccgccgatgccgaggctgctgatgacgcgtctatgctgaacctgtatcggaccacgctggagctgcgcgctttgctactcaccgcaaccgccgatacctcggactgcgcggccatcgatgccggacacgacgtgatcgcgtactcccgccccggcacggacggacgccgtttcgccagctacaccaatttcggtgtggcggcggtgacgctgcctgccggtgaggtcgtgctcgcctccggcgatctgaccgctgacggcgctctgccgcaggacaccacggtgtggatcctgctcgactaattcttccttctcctctttcccctccgcggcttcccgggtcttcccgggaagccgctttttgtatgccttgttggacgtgtggatgtacagagaggggtgtagccgcgttgtagaggactgcgcgcgggcgggcatacgcggtggtgacgtgggcgtgaagggttgtataagccccaaatcagcccctcgtaagcgagatatgtggctcgtcagtcgaattgcggtttggcatgattctgcatgcctagagatgctagtggtctgccttataaataactgaaggaccagctttttctctccccccagtcagcttcgctgatagccccctcgtcagagggggcacataccgccgctgtctgcttcacggcaacgtcccattagaagccgatgccggcttgcatggctccccttgtcaggggggcgtcccgcggaagcgggactgaggggtagtcatttaacgaacttccgacggaggacactagagagttagggtcgcgctccagtgcgcatacgaaggggggcttcccggaacaatccgggaagcccccccttcggcttgtaatcgtcagcccttgacggcgccagccatcacacccttgatgatgtacttctggcacacgaggtagaagatgataatcgggatgatggccagcacgaggcagcccatcatggcacccatatccaccgagccataaccacccttgaggtactggatggcgattgacatggtcttgaaccggcgcatgtccaacgtcaggtacggcaggaggaaatcgttccagatccacatggcctgcaggatggcgaccgagatcacggacgggcgcatgatcggcagcgtgatttggaagaaaatgcgcggcacggaggcgccgtcgatcattgcagattcctcaagttcctgcgggatgcccttgatcacgcctgtgaatatgaacacggccagaccggcgccgaagcccagatacacgatccacaggccccacggagtgttcaggccgagcatatcggcgatcttggagagggtgaacatgaccatctggaacggcacgatcatgttgaacaggaacagcaggtacagggacttcgccgtgcggttgttcacacgcacgatccaccatgcgcacatggaagtgcacagcaggatgagcagcactgcgccgaccgtgaccacaacggtccagccgaaggactcgattagattggtgcgcttgatgccgcgtgtgtagttctgcaggccgacgaacgccttgccggtcgggatggagaacgcgttgcggctgatgtatgccttctgcttgaacgagttgatcaccacgaggacgatcggaaacacccaagccagcgagatgatggtgaacagcgtggcccacagtactggatgcttgactttctcgctcatgcggacacctccttgctagtggtgagacggttctggatgatggcgattagcgccacgatgatgaagaacacgacggccttcgcctggccgacgccctcgaagccggcgcggccgtagaacgtgcggtagatgttcagagccagcagctcggagctgttggacggggcgccgttggtaagggcgaggttctgatcgaacatcttgaagccaccggtgacggtcaggaacgagcacacggtgatggacggcatcatcaacgggatcgtgatctggaacagcgtctgggtgttggttgcgccatcaaccgcggcggcttcgagcacatcgcccggaagcgcctgcaggccggcgatgtagatgatcatcatgtagccgatctgctgccagcagtacagcatgaccatgccccagaagccgtacacacccgagtaggtgattgaacgaccccagtgggccagcacgccgttgagcaacagcagccagatgtagcccaggatgatgccgccgatcaggttcggcatgaagaacaccgaacggaagatattggtgcctgcgaaccgcttggtgagcatgtatgcgatcgcgaatgcggccacgttgatcacgatggtcgtcacgatcgtgaacagcaccgtgtacaccagtgcgttccagaactccttgtcctgcacggcattgacgtagttgtcaatgccgatgaactgggcgtccgtcaccgtgctgaacttgcagaagctcaggtacaggcccatgatgaagggcaccacgaaaccaatcatgaatgctgcgaacgtaggcagggcgaacagtgcccaccacctgcgaatcgctttgccagtcatagaaatcatgccagcctactttctcctccttgagcacacccgcactactgcgtgcgagtggtccgaatttgggattgttcagtctcctcagtgctgaatagcaccaaatcgaaccggtttaaggttaccataccacgcgtatgaccgatggtcaaacgttgtcacagaaagcgtgtccatcactccttcctcgctgcctaagcacagggcaaaatgctggaaatactgatttttggcatttccgatgcagaataacacatatgataacgttgtcttatcgactgctcaacacatggtcgacgccgtccgcgtttattgttgtgtcatagacgcatctcactgcaaaggagaccggcatgggaatcaacatcaaagatgtggccaacaaggccggtgtctccgtctccacggtctcccgcgcgttcacccgaccggagctcgtgtcgaaagcgacgcgggccaaggtgctggccatcgccgaggagctgaacttcttgatcctcccgctcggccatggtgctcaagtccggccgcgcgctgcgcgtggctttgctgatgagcgatcacattcgtctatggttcagcgcttcgatcatcgaagggctgaaccaggtgttccacgcgaacggctatgacctgtcgatcttccagatcttcagcattgaggagcgccgcgagttcttcgacatgctgccgatacggcgcaacgccgacgccgtgatcgtgccgtgacgctgcacttcagcgtgcagcagcgatacgaatcgttcgtacaggtctgcgaacaatccggtatcgacctgaccgccatcgtcatcgcggacggcgatgaccgcatcagccgggcgaccaccgaactgctttcgatggatcgcatgccgaccgccatcgcatgccaagaagacggtatcgcgattccgctcatgttccagctggcgcgcactggtcttcgcgtaccgttcgacgtgtctatggtcggatacgacgacagcttctatgccaatgagatcggattgacgaccgtgcggcaggatccgatcgcgatggcgacatgcgcggcgcttaaagcccttgatctcatcgaggcagggaagacggccaagccgtttgaggtctttcccgcgcagatgctggtgcggtccagcacgaccgaggcgaagggctgaggggctgacgaatcccgtcagccgctgaccagacctcgccgtaaaaacggggttccgatatggtatcgaaaccccgttcgctgacgttgcgtgatcatgggctaacagccgactggggcaacgctttcacgccggagtcggactcaggacgcgtgcgcggccgagtactccttggcccagccgtccacgaacgcggtcttgaccgcatcccagctctgggtgccctgtgcgtactcgaggagcgcgttgccgagatcattcttccactgctcggacggcatcatggtgaagttccagctgacctgcgtcttgccggacttctgatcggcgacggcggccgcaaccagcggattgtcggtcttgatgtcatcgaaggtcttgaacggggtggtgaagcccatctcggtgctcagcgcctccttgccggtgtcagaagtgatgacccacttgaggaactcggcggtggccttctggtcggcctcggaggccttggagttgatgcaccagtagttctcggagccggtggcgagtccttcgtcctgctcgtccgggtcgccgatgtagatcggcatcatgcccacctgctcggcggtcatgccggcgttctgcagattggtccatgcccaggtgccattctggtagaaggcggcctcgccgagtgcgaactcggagttcgcgtcatcgccggtcttggagctcagctgagacggctcggtggtggagtccgtgatgtacaggtcgaagatgttcttgtagttctccaggcaggtgcccttgatggtggccggctgctcgtgatgttgtcttccttgaactcgtagtagagcggcagattggccaggtgggtcttgaagcgccagtcggagctggagtcgaagccggcggaggtgaacgcgcccttgatgccgagctcatccttgcgggcctgcatgtcgtcggcgacggccttgagcgtcttgaaggagtcgatatcgtcgatagacttggccttcgcgccggacaggccgaagtacttgttgaggatgtccttgttgtagatcaggccgtaggtctccatggcgtacggcacgccgacgaccttgtcgccgtccttgagtgcgacatccgggttctgcagctgcttgtagacctcggtgtcggacatgtccgccgtgtagtccttccagttggcgtagccgaccgggccgttgacctggaacagggtgggggcgttggacttggccatctccgacttgagctgctgctcgtaggtgttggatgccgcggtctccaccgtgacttctacgccggtttcgtcggtgtaggcctgtgccaggtccttccactgatcggcggctttcggcttgaagttcaggtagtagaccttgccgttgtctccgacctcggcgttggagttggtgtcgctgccgcacgcggccatgctgatggacatggctgccacggcgaatatcgctgctgcggatttgattgtacgattcatcttcgacccttaccctaaatgctaccggtcccatcttcgttgagtcggcgccaccggcaccgttgcttccggcgacagaatctattgtgcactgtttcccagaagaatgcaaacgagtgcaatccatctctcggcagaacggctaacctcggatagacaaagtaatcaaaaccgcacatttttaccactgttgtcgccgttttacagactgcaatcgattgcaataaacgtttgcaactgtgtcattcttcgcgcgcgattacgtcactccctgcgtgtcgcgggcattattccgctccgaggcggcccagtggtttgtttcgctaatgattgaggatttcggttttgtgtctctcccccagtcagctacgctgccagcccgtcccgcaagtatggacgcgctccgcgcggcagcctgctagctcgcttgtcggctcgcatgttgtctacagacagctcttcacggcaacgtcccatcagagggggcaacgtaccgccactgtctgcttcacggcaacggtccgtcaaaggaggcaatgccgctcagacgaatacaagacagaccactagttcgcttcgtgaatcctctgcgctgcttcggcgtccttcgcaccaacgcaatgaggcgggcgaagagcatggaatctgctcctcgcccgcctcgtctcattgcgctcgtcaccgcggccagcggtacacacgatccggcagcgtggggaatgcggcatgcggctcacgctgataccagtacgcgatcgatgccacgtcgtcctgccgctcgaagaagccgcgatggcccacgccgatctgctgcacggtcacgcgcagatcggagcggaaacggatcggatcggggatgtgccagcgatagaagccgcgcatcggcgggcagtcgtcgttgtgataatcgttgtgcaccagttcatcgtgcgcggagtaatacggataccccatgtaaggcgtgcagtagttctgctccacggtcttcccgttcacctgcttggcgaagctccacgagccgccgaagtagtcctcggtaccggtgccgcagatcgtcgggtattcgcggttgccgtcgatatagaacttgaactcgccttcgccccaccagtaccgttcgagcgtggtcagcgccagataggtacccacatactgccccgagccgcgtacgccatcgagcaccacataatcattgcccagctcggtcagccgctggcgacgccactgcgcatggaagtaggcggtatcgggtggcagtggatcgtcgtacaggctgtagtcgatttgatagaagaacgcgccgattgtgttcacatgctgattctcgagcgttatccgcgcgtgcctagcgaacggcatcgggaagaacatgttgaacccgcggttgggcaccacggccaccggttcggagttgacgaggcatgcgcggccgaatccgcagcagaagaaatcgccgagcgggcactccacgctcggctcgctttcgtcatcccagtagaaccgcagcaccagatcacgcagcacgaaacagtcggcgtccgtggtcttttcgtcgacggtgatccagatatgacggatgcagccggggccgtcgatgtcggccaatgtgaccgtttcgccactgggaatgttgcgcaggcaggggctgcccttgcgcgacgggcccagttcgctggcggcgatgccgccgcggccgggctccccggtcggattctccgcgttgatcgcacggctggactcacgtcgtagggtcatcaatgaaccaaggtcggcaatcatcatcaatctattccttccattacacgaaccattacgcgaacggttccggtgccgcacatgacgcacgacgccggaaccgtcctatgttgcggcagtcgccgcgatgccactgcttcgtctatgacaatgacaatggcggtcgccgcacctgctgcctaagtgctcgaatcatgcgcgcatcacttgtgcaccggcggcagcatgccgaagttggactcgtagtcgttccaggcgctggtccaatcgtcgagatacgccttcttgacgccgttccagtcgccagtgccctgcgcgtactcgagcagtgcgttggccacgccgtcggcccatgcctgaccgggaatgtaggcgccgtggatcggcgtcagaccgtcggattccagcttgagtgcggacttggtgagcgggttgtccggctggaagtcttcgctgtcgaacgtggtgaacggcacggcgaagcccatgtccttggcgaggatcttcttggcgtcgtcgttggtgaccatccacttgatgaagtcgagcgtcgccttcttgtccttctcggatgcgttcttgttcacggaccaggagatgtcgtagatggagttcgccgcatacttgctttcgttcgggaagcccatgtagtacggcagcatggcgaggtcctcgtcggccacgtcgttgtccttgatctgcgagtaggcccacacgccgttcgggtagaacgccacgcgaccggtggagaactcggcggtggaatcctcgtagttgaccgagccgagcatggtgttctcggtcgggttgtccttcatctcgagatcccacagggccttgtagttgtcgaggtaggtgcccttgagctccttctcgaagtccacgccctcatcgatgtactcgtaggcgaccgggacctgggtcatgtgcgacgcgtaacggtagtagttggaggcgtcgaggccgggggtggagaaagcgccgtcgaggccgaggtcgtccttgtgctgctggatgctgtcggcgaccttcttgagcgtggcgaaatccttgatgtcatcgaaggtcttgatgaccgagtagctcttcttggcgtactcgttgatgatcttcttgttggcgatgatgccgaaccattcggcggcgtacggcaggccgtacacgtcgtcgccgtccttgtgggccatctgcttgccctgctcgttgagcagcttgtaggcttcggagtcctgcagcggctcgaggtaattcttgtacttggcgtactggtcgaagccgccgatgccgaacatggtcggggcgttgttcttggccagctcggacgacagcgtggattcgtagctgccggaagtggcggactggatgtcgacctgcacgccggtttccttggtgtacatgtcggcgagttcgttccactggtcgacgacttccggcttgttgttcaggaagtagacatggcctgcgtcgctgttcgtgcttgagccgcatgcggccagtcccagcgtcaacgctgcggcgctgatcaggacaattcctttggacagcttattcatggatttcctttcttcatctgcggccacggagccgcctcgcacttgttgttgtacggggtgccggactgcatacgtcgccgttggtgcagccggttttgctgtagcgcatttcgttatgcgttggagtggattattggtctggctcaggtgttgcctcgttgcgtaagcatacagtcgaaccggtttgatttataggatatcgaaccggttcgctatcgtcaatcgggcgtgttccagcgtgtcgctacgtagccgggggtgagtcacggaagggatggtgcggcggcagtggtggcgcgcggaatcagcgtggctctcaccgtggtgaccgtttcgctcaactgctcgcctcgcatgagggcgagcagttgttgcgcggccagtcgcgccatgtgctgcgggtcctgatgcaacgtggtcagtccggcgactgcggcggtcggatggtcgtcgaatccgatgatcgacaggtcttcggggatgcgtatgccaagctgccgcagatgccgcatgatggcgaccgccgcttcgtcggtttcgacgcagatcgcggtcggccgatgctcgctgctggcgatccggccggctatggcagccatggcctcatcttcgctcatggcgtccatgtcgctggatgatgcgaacgcgaccggttcggcgtcgggaatgcattcgcgcatcgcgtcgaggaagaaatccttgcgcagatacgagctggcggggaacggtgccggtttcggatgtgcgacgtatccgatgcggcgatggccgagttggcgcaggaatcgtacggcgtcgttcatggcacgcttgttgtcgagcatcacggatgcgggcaggcgggaagcgctccgtgcgtcgagggcgaccgcggggatatgcatgctggaaagcaacgccgattcgctgtcgtccagcgagaatgacgggaggatgaacccatccatattgcgtccgttgctgggcaggtcggcgaagaatccatgcagttgctccaggtcgcagacccgtacgggcacaagatcgtagccgtggggttccagcgtttcgagtgcgccttcgatgcagctcgcgttgaaccatgacgcaatcgtgcagccgaacagcatgacgacgcgcatggttttgccggatgccagcgatgatgcgctgcgggacagcgtgaaatcgaggcgacgggcggcgtccagcacgagttgccgggtggacggccggacgctattcatgccgcgcaatgcgcgcgataccgtggcgtcggagactcctgtggctatggccacgtcgtggattgtcgccatgatgtctcctttcgctgtgtggtgggcggtgtcagatactgtagccgtgctggcgccgccgcaatcgctgcgacgtacgcccatgcatattaatagcatatatgtatgcgcttacattcttttgtaccacgatgtgcgcgttgttagcggtcacggtttgattgtgtttgcaatggtttaccaatgttctgtattgtgcgcatgtgatgtgacgcgcaatctgcaggcggcggttgacggtgtgtaatgtaagcgctatcattttgttgtgtcaatcaatgcacggttgatgcagccggcatccgatccggcagggcgaccgcaaggtcgtacacggatatgtgcatggaggcacgtatcacatgagcaaggagagccattacagggaggtaatgatgacaggaagaacgtggaacaccatcgccaaggcaatcggcttggtatcagtggcggcgctcagcttcggggcgctggctgcatgcgggaacacgaccgcggtcgacagcagcaaagggcgtgtgtactacctgaacaagaaggcggaagagcaggagaaatgggaggccctggcgcaggcgttccaggacgagaccggtatcgagacccagattcagctttcggccaccgactacgaccagacgctgcgttccgaaatggccaaggacgaggcgccgaccatgttccaggccgacggcccgagcttcatgtacagctggctcgattatgccgccgatatgagcgactccaagatctacggcgagctgactgacagctacaaggaccgcacgctcaagaacgccgacggcaagccggtcggcatcccgtacgcggtggaaagctacggcatcatctacaacaagtcgctgctcaagaagtatttcgatgcatcgtggtcatcggtcaagtccatcgacggtctcaacaacttcaaggcgctcaagaccgtcgccgatgagatccaggaacacaaggacgacatgggcgtcaagggcgcgttcacttcggccggcatggattcctcggcgttccgatacaacttccatctgccttctctcccgctgttctacgagtaccgtgatgacggcgtcgatatgaactccgtgccggaatccgtcaagggcacgtatgtcgactacatgcagaatatctacgatctgtacatcaccgatgcaacggtgccggccagttcgctttcaggcaagaccatggatgatgccacttcggagttcgcgctcggcgaggcggtgttcttccaggacggcgtatggatttactccgcattgcaggatcagggattcccggatgaggacctcggcgtgctgccgatctacatgggcgtcgacggcgaggagaagcagggcctcaaccaggtgatctccaactactggtgcgtcaattccaagtcttcccagaaggatcaggaagcgacccagcagttcctggagtggctcgtcacttctgatgccgcacgtgaatccatctcgcaggacatgggtctggtcacgccgttcaagaccttcgacgaggaggcatacaccgtcaagaacccgctggtcgaagccaaccgcgagtaccaggagaacggctactacgacgtcatcagcgtctccaccgtgtcccaccagtgggaaaaggatctcggctccgcggagctcaactacgcccaggggcagggggactgggatgcggtgaagaaggtcttcaccgatgactgggccaaggaatacaagctcgccttcgccaagtaagcgaagtaatcgacaggcgatccgaggggtcgcagcgtgaggggcgtccgttgccatagtgctggacgtccctcacgcgttgttgtgttgttgcgaactggctcagcgcggcccgctggacagcatgtggccttccgacttcgcacgcaacgtcccagcgaagccgaatgaccatacactggcctgcccgcgtcgcatgtgcggcaattacgttttccaaccatggaagacggtatttcatgcacttttccaaccgtgcacgtgcggagacggctgagacggttggcgcagagacagctgaggggagcctccatacggaagactcccctcatagagacgctactgcaagtcagcggtcatgcagccggtattggccggctgcgaggcgtcatgcaaggtggctacgcatgaaccactggaatttctcgagctgctggacgtgatcctggatgacgttggagctgatcacatccagctcgtccagctcggcgatggccttgcggtcgtcggcgatgaaggcgtcgtagtactcgatcagcgccttgagatacgcctcggtgccggcgcggccttcgacgtcgaacggcttccgcgtgcggttgcgcatgattgcgtcggtacggccgtccggcgtgccgcccagcgtggcgatacgctcggcggtctcatccgcctgagccagcacggattcgacctcaggatcgagcatcttgtgcacggcgatgaagttcggtccggtcacattccagtgtgtatgcttcaggaccagcgcggcctcctgctcctagctcagtcggttctgcagaatcgcgatggccttctcgctggtcgcctcatcgagtcccggcgcaactgattattgggaggtttgagcaccggatgttattccgattcggcactggggttattgtgggatggcaccggcgtgcttggtattgggcactgccggtgccgttcctgtttgcgagactggttggcggctaccggccgggtgcgtgttccctcatgttgtagtcgccggtttctatccaggtggtgttgtgcacgatccggtccatgatggcgtcggcgtgggtgccgcctccgagtcgttggtgccagtccttttgggggtattgggtggcgaacagggtgctgccggtgtcgtgtcggcgttccatgagctcgaacaggaagccgcggaagcgttcctcgggcgggtcgaacagccattcgaccgggcgcgaggaccgtgtacgcgctgtagcgtttgagcagtctggaccgtccttggggcttgtcggcggcctgacgccattcctcctcgaggtcggggacgcggatgtagcgggaacggtaccggttgcggcacgcctgacgcgccagggcgcagacgatccagctcttgccggacccgcagtagccctgggcgacgatgttgcggtgtcgcgtgacccatgagcagtctgagagcgaggcgatcagttcgcggctgatgccgcgttcgtcgagcaggtcgagggtgcgcaggtcggcctgcgggtagcgcagcctcgcccttctggccagtccgccgatgcgtttgtccgtgaacgcggcgtgcgcctcgtcgaccgcgagttttatacgttgttccgcgttcaggggcgcgcatgcgtcgtcgtcctgatgcaggagcgcgtcgagaagctcctggcatcccatgtcgcgcagctggtggcgggtttttgttcgtcgagcctcatcgcttcgtctccctcgcgttgtagtcggcgccgcgcacgtatcccgcgggcggttcgacgtcgagacccttgactttcgggtcctcgccttccatgacctcgtggtcctggccggtgtcgaggatcgtcttcaattgccggtggcggggcgtgttcacgaccctgcgggccacgtcgcacgcgttctccagtcgttgccgcccgtagcggcgcgacagcctcagcaccgccagagcggggtcgatggcctggtccggcctggcatatgattcgaagatgcgggatatgacgatgaccgcgttcgggccgacgcccgacgcccatgccctgacccggggctcgtcccattcccgccagttcgcctttttcggcaggtccacgtcgcgcgtggaggaacggttcgactgaacggcatcgaacagccgatgcacggcgacccgctggccatcgtgccagatctcgagcgtgcgggcggtctcgcgaagctcgacccgggtgccgatcagccggtggggtacggaataccggttccgcctgtaaacgatatggcagtcgttggcgactttcctcgtgccggcccaatcgccggtctcgtacggcatgacgggcagcgggatcatcatgggtcgctcctcggactcgaacaccgccaggcggctgccctcgcgtttctggaaaggcgcggcgttgtacgcgtcgagccagtcgcggatcgcccggttcagttcgtcgagcgaatggaattcccggtcgcgcatcgcgccgacgacggcccgttcggcgtgcaggacgaggttctcgccgctgggcttgtccttcggccgtttcaccctgcccggcagcaccgccgtggaatagtgttcggcgaggttgcggtaatggtcgtccggcacgatctcgccatcgcggggatggctcacgacaccggtcttgaggttgtcgcacacgatcctgaccggcaccgcgccgaaatagtcgaacatgcacacatggcagtccagccacgaggattcgcgcatgtcgccggtcgcgcgcacgaacgagtaacggctgaacggcaggcacccgacgaacaggtacgccttcgacgtctctccggtgaccgtgtcatggatcggcatggtcgccccggcccagtcgacctcgaccgtacgcccggccttgcgctccaccctcgaggtgacgcccagacgcagcacgtaatcggcgtacagcttgcagaaccggtcgtagcccatgaacggaaccccttcacccggcacgagtccgcgtactccgcgtgcagcagcttcaacgtgacgcccacgcgccccaattcgctgtgcacgcgcgcccagtcgggctgctcgtaggcgctctcgatcacacccctgccgggaaacagcagggcgtacacctcgtcatcggttttgtcctccacaccatcgtaggagacgttaagccggtcggcggcgtcgaacacgtcgatcacgctatgcttcgacataccgtagcccacggctatcgcgttgcgcgacaatccttgctcacgaagcctgagcacgagcttcgccttgattctgcgtaccatcgttggcactcctttcgccatgcgtccatcacatggtgaaaggagactaacccaaacggcgccgaaccacaataactttggtgctaaaccacaatgatcccgtgaaacggcaatggtgccgaactggaataaccaacgtgctcagcaagtcaaatattcagcaacaaatgcaagtgtcatgatgttccttcctttcatcttcaaggaacgtccctcccagtctacgcgcccttgtccgacggctgaccgcgctgtggaaggccgccaactggtcatcgggtctttgatcgggaagatggcgcgtttggcgtgtcgccaatgatgtcgcgccttattggcatttgtgctcggttgagagctgttgcgcaaactgcacccaccggtaaaggaaaggggattctgcagttcattcatgttctgtggaatcgttggaaaacgagattcacaggcagaatgacatgtacaggggcaggaagcggcgtatgccatcctgactcatctggcgggggtgcagcacgtattcttcgccggctcgttgtgtgaatttcgcgtggaacttgtctagggacaccgtggaatagcgtttgccggatttgacctctacagggctgactctgggtttcatggctgcgtccgggtaaggtcggatgatcaggaagtcaatctccatgcgctcctcgcggatgctcgaggattttgagtagaaatacaggtcgtgcccggatgcggtgagctgctgagcgacggcgttttccgcgagcatgccctcgttcacgccgtccgctcccagcaacacttgccggtacacttctggcaaggcggagcccgaggcggagaatgccatggtagacaacagtccggtgtcagccatgtagcatttcactgttgcgtcgtcggcgctgagcgccagaccaattgacgggtcctcggcgagggtgcataggttgaccgtcgccgcttcgcgcatccaagagaaggccgtcatgaaatcacgcgatctcgagccgttctcgacttgcgtgtacaccaagcgcttctcgtgcttcgacagctgaccgggaattgcgtcgaacactgctcggattcgtttagccgccgtgccgccgtatttctcgatatcctcgcggtagatcttgaggaccatgcgcttggccctgtcggcggccgccatgtccctattcggggcgtaggccgtgaccgactgtggcatgcctcccaccagcacgtattcgcgccataggcgcgacgccttgcggtgcagcgagtccggcaaggggctccccgatgcaaacgagttcgtgatcatctgagccagcgcctcttcgcccatggcccacagaaactcctcgaaatccagaggacccattttcatggactcttcctcggagggaatcagtatgcccttcacgttttcgttaagggagattagggatcccgtctcgatgaagtcgtaccggccgtcggcgaccaagtgcttgatgaactcgcgggctggcgggaacagctgcacttcgtcgaagatgactagggacttacgttcggtcagggtcacgcccaacatggcgcttaggtacaggaagaaggagtcaaggtccccccttgtgtcgagcagcgttcgacgaaactcgtctcccaccttggtgaagtccacgagagcgtacgaattgtattcgttgcgcgcgaactcctcggcaatggtggatttgcccacgcggcgggccccctcgatcaacatggcggtgtgacctccgcttgaccgcttccattcgactagcttgtcgtaagccttgcgccgaaacatggctcctcccttatgattgcacgtttctaagggttaagtatagtacaagattgcacgtttctaaggtttcgcacggtgggtgaattgcacgtttctaagggttaacgaaatttctgttgggaacacttcgctggccggccccttttgttggagagccgtaatcaacgaattaatgacgcgggatactgggaagaagcctaggcggcatcggaacccgtcacagtatccggctgcgaggatgcatcggtggcgccggctttgcggacttcgatggtttcgatgcggcggccatccaccttggtgacgaccatgttgtagccgtcgtcggaatgcagcacgtcgcctaccgctcccatcttgccggtcttggacaagaagtagccggcgaccgtctcgtacgggccgtcctccagctcgatgccggtcagatcggcgaagtcctcaatggtcatgctggcctcgattgtggccacgccattgacgaacgcggtgcgggtggtgcgttcgccgcccttctcgctgggcaggtcgtattcgtcgcgaatatcgcccacaagctcctcggtcatgtcctcaagcgtcacgatgccgtccgtgcctccgtactcgtcgatgaccacggccagatggatgccgcgcttacgcagcagttccaggctcggcagcagcttggaggtgccgggcagggagatgccttcgcgcaccacatcgcgcacgatcttggcgttcggatcgcgcacg

SEQ ID NO: 83 - DNA, 5083 bp, Unknown
  R206_24m  MAG No. k141_8641
cgggtcggcggccatgggcgggacaaatcaaaataaggacagccaccggaaccgatggcgtcagtcaaatgtggggtcaccgcccaagccgtcatccaccattatcaccgatcagaaaccggcataaccattatcaacgtctattgacgaacatctgagtgtccgcgtgcttgcgtagatactgttactccgaacgactatgcgaccggcaatgagtcgattgtcggaccaataccgtccgcctccgccatcccaacagcgtatggccgttcgatgcagcgacgtatgatgcgctggccgcatcgtagcgtcatgccgagtgttgttgtagccctcgattggtacccttttaccgttagttcacccagaaattccactcctgaaaggtgagtcatggagaagctggaaaagctctacgagggcaaggccaagcaactgtacgcaaccgacgatcccgaggttctgtgggtcgaatacaagaacaccgccaccgctggcgatggtgaaaagaaggaagacttcaccggcaagggccgcctgaacaacctcatcaccaccatcatcttcgacctgctcaagaagcgcggcatcgacagccatctcatcaagcgagtgaacgacaccggccagctggtacgcaaggtgaacatgttcccgttggagatcgtgctgcgcaacgtggccgccggccacttctgctcccgtctgggcgtggaggaaggcctgccgctcaaggagccggtgcttgagtacttcctgaagaacgacgatctgcacgatccgttcgtcaacgacgatgacctggtggccctcgacgtatgcactcgcgaggatctcgccgagatcgccccgctggcccgcaagatcaacgaggccctgatcgagatcttcgccaagatcgacgtcaagctggtcgacttcaaaatcgaaatgggccgcgccaccgacggcacgctgctgttggccgacgagatcaccccggattcctgccgtctgtgggaccagaaggaccactccggcaaggtcgagcaccttgacaaggacctgttccgccgtggtctcggcagcatcatcccggcctacgaagagatcgaggagcgcctcgccgaactcgccaagtccgaaggcatcgaagtcgccgagtaagtcgtttaggtgcaggtagcagaaacatacagctggctcctctctccgaggggagctgtcgccgataggcgactgaggggaggtcaagacgttcaccgccatgacaactcccctcagtcagctccgctgacagctcccctcggagaggggagccaagttcttttaccgcgcttcttcaatttttcaatattttcaagaaaggatttccatggtttttcgcgtgtacgtggaaaagaagcccggctttgatgtcgaagcccagcagcttgcgggcgaactgcgcacgatcctcggactgaacggcctcaaggccctgcgcatcgtgaaccgctatgacgtcgaaggcatctcccaagagctgttcggccagaccgtgcccaccgtgttcagcgagcctcaggtggacaatgtggcctacgacctgcccgacttcgccggcgccaaggtcttcgccaccgagttcctgcccggccagttcgaccagcgcgccgactccgccgccgaatgcatccagctcatctcccagggcgagcgcccgacggtccgttccgccaagctgtacgcgttggaaggcgaactgaccgacgccgacgtggacaccatcaagcattacgtgatcaacccggtcgaggcccgcgaggccagcctggagaccaaggaaaccctgaagacccaggtgccggtgcccggcaaggtcgagaccatcgccggtttcaacgagatggacgccgaagccggccagaagttcatcgacgagcgcggtctggccatggatctggccgacctcgaattctgtcagaagtacttcagcgaggagggccgcgagcccaccatcaccgaaatcaaggtgatcgacacctactggtccgaccactgccgtcacaccacgttcggcaccgagctggacgaagtaaccatcgatgacgccaccgtcaaggccgccttcgagcgttacctggcgatgcgccacgagctcggccgcgacgccaagcccgtctgccttatggacatgggcactatcggcgccaagtggctcaagaagaacggtgtcctgaccggccttgacgagtccgaggaaatcaacgcctgcaccgtcaaggtcaaggtggacgtgaacggccacgacgaggactggctgttcctgttcaagaacgagacccacaaccaccccaccgaaatcgaaccgtttggtggcgcggccacctgcatcggcggctgcatccgcgatcctctgtccggccgttcctacgtgtatcaggcgatgcgcgtcactggcgccgcggacccgaccgtgccggtctccgagacgctggaaggcaagctcccccagcgcaagctcgtgaccaccgccgccgccggctacagctcctacggcaaccagatcggtctggccaccggtcaggtcgacgagatctaccaccccggctacgtggccaaacgcatggaggtgggtgcggtcgtggccgccactccggccgaccatgtgcgccgcgaaaccccggcccccggcgacaagatcatcctgctgggcggccgcaccggccgtgacggcatcggtggcgccaccggttcgtccaaggcgcataacgtggaatcgctcgaactcgacggcgccgaagtgcagaagggtaacgctccggtggagcgcaagctgcagcgtctgttccgccgcggcgatgcctgccgtctgatcaagcgctgcaacgacttcggcgcgggtggcgtgtccgtggcggtcggcgagttggccgacggcctgttcgtggacctcaacaccgtgcccaagaaatacgagggcctggacggcaccgagctggccatctccgaatcccaggagcgcatggccgtggacgtggccgccgaggacgtggacgagttcctgatctacgcccgcgaagagaacctcgaagccacggtgatcgccaccgtgaccgaggacccgcgcatggtgatgacctggaacggcgacaagatcgtgaatctgtcccgtgagttcctggcctccaacggcgcttccaagcaccagaccgtgcatgtcgaggcacagcagtcctacgagaccccgtggggcgagggcacgctggccgagcgtatgaacaagctggtcaccgacatcaacgtggcctccaacaagggcctttcggagcgcttcgactccaccatcggcgcgggcaccgtgctcatgccgttcggcggcaagcgtcagctcaccccgaacatggccatggtcgccaagctgccggtgttcggcgagaccaccaccgcttcggcgatggcgtggggcttcaacccgtacatcatgtccaagaaccagttcaccggcgcctacctgtccgtggtcgagtcgctggccaagctggtcgcggccggcttcgagcatgagaaggcctacctgagcttccaggagtacttcgagaagctgcgcgacgagccggaacgctggggcaagccggcggccgccgtgctcggcgcgctgatggcccaggtggacctgggcgccggcgccatcggcggcaaggactccatgtccggttcgttcgaggatctcgacgtgccgccgacgctgatctccttcgccgtggccgtgggcaacatgaagcgcaccacctcccccgagttcaaggacgccgatcaccgtatcgtgcgcatcgcgccgcgctacctggccgacggtctgaccccggacaaggatgcgctgcttgaggtgttctccgtgatcgaggagctcaccgacttccacgatgccctggccgtctctacgccgggctatggcgccaccgccgaagccctgttcaagatgacgctcggcaaccgcatcggcgtgactctgaacgacagcatcgccgtggacgacctgttcaccccggcatatggttcgttcatcgtcgagctggcagacgatgccaagcttccggccgtctccaatttggtcgagatcggcgaaatcggcaccaccacctccgagtacgtgttcaaggccgccggcgagacgctggacctggacgctgtgcaggaagcttgggagtccggcatcgaatccgtgttcccgtaccgttccaagggcgaggacaagggcgcgaccgtcgagaccatcgacttccacgcgccgaagaagaccgtgtacgtcggctcttccgtggccaagccgcatgtggtgatcccggtgttcccgggcaacaactgcgagtatgattccgccgccgccttcgagcgcgccggcgccgacgtgaccacgctgatcatcaacaacctgacaccggccgccgtcgccgaatccacgcaggcgttggtcgatgagatcaacaagagccagatcgtgatgatcccgggcggcttctccggcggcgacgagccggacggttccgccaagttcatcaccgcgttcttccgcgcgccggccgtcaccgaggccgtgcgtgacctgttgaagaaccgcgacggcctgatgctcggcatctgcaacggcttccaggcgctcgtcaagctgggtctggtgccgtacggcgacatcgtgccgatgaccgacgcctgcccgacgctgaccttcaacaccatcggccgccaccagagccgactggtccgcacgcgcgtggcctccgatctctccccgtggctgtccaagacttcggtcggcgacatccacaccgtggccatctcccacggcgagggccgcttcgtggcctccgacgaggtactcgcccagctcagggccaacggccagatcgccacgcagtacgtggacgagaccggcacccccggcatggacctagatgtgaacccgaacggctcgctgctcgccatcgagggcatcaccagcccggacggccgcgtgtttggcaagatgggtcactcggagcgttccggcaacggcctgtacgtcaacgtgcccggcaacaagtaccagccgatcttcgaggccggcgtggaatacttcgcc

SEQ ID NO: 84 - DNA, 21222 bp, Unknown
  R206_24m  MAG No. k141_8716
attaagtatttcggggttggcatgtcgcgaatggaaagaaagggcagtcatccccgaaatggagacagcttagccgggaaaaaggacgacgccagcatccggagaagatggatgactggcgtcgggtaagctcgcaaaagctctactgaataacccacgcagaagtgtcggtggggagctggccttcgggggtcagcgggccggacgccagcaccacggagccatcgggcagcgcgaccggagcattgccgaagttggtgattgaggtgaacacccgcccgccaaccgccgcgcgggtgtacgccaccacatcgtcgcccatgtccacctgctcggccgtggtgtcgcgcgtggcggtcagcgactcctggcgaatcgccagtgcggcgcgatacagcgcgagcatcgagtccgggtcggcttgctccacgtccaccgcgtaatccttgaaccacagcggttgcggcaggtgcggatcggcggccggcgtcacgccctcagcgcgcgtagctggcgagaagccgaaggaagcgcccgtgccgaactggccggcggcgcacagcggcacatggttctcgccggtaccgtcatcggccggagtcggacggctgaagtcggccaaggccggctcatcggcggcggtccacggcagcggcacgcggcagccgtcgcggcccttgtccatcgtggcctgagcagtgtggaaagcggtcggatcctccaagtgatcccacggaatatcggccacctcaaacaggcccagctcctcgccctgatagatataggcggcaccgggcaggccgagctccatcaaagcggcggcgcgggcgcggcgagtgccaagctcgcgatcctcgggataggtagtgccgttgcgcagcagccagtcgtgcggcagctggtggtagggcgcgcccttgatctgcggcaggccgtaacgggaggggctgcgcggcacgtcgtgattgttcatgacccacgtggtggtggaaccgccggtttcggccgccgccttgagtccggcggcgatggcctcgcggaactcgtcggcataccagttggcttgcgcgaagtcgaagttgaaggactggcccagctcgtccatcgaagcgtacaggtgctggtgctcgggcaccacccacgcctcggccacggcaaagcgcggcgggttgtactcgttgaacaccttgcgccattcgcggtagatatcgtgcacctcgcgacggtcgaacagcgggtggctgaagtcatgattcagcacgccgaccacgctgtattcgcggccgagctcttccaacggcttggattcgaggtccttggccaggccgtgcgccacatcgatgcggaagccgtcggtgccgtgatcggaccagaaacgcagggtcttcttgaactcctcgtggatgtccggattcttccagttgacgtccggctgcgccttatcgaacaggtgcagataccactggccgtcggccacgcgcgcccaggccgggccgccgaagaaggattgccagtcgttcgggggcagttcgccatgctcgccgcggccgtcgcggaagatgtagcggtcgcgcgccggggagccaggctcggcggcgagggcctcctggaagaacacgtgcttgtcggcggtgtggttgggcacgatgtccacgattaccttgatgccggcctcatgcgcggctttggccatggcgtcgaagtcgtccatggtgcccagtcgcgggtcgacgttgcggtagtcgatcacgtcgtagccgccgtccgccagatcggaggggtagaacggggagagccagatggcgtccacgccgaggttcttcaggtagtccattttctcggtaacgccggcgatgtcgccgatgccgtcgccgttaacgtccttgaagctgcgcgggtagatctggtagacgacggcctgcttccaccagtcgtcattgaggttatttgcggtcatgccgattccctcctgttccgggtgcgttgtggttgggttgttccggtcgcgcccgaactgctgtgtgaaggcccgaccgttgtattgatgatgacaacgatatcatgtgaattacacatgcaaaaatcgatttatcggcgttttgcggtggtaacgtggtcacgcctgcgcgggcgctgctgtcgcggcaggcggcgcggtggtttcgcgcagtattagcggagtgtccggccgtacgaatgccggttcgattgacttgccggcaatggcatccaataccatgtgcccggcagtcgcgcccattgcgaacgggtcctgatgcagcgtggtcagtcccacggcggcggacagggtggaatcgtcgaagccgatgatggaaatgtcctgaggtacccgccgcccgtattgacgcaggcgatacagcacgggcgcggccatttcatcatcctcaaaacagaaggcggtgatgctgggggaggcgttcagtacggcgttcaatgccgcgttgctttcgccaagaccgcgttgaatgctcaggggcgttagctcgatccccggatgggcggcagcggcatcaatgacgccctgcaaacgagcctcggcactgtagcgcatattggtttcggtcggtgcgctgccgacgaacgcgatatgccggtggccgagtgcaatcaggtgctcgatagccgaacgtgtggcggcgtaatcatcaatgctcacgcctgcgtcgaacccatcggtggaggggatgttgatgccgacaatcggcacgtgcatatgcttcagtcgctccacctcagccggttcgatgtcgaaggagctgacaatcaccgcatccgcattgcgccgcacgggcaaatccgcaaagaagtcgtggcgctcggcggcgttgcgcatggggtagggcacagtgtcgtagccggaggggcgcagcgccgagtcaagaccggcgaagatgttcgaattgaaccaactggcgatggtctcgctggcaagtagtgcgatacggaacgattggccggattttagggcggcggccgagcgtgagactgagtagtcgagcttttcggccgcggccatcactcggtctcgagtctcgggaagcaccagatccggcttggcgaaggttcgggacaccgtggatacggaaacgccggcctcgcgggccactgcctgaatgcttgccttggtcatatgccgtcgctcctttaccgtcgcgaacaatcattgtcatgacaacgataacatgcccataacaagtcgccgtcttcggctatctcgattacgaggggctgatttagggcattccggacatctacttccgtttcaaggggctccttgccggtgaaaccacaagtgcaaacgactttgtgccaacgtcattccgccgttctcgcgctgggtctacttgggcgccagccccttgaagcggaagtggatgtccgggaaaggccaaatcagcccctcgaagccgatttagaccaatttcccattgccggaatcgatcaccgcttctctcggcgcatcacggcggctagggactgcacgcgtggcaggtcgaagacctcgtcggtatgtaccacgtggcctgagctgtccgccagcggcacgcgccagttcgaatattctctggaagtgcccggctgattctgggagcggcattcgcccacgccgtccaccagcgctgcctgcagcagcagcgacggcgtatcggtgagcatggcgtgcatcgcttccacgatctcctgcacatggccttccacatcatccgccacggtctgtgagatatagccgttctccaccagacggttcatcatggccgtgcgttcggccatcgccgaggcggcgaacgcctccaccggctcgctcaggagatgcagctcctcgcgcagcttgacgtgttcgaagtccaggtagccggcggtgggtggcagatcgtgcgtggtcaccgaggccaatgcctgtttgcgatagtccttgggtgcacggtacgggtcgccggcgttcggcgaatcgtccacgcggttgaaccattccacgtcagtgccgagcacgccgtgatcggacagaatgcggcgcacgtaatccggtacggtgcccagatcctcgccaaccaccatgcctccggcgcgcgtggcctcgatggccagtactcccagcatcgcctcgtggttgtacgtcacgtatgcgccgttgagggcgccgagcccctgcggaatccaccacaggcggaacaggcccagcacatggtcgatgcgcaccgcgcccgcgtgctcgtacatcgaatgcaccatctcgcggtacacctggtagccggtggcctccagatagcgtgggttgaacggcggctggccccaatcctggccctgctggttatagaagtccggcgggcagccgaccgtgacgccgccggaggcgaagcgttccggattggcccaggcatccgcgccgagcccgtgcacgcccacggccatgtcttgcatcagacccagtgtcatgccgtggtccagcgcctcctgctgcgcggcgttcacctgctcggcggcaatccactgcagccagcggttgaactcgaacaggtcgtggtgctcctcgacgagctggcgcacggccgggtcgtcgatggtcttctcgaagaaccaacggttctcgccccacggcgcgccccatacctcgaagcacaggcaccaggtggcgaaggaatcgaggtctgggccggcggtggtcttgaaatgctcgaattcgagctcgcgcttgttgttgcggcccgcgtcgaagatcaggcgcagcgccgggcgtttggccgcccacgccgcgttgatgtccatcgggttcgattcgtcgttgcgtgcggccactgaatcatgcagcgcatccacctgcgctcggatatcggccggcagcgtgccgtattcggggatgtcctgcgggcggatgtacgtcacgttgaggaatcggcgcgattccggtagatacggcgatggctcaagcggcggaatcggcgcgccggcgtgaatcgggttgatgagcatgaagtcggccttggacttgtcggccgcgtccgccagcagcagcttcagatcgccgtaatcgccgatgccccacgattcgcgagaccgcacggaatacatctgcgtcatccagccccaccgctggtgctcggcgaccgcctccggcacgggaatgcgcgcgggggcggcgatgatggccgccttgccctcgcgcccgtccaccgtgacggtcagtgtgtggtagcccatcggcagatcgggggcgatggtcaagtccggcttgccggaattgaggttcggcagcagggcaaagtggccaaacgcggtgctgtcctccagctcgatggaggcggtgatgtccgcatccgacgggcaattcagggtcaggcttgtcggcttgccggtggtggccatgatggtgggtggtagcaaacgtttgctgttttcggcctcaagttcggtcatggaacgttttatggcctcgtcgctggaggcgtccacatcgagggccttgagcacggcgaccaaggcctcgtcgctgatttcggtgtaggtgccgagctggtcgatgaacgaggtggaaagcccgcatgctttggccagcttgaccagcggacgggcgagtcgttccgcgctttccgcgcgctgcggggcaccggaagcggcgtcgttggtggtgtctgcgatggtgccggtgctggtcgctgcgtcgttgccgtacgcgtcagtcatgatgactccttgcttgcagatcgggtactgctagtcgtttgcattgctgttcgagggccgctctgcgttgaggttccggcaatctgacagaccaatgttcgagctgttctgtctttaccataactcatattgacaacgattgcaatatggtcggtgagttgggtggccggcgggctatccgagcacgacgaacgactgcggggagagcgtcgggtggccgtcccagcgccagtcgaggtagaagtccatgtcgaatccggcctgcatcgattcgttcggtcggcccacattcggcgacgaacgccgcctcggggaattcggggcggattttcgagaacatgtactgccaggtgcggatcgtgtatggcttgccggttcatgcggcgatgatgcctcggccgattcgacgaagaatgttcacccggcgttcttccggcggtatccggacgttggcttgtgaggcctaccgtgaaatccggaatcgaaagatccaagcaatgcaggtgcggaacggttccgcgaagctggaaggcatgacgacgacggacgtggccaaacgggtgcggccggagaagtgcgggccggacggcgcagatgacactgcatggaagaaggaagaacaatgggcaatcacaaggctttgaagagcgccgtcgcggcggtcgcctccatcgcgacgctcggcgcgctcgccgctccggcgtttgctgtcgatgccgcaaacggcacctacagccccaacggcaagtcggtcgccgagctcgccaagcacggcgccgcgcagcgcatcgccgccatcggcaacaagagcgcgaagaacgtcgtgctgttcatcggcgacggcatgggcgattcggaaatcaccatcgcccgcgactatctgaagggcgccaacggccacttcgatggtctggacgcggtcggtcagcccggcgcgcttgacgacgtgcaggcgggcaccggccagtacacgaccttctcgctcggcgacggcagcaaggacagcgccgtcggcaaggatggcaccggcaagctggtcgccaaccccaacccgggcaagctcacccccgtcaccgattcctccgcgtccggttccgcatgggcgaccggtaccaagacctacaacaacgccgtggatgtcgacatctacggcaacccgcagctgaatctcttcgagcttgccaaggccgccggcaaggccaccggcaacgtgtccaccgcggaaatccaggacgccaccccggccgtgctggaatcgcactccaccgagcgtgcctgctacggcccgcagggcaagaccgacggcacttccaacaacgcctccaagcagtgcctcgccaaccagctcaaggagaacggcggcatcggctccatctccgagcagctgctcgacacccgcgccgatgtgaccatcggcggtggttccaagtacttccgccagaccgtgcagggcggcgaatacaagggcaagaccgtgtgggagcaggccaaggacatgggcttccagaccgttgagaacgacccggccgcgatgaacgccctgcagtacaaggatggccagccggtgctcgccctgatgagcgacggcaacatgccgaccaagttcaacccgtccaaggccaccgccaaggatccggccaaggacgccaacccgaccgtgtgcaccccgaatgacgcctggctcggcaaccgtggtgcctcgctcaaggacatgaccaagaaggcgctcgatctgctcaacgccaacccgaacggccagaagaacggcttcctcctgcaggtcgaaggcgcttcgatcgataagcaggaccacaacgccaacgcctgcggccagatcggcgagaccgacgacttcgaccaggccatcgcctacgccatcaagaacgtggacctcacgaacacgctggtgatcgtcaccgccgatcatgcgcacacctcccaggtcctcaacgcccagccggcctacgcgctgtccaccgtgctcaagtccgccgacggcaacaacatggtcgtctcctacggcaccgcccaggaagcctccaccgacgccgaaggcggctacaacggcggcgacatggagcacaccggcacccagctgcgcatcgccgcttccggcccaggcgcccagcgcgtcatcggcctgaccgatcagaccgataacttctacaccatcgccggcgccctgggcctggccacctcccccgacgagcagaacgcgctctccaaggacggcaccgtgaaggtcgcccgcacgcaggccggcaagtacgtcgccaatgtcgacggtttcaacggcgacgcgctgctcagctacgagctgaaagacaaggacggcgccgtggtgtccaagtccgattccagcaccccgttgtccggtgtgcgcgtcaagcccgcgcagaccacttcgatcgcgctcgacaagatgtcggaaggcgccgagtacacgctcaccgtcaccggtcgccagtccggcaaggtcgcgaccgtcgccatccaggcgccggccgccggctccgccgacaagaagccgggcgccgacaagaacggcgtgatcgcttcgggcaaggtgccgaacgattccgcggtctccggtccgttcggcgccctgggcgccaccggtaccgccgtcatggccatcgccatcgcggctgtgatgctggttgcgatcgcgatgctcatcaaggccgcgcgtaacgccaggaacaattgattcggccttggccgaccggtaatcccgagtcgtccagccgccggaaaaccatcgcccgccgagccgatgcccggcgggcgatggttttccggcggcttttggctgtgatgcgatacgtgccgtgtgccgcacttcgcaaaaacctgagtgagaatcgctcaagttttttgccgaatccggaatatgcacttgcggtttaaagttgagtggtgtaggctcaagtttcggaagcacgggaatgggcggttgcgaacgcaaaccccacaaccgagaggaaccgcacaaggaaccgaccgaaacccgggcgaaaaacgaaagaacgaacacgtgcgagacggctcgcgcacaccgcgcgtcacaacccgaacaggtcgtggcgaacggcggcgccggccgggcaatcgcaagtcccacaaaggagcacacattatggcacgcgcagttggtatcgatctgggaaccacgaattcctgcatcgcaactcttgaaggtggcgagcccaccgttatcgtcaacgctgaaggcgcgcgcaccacgccgtccgtggtggccttctccaagtccggcgagatccttgtcggcgaagtggccaagcgtcaggccgtgaccaacgttgaccgcaccatctcctccgtcaagcgccacatgggcaccgattggaccgtcgacattgacggcaagaagtggaccccgcaggagatttccgcgcagatcctgatgaagctgaagagggacgccgaggcatacctcggcgagcccgtcaccgacgccgtcatcacctgcccggcatacttcaacgatgcccagcgtcaggccaccaaggacgccggcaagatcgccggcctgaacgtcctgcgtatcatcaacgagccgaccgcagccgctctggcctacggccttgagaaaggcaaggaagacgagcgcatcctggtcttcgacctcggcggcggcaccttcgatgtctccctgctggagattggcaaggatgacgacggcttctccaccattcaggttcaggccaccaacggcgacaaccacctcggtggcgatgactgggatcagaagatcatcgattggctggtttccgaagtcaagaacaagtacggcgtcgacctgtccaaggacaagattgcgctgcagcgtctgaaggaagccgctgagcaggcgaagaaggagctctcctcctccacctccaccagcatttccatgcagtacctggccatgactcctgacggcaccccggtgcacctggatgagaccctgactcgtgcgcacttcgaggaaatgacctccgacctgctgggccgctgccgcacgccattcaacaacgtgctgcacgacgccggcatctccgtgagcgacatcgaccacgtggtgctcgtcggtggttccactcgtatgcccgccgtcaaggatctggtcaaggagcttaccggtggtaaggaagcgaaccagtccgtgaacccggatgaggttgtggctgtcggtgccgccgtgcagtccggcgtcatcaagggcgaccgtaaggacgttctgcttatcgacgtgacccctctgtccctcggtatcgagaccaagggtggcatcatgaccaagctcatcgatcgcaacacggccatcccgaccaagcgctccgaggtcttctccaccgctgaagacaaccagccgtccgtgctgattcaggtctaccagggcgagcgtgagttcgctcgcgacaacaagccgctgggcaccttcgagctgaccggcatcgctccggctccgcgtggcgtcccgcagatcgaggtcaccttcgacatcgacgccaacggcatcgtgcacgtgtccgctaaggacaagggcaccggcaaggagcagtccatgactatcaccggtggttccggcctgccgaaggacgagatcgaccgcatggtcaaggaagctgaggcgcacgaggctgaggacaagcagcgcaaggaggacgccgagacccgcaaccaggccgaggccttcgcctactccactgagaagctcgtcaacgacaacaaggacaagctctccgacgacatcgtcaaggaggtcaccgacaaggtcaacgccctgaaggaggccctgaagggtgacgacaccgagaaggtcaagaccgctcagaccgagttgatgaccgccgctcagaagatcggccaggtcctctacgcccagcagggtgccgagggtgccgcggccgctgccggtgcggctggcgctgccggcgctggcgcttccgctggctccgcctccggttccgacgacgacaccgtcgaggccgaggtcgtggacgacgatgacgacaaggacaacaagtgatgtccgagttcaacaaggacgactacctgaacgacctgccggatcccgaccaggccgctgagggtgccgcttccgccgcgccgcaggactcggccaaagccgagaccgcgtcccaagcttcctctgacgagggagctggcgcggcgaagtccgcgactgagggagagaccccggcgaacgccggagcggaacagccgagcgatagctcgtccgattccgctccctccgattccgaagacaccctcacccccctcggcaaggccaagaaggaagccgcagactacctcgaagccctgcagcgcgaacgtgcggagttcatcaactaccgcaatcgcacgcagaaggagcaggagcgcttccgccagcacggcatcatcgacgtgctgaccgcgctgctgcccgccctcgacgacatcgaccgcattcgcgaacacagcgagatggacgactcgttcaaggccgttgccaccaagatcgacaaagccttcgagaagttcggcgtcgagaagttcggcgaaaagggcgaggacttcgaccccaccaagcatgacgcgatcctgcacaagccggacgcgaatgccgaaaaggaaacggttgacaccgtggttgaggccggttaccgcatcggcgaccgcgtaatccgcgccgcccgagtagtagtagcctccccacaaaactgacgaccagttcgctgcaatgagttgacagtgccttagctccctctgatgagggagctgatatttacctcggctcccctctctgaggggagttgtcagcgaagctgactgaggggagcttaacggatgccgtaactcccctcagtcgcctatgacgacagctcccgccaacgggagccaaccataaagactcttctagaaaggagacatgaatggctgaaaacgaatggctcagcaaagacttctacaaagtccttggtgtctccaaggacgcttcggacgacgacatcaagaaggcgtaccgcaagctcgcccgcaaataccatcctgacgtcaacaagaccaaggaagccgaggagaagttcaaggacatctccgaagcctatgacgtgctgagcaagaaggaagatcgccagaagtacgacgcgattcgtcagttcggcatgggcggtgcccgcttcgccggcggttccggcaccggcggcttcgatgcttccggtttctccgacatctttggttccatgttcggccagggtgccggcggcaatggctcgcgcatccgcttctccacttcgggcggcggccccaacaacatcaacgacatcttctcgatgttcggcggtgctgcaggtcagggcggccagccgtatggcggctacggccaatcgccgtacggcaatgccggcggctatggctatgaggaggccccgcgccccgaaaacggcgaggaccgcaactccaagatcagcctgaccctgcgtcaggcggtcaagggcgctaccgtgtccctgtccgtggacggcaagaagttcaaggcccacgtgcctgcgggcgtcaaggacggacagaaaatcaagctggccggcaagggcaagccaggcatcaacggcggcaaggccggtgacctgtacctgcacgtcactgtcaagcccgatgccacattctcgatgcgcggccatgatatcgtcatggacctgcccgtaactgtgggccaggccgtggccggtggcaaggtcgaggccaaggatatcgacggcaatcccgtcaccttcaaggtgccggcaggctccagctccggcgcggaagtcaagctcgcgggacttggcgtccagcgcagcaaccagccgggcgacctgatcggccgtgtgcagatcatggtccccgccaagccgggtctggccgtcaagcacgccgccaaagaattcgacgaaaaagccggcgactatctcagcctgtaatcaggaggtgaacaatggcgcggttagccaaccagatgaagcagttatacgcgatgtgcgcaaccgcgctcgtgatgggcagggccgatctcgacggagccgatgacgtcggcttcgacatcgaactgcccatcttcaccgtcggccaggcagccgaactgggcaacatccacccccagaccctccgccagtacgaccggctgggtctggtccgtccgcagcgcaccgatggcggcgcacgccgctactgcctgcgcgacatcgcccgcctgactcgagctcagcgcctaagtcaggatgagggcatcaatctttccggcatcgcacgcattttggccctcgaagaagagaatcgccaactgcgccgcgaagtcaaacgcatgcaaaccggcgaccaggagagcgttttcgccgcaggccgtgacggcaatatcgtggaggtacaacgctccaaccgcgcccgcctctggcgcaacgccatccgccgcgaaacccgcgaactgcccggccgcgataccgctgccgacaccacgcgcgaatccgactccacccccgccgattccaaatccatggtcctgtggggttggtgatttgctgttcggctgtcgtgcggagttggtgagataggtatatcgaatacgaatagttgaggattcactgcgacgtacggaggtaaccatgctgctcaaggccgtgttttgggatttggacggaacgcttatcgattcggagccgctttggcatgacggtgaaatcgagatcgcgcacaacaatggcggcgagtggaacgaggacctcggttgggagtgctccggcactccggtgccacacgtggcagaggtcatgattgcgcatggctgcacattgagcgttcccgaaatcgacaaacagctcaaggattatgtgttcaaggcggaggtcgaacgtctgccgtggattcccggcgtattggacgtgctgcactcgctcaaggaggccggcattccgtccatgctggtcaccacgtcgccgcgccgtatggcggagaacatcatgaagcagtccgagggactgttcgccggctacgtctgtggcgacgatccgtacgaacacaagccgaaccctgcgccctatctggccgcagccgacaagcttggcatcgcccgtgaagacatggccaagtgcgtggtgctcgaggattcctcggttggacttcaggccggtgcggcatcgggcgcgactctgatcgcgcagactggctggattcgcacggatacttccggcctgggccagttcgcgtccatcgaatcgtatgacggtatcgatgcggccgcgctggacggtttcgtgcgccagcgtttgggggagtagaaataggccgattgtatcggcattgcattccggtgtgtcgcaagtatttgcaatgtttatatcaaccatttgatgtctgttttgacaaacttctgaaacgttatagaattgttgccaacgaagaaatctgaaacgttctagaaaaaccggcgcacagcagcgtcggttgactggttttccgctccggcaaagcatgcccgagtattttctatggccagtttctgaaatgttacagaaaaagaagatgaggtccaagggaggtcatcatgacggcaattcaggaagccgttcccgccgcagcgggggcagcgcaaagccgtgggggagaggtgagcaacgcggctgcggcagccggcaaacgtgttcgtgcccgcaagcacagcggcgcatcgcagaactcatggcaaagcaagctgcgcccctacctgttcatcgccccgctggtcattctctccggcgtcttcatctactactgcatcggcttcaccgtggccacatccttcaccgactgggacggcatctccagtgagatggacttcatcggcctgaagaactacaccaagctgctcgctcccggctccgtgttctggacggccttgatgaataacatcatcttcatggtcgtcaccgtggtcatccaggccgggctcggactgctgctcgcggtgatcctcaaggagcgcctgcgcggttccagcttcttcaaggcgatcttcttcatgcccatcgccatggccccggtcatcatcgccgccatcttccgcatcatcatggatccgaacgtcggtgccatcaacgaggccctgcgcttcctgcacttggacttcctggcccaaagctggcttggcgatccgcacatcgccctctactcgatctgtgccatcaacatctttgaatggatgggcttctcgatgatcatctactacgccggtctgatgtctatctccgatgacatctacgaagccgccaagatcgacggctgcggattctggaacaccctcttccgcatcaccattccgaacctgtccggcaccaccaacacgcttatcctgcttggcatcgtcggctcgctgaagaccttcgatatcgtcatccagaccacaggcggcggccctggccgttccaccgaattcctgaacacctacctgtacaaggccggcgtgcagcagttcaacggcggtctgtccgcggccatcggcgtgatggtcctcatcatcgccgtgatgctctccctgattcaacttgccttcaacaagcgtgccaacaactaacgagaggacgtcatcatgaagcgtaaaaccagtgcgacggtcatcatgtacaccgtcctcgtattcttcttcgtcatctggattttcccgatttacacggcaatcaccaagtccctgcaggcaggcggctggaacagctacctgtccgtgatcaacaataaggacgtgcactacttccgcgtggtgttcaacagctttttcatctccgtggtcaccgccgtgatcgtggtggtcatcacctcgctcgccggctacgcctttgccaagatgaagttcaccggttcccaggtgatctacgtgctgctgctcgcctgcatggccgtgccgattgcctccgtgaccatgccgctgttcttcaccatcaagacattcggcctgaccaacacctacctcggcatgatcatcccgttggtggcgttcaacgccctgcagatgctgttgctctggcgcaactacttcaacggcgtgccagacgaaatcatcgaagccgcccgcgtggacggctgcggttccctgcgcatctgggctcgtatcttgatgcctatctccaccccgatgatcgccaccaccggcgtgctgaccttcgtctactcctggaacgaatacctgattccgttgctgctcatccgcgacgaatccaagtatccggtcacgctggcctccacctacttcatggagacccgcagccagacgccggagatggtggcccaggaatacgccgccctgattctgatgacgattccgtccatcatcgtctacctgatcagccagaagtggctgcagtccggcatcaccgccggcgccgtcaagagctgaggtgacccaaaatgaccgcaaccatcagcaacggtgtatccgccagctacagccctgcggaagacgagctcggcgcagctgaccccaccgccttgcttgccgaatctggcgatttgaagccgctggccgaacgcacttatacgaatccggttccatatgcggacggtaagtcccataccgcgcccgacccgttcgtgctcaaataccgcgacctctactactgctatgccaccgacgagcacggcattctggtctccacctcaccggacatggtgcactggacctcacatggattctgctacaccgaagccggacgcagaaacttctgggccccatcggtgattctcatcaacggcgtctttcacatgtacttctcgaatatgccggccgaggagaccgacacccacacggaaatcatgcgtgtggccgtgagcgaggatccgctcggcccgttcgaaaagaaagcggagctgttcaacaccttcgccatcgactcccaagtggtctatggcgatgacggccagttgtacttgctttacgccgacaatcaggtcaccggcctgagcgatgaccggcccggaacctccgtgatgatcgatcgccttgtgaccccgtattcgcgtgagaacaaaccgcgcccgctcatcgtgcccaccatggacgaggagatctttgcccgcaaccgtttcggcgatggccgcgactggcacaccgtagaaggcgccacatacttcgcctaccgtgaccgcgcgttcatcacctactcggccaacgcctacgagcatgaggactacttcgtcggatactcgtacgcacagctgccgaataagcaggccgacgcccacatcgatcagctcgattggacgaaacagctcaacgagaaccgcttcgatccgctgcttatccgcagcccaaaggttgaaggcacgggccacaactccatagtcaaagcgcccaatgccgttgatgactggattgtctaccacggccgtaacgccgatgacgagctgtatgtgggcaccgaacagcgcgtaatgcgcatcgacccgctgtactacgccgaaggagggctcgacaccccaggacctaccgccgccgctcaaagcgcaccgctgtatggcactgtgcatgatgattttgcggatggcctgaacgccggatggtcggttatttccggtgcggcccacaccgaatccgatgtggacggtcacgcgcttgttgccgacgaatccagtgtattcatcgctgtgtcgggcaaatcgtccgcaacccaagtgattgacgtctgggccaaagctcccgtcaccccactgggcgcacgattcggtatcgtggtgcggtaccaggatgccaacaacctcaccaaactcgaggtggatgctggccgtcaggtaattagcgtggtcgatgtgatcggcggcgttgcctccgaacgcgtgaccaatgccgacctccatgacttcgattcccatgcctggcatgagtaccggcttgagcgccgctactgcaggctggagatccgcattgatggccgtttcgccgcgtcctgcaccatcagtgataagcccggtcgggcgggattgttctcgttgcgaacgggggccgcgttcagcgcatatgcggccactgaacatgtgaatctgtggggtgccggattgcgggatctcggtcgagaattgcatgctgaccgccgactcgtcatcgacggcggcgtgaggtccagcggcgtgtgtccggtaacactcgaactggcatacccgctggtcagcaaccgtttcgtccttgatttcgctgggcagacgagccgtgggcaggcgctgttgtctcttggcgaataccgtttgtccggcacggcatcatccgtggagttcatgcgcaacggcaagtctctgccttccaccccggagccggccaggctgcgtgtctttgaagacaacgtccgccgtgaccgttcgggccgagccgtgctcaccatccgtatcgaagctctgaacggcacgatgcgactgcacctacgtggcaaaacctggcaggtgccgtttgcggacaatgcggcccgtgcccgtatcactcttgatcgcgcatccctgaccggatacgagaggacatcgctggaatccagcatcgaggaaaggagtgcgtccggcaattgagccaacatcagccgcacatatcgggtgtggctggcttcgccatccaattccgatgatcttccacaacgaagtgaaccaataagagaaacaaggaaaataaggagaacaatcatgttgaacatgaagaaggcgatcgccgcagtgggcgctctcgctatgtctgcaggtctgcttgccggatgcggttcgggcagcggcggctccgatgagggagtcggtaccaaggacagcccggttgagctgaccttctggacctggcagcctaccgatgcccagtggaagtcgatttacgccgccttccagaagaagtacccgaatatcaagatcaactggtggcgtacttctgaaatggccgactaccagaagaagctgcagacctcgatggccggcggcgaaggcccggatgtgttcggtgtgcaggccggttccactgtggaacagtacggccgtttcgccgacgatatgaaggagctggccgacaagtacatgcccggctgggattccaaggtggccgagggcgccgtggcgcagaccaccaacaaggatggcaagatggtggccatgccgaccatcacctccggctccgaatacatcctgtacaacaagacgctgcttgacgagcagggcatcaaggtgcccaccacctacgacgagctcgtggctgccaacaaggaactcaaggccaagggtctgatgccgctggccctcggcgccaaggatggctggcacctcgacgatatcttcgtgtggctgtccaaccagtacggcgaaggtgacgtgtacaaggccgccgaaggcaaggccaagttcactgatgagaccttcgtcaagaccatgaaggcttggaagcagatgatcggtgatggtctgttccaggatggtgcagttggtactgcgacctacccggatgctcgcgacaactacttctacgcccgcaagtccgctttcttcccgaccggctcctggcacgtttccgccgtgctgccgaacgatgagaccaagggcacggccgttgagaaggacgagctaggcatgatggaattcccgcaggtgggagacaaggctaccggcccgaccactggtgtggacttcggcctgagcgtgaacaaggactccaagaagaaggaggccgccatgaagttcatcgagttcatgaccaccggcgaaggccagcaggagtggatcaacacgctgcagggtgctccggtcgacaaggacatgaaggtcgaagtgccgtctgacgccacggaatccgccaaggccagcatcgatttggtgaccaagggccaggcctcttccaagcttgagcgcaagctcacctcccaggaactcaacgacgagatcggtgtgcagatgcagaacatctacaccggcgacgccaccgttgactccgcgctgaaggccattcagcaggtcaacgaatccatcgaaaggtgagcctatagataggaatatcgcatagtttctactcctcgagtgggcccgtccggtacgaattctcgttgtctggcgggccttctttgttggtttgccgaagtggccctgatttattaccgccggcggagtctgttgacggttgcagtgggagtcgtgggcggcgtgtcggacccgtccctgctagcggggctgtcggcaaggccgactgggggtgattctgcggacgcctaagcgaaacggcctgcgggggcgatatcccacatggtttatgctggaaacacacatctgaaacgttcgacaaccaatatggcgacgtggatggtgccatgccgagtggttgatggactgaatataagggggcgctatggttgcgagttcgcgcaaggcgacgctgcacgatgtggcgaaacgtgcgcacgtgtccgtggcatcagtgtccaattacctcaacgattacccctatatgaagccggccacgcgcgaacgtatccagcaggccattgacgagctgggctatgtgaccaaccagcaggctcgcaatttgcgttccggccgcacaggactcatctcattgtctctgccggatttgaaccagatttacttttccgaactggccgaagagatgatcacgcgggcacgggaatatggataccgcatcatcatcgaatcgaccggaaacgaccgccagcgcgagatcgagagcgcacatgccatggccagcaatatgaccgacggacttattttgagccccacggccatgcgggcggaggatgtggccgagctcgagggcgactacccgctggtagtgctgggcgagcgtatcttcaacgcacctgcgccgcacgtggtgatgcccaatgaattgggtgcccaagccgctaccacgcatctgctggaggccggatgccgcaccgtcgccgtggtgggcggaacgttggacgaatccgtgccgtcctctcgttcgatgcgaaccaaggggtatctcagcgcctttgcggaacgtggagtgacgcctgatctgaacctgatccgcgagtgcggcgaatggaccagtgccgagggcgctcaggcggtacgtgagatgtatgcgcagggcattcgaccggatggcatttttgcgctgaatgatttgctggcgatgggtgttatcagtcagctgcgggaaatgcgcgtgcgagtgccggaaagcgtgcgtgtggtgggcttcgatgatatcgatgaggctaagtacacgattccctcgctgaccactgtggatccgcagcgcgcgcgtattgctgagattgccatcacgtcgattcttgatcaggtcaagacgggggctcgggcgccgaggcggcgtattgatgtggagtattcattgcgttaccgcgcttcctcgccgcaggtgtagcagttgtgttagccggctggtagggtatttgacggtttgcatataactgtctggttcattgggctggcagctcaatacaagatttaggactcataggaaacacatgggcttcgttaatttcatcctcgaactgctgaaggatccgcgtgccg

SEQ ID NO: 85 - DNA, 8849 bp, Unknown
  R206_24m  MAG No. k141_8756
cgggtcggcggccatgggcgggacaaatcaaaataaggacagccaccggaaccgatggcgtcagtcaaatgtggggtcaccgcccaagccgtcatccaccattatcaccgatcagaaaccggcataaccattatcaacgtcaaatgtggggtcaccgcccaagccgtcatccaccattatcaccgatcagaaaccggcataaccattatcaacgtcagtatggtcaggatttaccgaatatccttgatttgcgtatgccttcagccgttttcgatacatgacagcggataaaggcacggtcacgtcgatgtaatcatagacacgaacctcggtcttgccatcattctcgcgatgaagtcgccctacatattgcgagagagtaccctcaaacgagaccggagcggcaagcagaagcgtgtcgaaacgcttctgatcgaatccttctccgatatagctacccgtagccactacagtcaggctctcattattcggcaccaaggatagatcatgcatttttttggttattcgctgtttgcggtggggcgggcatgggttagtgtttcgggttcgatttcctgtcagaaaaaataatcgagtgcgggattacggccggtaaggctcctgctgtggatgcggatgcgcgtcagccttacggtgatgctttcccaaaacgcggattgtacgaggtgtgggacggcacgcggattcggccgttttccgcccgccgtcccacagcgctcgctatgaacggttgtgcatagtcatggagctgcagcgagaatcggcgttattccgcggtttctacagtcgtcggtgtgggacgctacggacgttaaacggttgacttgtctgccatcccgcgctcttgagggacggcgcggacgacaaacgattgactcgtctgccgtcccacagatattgggatgtgtacggctgcctgctgcctatggcgggtgtcggtcacccccaccgatcgccccccaccggtcaccaccctgcttggcggaaatacgcaactcgactttctgtaggcatcatggcggcatggcgacggcggacagtcgaagagatccccatgatgcctcaacagccatcgcccacacacatcacagctatcaaccgcaaatatcaagaggccgaaaatctatgagacaagcaaccccggaaagcctcagaccctacaaatggctttattgcaagggtatatgccggttcaaactccactaatagaacaaatagaacagccggcttaggtacggcgcggcaaatggcgcaaaccggccgcgatagtagtagcgtggtgcataccagtacaaccatgcgaggagaacagccatgatcaatgaggaatacaaggccatgcttggcggcaagtccgtgattcgcgggctgagcgagtacgccacgagccgcggtgccgaaatcggctaccagaacgtgttcgattacagccttggcaatccctcggtgccggctccgaaatccttcaccgacgccatggtcgacctctacgaaaacggcgatcctgcggccatccacggctactccccctcgctcggcatcccgtccgtcaaggacgcgatcgccgaaaacctcaacgaacgtttcggcatggcatacaccggcaaccatatcttcccgaccacgggcgcggcgggcgcgctgtcccacgcgatgcgcgcggtgaccaagccgggcgacgagatcatcaccttcgccccctacttccccgaataccagccgtacgtcaagggcatcggcgccaagctgaccatcgtgccggccgacaccgagaacttccagatcaacttcgaggcgttcgaggccgcgctcaacccgaacgtgcaggccgcgctcatcaacaccccgaacaacccgtccggcgcggtgtattcggcggacacgctcaagcgtctggccgcgatcctgaccgccaagcaggccgagtacggccacgacatcttcctgatcagcgacgaaccttaccgcgaaatcgtgttcgacggagccacccagccctacccggccagcttctatgcgaactcgctgacctgctactcgtggtcgaagtcgctgagcctgccgggcgaacgcatcggctacgtcgcggtgaaccccgcagccaccgacgccgacctgctcgtgccgatgatgggccaaatctcgcgcggcaccggccacaactgcccgccgagctcgatccagctgggcgtagccaaagtcatcgaccagaccgccgacctcaacgtctacgagacgaacatgaacctgctctacgatgcgctcaccggcatcggcttcgacgtggtgcgccccggcggcacgttctacatcttccccaaggcgttagaggacgacgccgtggcgttctgcatgaaggccaaggaatacgacctgatcctcgtgccgtccgacagcttcggcgtgcccggatacttccgcatggcctactgcatcgacaccgagaaagtcaagcgttcgatccccgtgctcgaaaagttcgcccacgaggtgtacggcctgtaaacacgggccgcaagtaacaaacacaagaaaggggttgccatggaatacaccgaaaacgccgatcatcgcgaactgctgctgcacagcgcctatgactccgatacggtccgggccatggagcgacccctgctggacaaaggcgtgccgctgatgcgcatggccgcccaggccgcggcccacatggcggccggcatgctggacgacgaggatctggcgctggaggacacgtcgatcgtgctgctggccggggccggagacaatggtggcgatggtctgttcgcggccgccgcgctggcccaggagggcgcgaacgtcactgccatcgccgtgggccggtcgctgcatgaggccggattcgccgcgctcgtgcgcgccggcggcaaggtgctggtgcttgacccggcagccgatattcccggctgcgcgtccgggttttcctccggtgaggccggtgagcgattgcagaccgccatcgccgtggccaggaaatcgcatctgatcatcgacgcgatgaccggcatcggcattcaaggctcgctacgcggcattcccgccgcgctcgcctccgcccttggtctcgacggcgagtctcccgatgagcccgccctgccgaaccgtgagtcgtcaggcgattttccgctggtacttgctgtggatacgccatccggcgtcggtgtgaacgatggttctctgcctggcccgtacattccggccacggtcacggtcacgttcggcgcgatgaagccgtgcgcggtgctgccgcccgccacgttcgcctgcggccgtatcgagttgttcgatttcggattcgatatcgacgacaaggatccggacgtcgaggtggtggataattcgttcgcgtccgacgcggtccgtctcccccggttcgaggattccaaatattcccggggcgtggttggtctggtgaccggctcgcagcgctaccccggtgccgccgtgctcaccaccagcgccgccgcccgcgcgaacaccggcatggtccggtatctgggcccggagcgcgcgcagaacatggtgctcaccgcactgccggaagccgtgatcggcaagggacatgtgcagtcctgggtcgtggggtccggcgtgcccgaggctagcgtcgagggcgccgacggcgatatgcagcgggacaccatcgccgcattgctcaagcattacgcgctcggcagcgaggatgagaacaaggacgcctacgacatgccgccaatcgtggtggatgccggcgcactcgacctgctgccggagcgtgtgcccggccaggtagtgatcacaccacatgccggcgaaatggcgaaactgctcaaccggttcgaaaccaccgccagcaccgcggagcatgccgattcgcacgagccgtacaccgccgacgacgtgcggctgaacccgttggccagcgcgaagcgcgcccacgagctcaccggtgccaccgtattgctgaagggcgcggtgaccatcgtggtggatgaggaccatgtctatgcgtcgggcagtgcgccggcctggctgggcaccgccggcgcgggcgacgtactggccggtctgaccggcgccctactcgcccagcaggatgacgtggccaccacggccgagaccgtggcctcggccgcatacctgcatggcctggcggcggcgatcgcctccgaatccgagcagcagggctggcaggagccggaactgatcggccgcgagcatcgccagcgcttcatgacgctcggccacccgatcgtggccggcgacgtggtccacgccatccccgaagccatcgccgacgtcatcgcataaccttgttgacctccctctgacgagggaggtgtctcggcaaaaccaagacggagggagagaaacataagcctcaaactccacataccccgacctatacacaaaccccgtacactaaatcgcagaccccacccaacgacccaaacacacaaggaaccatcatggccaactcccccatcaccgacgtgattttcgacttctgcggcgtgctgctggactggaacacccgcgcatgccttgaaggccgattccccgatgaaatcgtggaacgcatctgcgccgacgacgacccctgcggcttcttccactacgaggaccgcatggacgccggcgaggatttcgcggacatctacccggatgtggtacgcgaacaaggccaggaactcgccgacatcttcaagttctacatcggccactacgcggacgcgctgccccgcacgctgccgggcatggtcgaactgctggcggatttgaaggcccacggctacggcgtatggggtctgaccaactggtcgcatgagaccttccacctggccttcgagaagtacccgcgcctcgaacagctgctgcagggcaccgtggtctccggcgtggagaagatgcacaagccgaacgccgacatctacgagctggtcctgacccgcttcggtctcacggccgagcgctgcgtgttcttcgacgacaccgccaagaacatcgtcggcgccaacgaggtcggcatccacagcatcctcttcgagaacgcgtcgcaggcgcgcgaatcgctcgccgaactcggcgtacgcctgtaagtcgccaaatattgcgtcgcggcagttgaagtctatggacccgtccttgacgacggtgaccggccgtttggcgaccggcatgtcgcactgttcggtgagcacttcaacgacgcggcacgcggcaccatgcgcagaatcatcatgaaggcgttctggatgttcatcacgtcggcgccgagcctggtcatcaggctcggcgtggagaagcggtcgatgctggagaaggagaaggtctggatggcatcgtactggtcctgcctcaggttaccaatgtggcgcatatcccgttacacagcgtccgcgatatgcgaggcatctcatattgtgtcgccatagtggattgatgaggttataaacccgtgtggcgaccatccctagcgatataaatagactttatgacactgctgcagctgaaatacatcgtcaagatcgtcgagtgcggctcgatgaacgaggcctcccatgccctgtacgtctcccagccggccctgagctcgtcggtcaaggaattggagaacgagctgggcatcgagatcttcacccgctcctcgcagggcatcgccctgaccgtggacggcgcggaattcctgacctacgcccgccaggttctcgaccaggccgacctgctcgaagagcgttacaagcatgccaagccgcgcaagcagctgtgccaggtctccacccagcactacatgttcgccgtcgaggctttcgtggagatgatcaactccatcaagtccgacgaatacgagttcacgatccgtgagacccgtacacgtgacatcatcaaccaggtggcgaacatgcagtccgagatcggcatcatctacctgtccgatttcaataaggacgtgatcggcaaactcctgcgcgagaaacaccttgaattccatccgctcttccgcgcccccctgcacgtgttcatctcacgggacaacccattggccgccaagaagatcatcaccatggaggatctgaagccctatccgttcatccagtacgaacagggcgaggaaggctcgttctacttctatgaggaggcggtctggccggaatactcccccaagcagatcaacgtgaccgaccgcgccacgattctgaacttcatcatcggcctcaacggctacacggtgtgcaccggcatcgacaacggcgacctcaacaatgagaagatcgtcaccgtgccgctcgacaccgacgaaacgatgttggtcggctggatcacgaacgagcgttccaagctctccaaggccgccgaaacctatctcgacaaactcaagtccgtagtcgccgaccacggctacaagctcatcgattaggagtaagtaaaacaggcatggtcagcagtgagatatactgcgattaagccaaccccgctggggaaatggaagcaagagctggcccctgagtatctcaggggccagctcttgcgctattgagactgactggcaaaaccagtttgatggcctccggctacttggccgagattaccgacgtggcggctgtcgcggcaaatcccttaagcacctcaatcatcacgtcacggtcttcaacatcaatgctgcgggccgcggcgagcattaccggcaacgactgcgtcacgtgcgacgtgagttcgccgaacgtgacgtacccgccggcctcgaagatggcgaacaggttttcgatgaacctgcggcgatgctcatcatcgtatttcgccatccatccgttgatcgtgcgcgccagatactgcgcactgttggcgagcccatcggcctgtacgaatcggccatgatcgacctgccagtgcagggcaaaatgctgcatgatgctggcaccgtcgctgctgaccaccgtatagccgtcttccacatgctcgcgggtctcaaacagcatgccgatgatcgacgatcccggtaccgatttatggattttcggcgcaatgcgcgcgtacccatcctcatcgaagaacgcctcatcgaagcctggaccatcgtgcgaatacacggccgtgatacgtccctgaatttcgccgggcacattggccgccgcgtataccgccagattgccgcctttggaatggccgccgaccataatcggcccggcccagcggccggcaatatcagtcacataccgcacagcggcctcctgcgaggcgaccggacggcggaaggccatcgtgaaatcctccttccacccgacgatcgaactgtcggtgccacggaaagccacgtacagcgtgccgtcgcccagttcgaagacgcaggccgagaactgtttggtggtttcggcgtcgaattcatccacgtattcgccgacgcgcaggtcgcgccagcgcgggctctcccccatcgcacgcagcagatcgacgttcatctgcggcgaccacaccttgccgaacatggcgtcatagcattcggcgcgtagcaggtcgcggatggagaccgtgggaatcatgccgctgacgtccgccgaatcctcgtgatagcgcggcacgttatccggcatgcgcgcgtaggccagctgggacagggcgagactgtccgcctcggtgaacggcagtgcggcgaaggtgtcgaaatgttgccggatatcgtcggtgatgttccccatggcggccttccttgttcgaatgtaacgaacctacggtaattctacgccgagcgggttttcatcacaggcgagtcggtcccagagtttaaaaccctatctcgccttcaaggggctgatttggccttctggagacatctatctccgtttcaaggggctgttcatccgtcatatcccgagtatgagcggcatcaccccaacgtcattccgccattttcatgctgcttctacttgggcatcagcccctcgaaacggaagtagatctctggaaaccacgacatcagcccctcgaaacggagatagcatcaatttaggcccagattgcccgttacagcatcgggtaatacttaccgtgatcgattttggcggcgatatcacgtaattcggcagcatctcggcggtcttcttcattaccttgcgacaacttgttcgctttactgtccagatgatgctcgatgccgaagtaactgcatatccccacgagcgcaaatagcactataccaactaaccagttcatagcacgctccttgccaaagcttctgccttaatatggtactgctgttcatggatcgtaataaaaaaagcgggctcgcaagcccgcttttggttttaggttgaagacgatcaggcgccgtattcctcaaggtaggcggcggcgcgctgctggatatcgtggctgagcaacggggtgccgtcggggttcttcatcttggcggcggcgtcgaagatctcgcgcacgttggcgatggagagcaccgggaagccgaattcggcttccacggccttcacggcggacaggtcggagtccttggtcttctccatgcggtccacggagagcacgagacccacgacctcgacgttcgcctcggccttgagcttggggatgacttcgcgcacggcggtgccggcggtcatcacgtcgtccacgagcagcaccttcatgccgtcggtcagcggggtgccgaccatccagccgccgtcgccgtggtccttcttctccttgcggtcgaaggtgtatccgacggtcatgttgtggccggcggtcagcgcgatcgcggtggacacggccagcggaatgcccttgtaggcggggccgaacacggtgtcgatgttgcggggaatcgtgttgtgcacgatggc

SEQ ID NO: 86 - DNA, 27944 bp, Unknown
  R206_24m  MAG No. k141_8900
atgcacggcataggcgaaatcgaccggtgtggcatgggccggcaaagagacgatcttgcccttcggcgtgaagacatagacttcggacgagccgaggtcttccttcagggaaccgaggaattcgttggaatctggggtttcgctggtccaatcggcaagctgctgaatccatttgagattgtcggcttcggaaagctcctggttcttctcgtcacgcctgcggtcggacttgtccggcgagctcagggcgcggccggcctggccgttttccttgtatttccagtgcgcggcgatgccgaactcggcgcggcggtgcatgtcccaggtgcgaatctggatttccaccggcttgccaccggggcccaccaccgtggtgtgcagcgactggtacatgttgagcttcggcatggcgatgtagtccttgaaccggccgggaaccgggttccaccgcgcatgcacggcaccaagcgccgcatagcaatcctgaatggtgtcgacgatgatgcgcacaccgaccaaatcgtagatgttcgcgaaatcatggccgcgcacgatcatcttctgataaatcgagaagtagtccttcgggcgtccggtgacgtatgccttgatgttctgctcgtcgagatcctcgttgatctccgccagaatctgcttcaggtacacatcgcgctggccggctcggcgagccaccagcaccacgatctcgttgtagatcttcgggtagagcaccttgaagctcagttcctcgagctccgtcttgatggcgttcataccgagtcggttggccaaaggcgcgtacacgtcgagggtttcacgcgccttcttctgggcggacgtggtcttcacatagcgccaggtgcgggcgttgtgtacacggtcggcgagcttgaccaccaaggtgcgcacgtcgcggctcatggccaccacaagtttgcgaatggtttcggcttgggcggagtcgcccacttcaagctggctgagcttggtgacgccatcgaccagaccggccacggtgtcgccgaactcggcacggcattgatccaacgtgtagtcggtgtcctccaccgtatcatgcagcagaccggccgccaccacaatcggccccatgcccagatccgcgagaatctgggaaacggccaacggatggatgatgtatggttcgcccgacttgcgccgttgcgtgcaatgctggatgacggcgcgccggtacgcgcggtcgaggatggacaaatcctcaccgggatggtgggacttgcacactttcttgattggatccagcggattgagcggatcggcactgatctcacaacccaacttacgggcggcgtactgctcgccatcaatctctgccatgccagtcacctccctcgtcatgaagttcattgtaaccgcgaaccggagccttatgcatgcacctgttcgccatcattggttccgcaaccgtcgttgccgtcatcaccttggtcattcaaccggcccaatccggtcaggacgccactcccgtcgaaccgaacccacgttcggcgcgatcggatccgggcagggtttcagccgggatgaaccgggcctcaacataccgctgaatcaccaattgagcgatgcgatcgcccggatggaagacggcggtgcgttccggatcgaggttgatcagcggcaccttgatctcgccacggtagccggcatcaacggtgccaggcgcgttgagcacggtgacgccctgcttggcggccagcccggaacgcggatgcaccaacgccacgtagcccgcaggtagggcgatggccacgccggtgggcaccagtacccgttcaaaaggcttcagcgtcacatcgacggtggtgatgaggtcggcaccagcatcgcccgcgtgggcatagtgcagctgggccggatgttcggggtcgaggctcttgaccaggacctcggtggattcgggctcgttgtaggtctcgtcgaacgccatcaggcggcgcactcctcacacaccggctggccatcctcgtccgtgtaggcgagctggctacgatgcttgaccaggaagcactgcgagcagatgaactcgtcaccctgcatggggatgacggtcaccgaggaatcctcgttgctcaaatcggcgcccggcagttcgtagtcttcggcgatggcgttctcatcgtcgtcgatgtcgctcgaggcgttctgcgaggacttccccagcgcctgcagcgattcctcgtcctcatccttattgcggggggaatcataatcctgagccatcatggtcctttcgtcgtctttggttcgtaagtcgatatatatagcacggtcagcgccgtactcgcccataggatacacgatttgaaatactcgtaaagttcgacacgtggggcatacttaaaagaagtaatgtctttgcgacggaaagtggtgcgaatatgccagatgatcggcttgaaaaagcccgtttcgtacgcgtgagcaagacgggggacctcgtattctccattggcggcagggaaatggccgtgagcgtggacgacacgctcgaacgggcgattcttgaggccaagcaggtcagaagcgagatgcgacaggccccccagccgcatcagcagtccactttgccgatttcccagatacagtcgctgattcgcgccggtgccgatccggcccgtgtcgcggagaaatatcatctgagcgaaacgctggtacgtcgtttctccatggccgtggagaccgagaaacagtacgccatcgaacaattccttgccgtggcggcacccaaagacagcagggtgcgcaccatcagcgaactggtggaacgcacgctggcctctgctggaatcggcatggaatcagtgacctggaaatccacccggcgcggacttgagccttggcgcatcgtggcgatattcacttccgcgggccgtgagatccatgccgaatggacgtggaatatgcacgacaattccgtgatgagcctgaacaatgccgctcgaaaactgctcggcgaacagaatccggaatcagccacggattccaaactcaagccgacgattcctgaactgcccggcgactccgtacgttccgcgcgtatcgagcgcgccgtgtctgcttgggcggcgcctacgccttcgattccggccgcacggcctgccgcgatccggccctccgtcacttccacaggttccatgcccccggtggacctatccacgtccatctcaccggccacgaaccaggctcatgacgctacggcccccagcccggtctcttcgcagaccgccggacctgtttcgtcatctgccgcaggattgcagcaatcgcctgccacggcaccagagcagggttctgacaatatttcggacgagaccgtacggcgtggccccaatgcacagctggtagccaccgagcaggagcgggcggccgaatccgccgccaccaaacacgaggcaccagccaaaccggccaagcgtaaatcaggacgttcggccgtaccaagctgggacgagattctgttcggagactgaatttccgaatcaggccatatcgatcaggcagggaatatccatttccaatgccgtttgggagccatgcacgctcggcaggtgggtggctttgtctccttgcgtacgcgaatcgacgagggtcacggctcccgctgcctgcacgaccacatcgccgagcatcggccggactcgctcgcagaccggtccaaacaatccgtccgcgatggcctcatccctggtccgcaccaaggctcggtcttgcaggtaatcgcgccaccggcaagctatatcctcaggtcgttcatccggctcggcatacagcatcagcgagcgcggctctcccccgaccagtgacacgcctcgggtgagctgcggttcaacggcgatgtcaatccgctggcccatgtcggtttgcaccatgccgtggtcggccacgatgacgatcagcgtgcctttgggtgcgctgcgtttcaggagcgcgagctgggcgtcgatatgttcgaatgcggccacccagtgttcggaatcccacccgtaattgtggccgactttgtcggcgtcacggatgtacaggtaggtcaggccgggggtacgggaggcacgtgaggcagccagcacacgatcgcgtggggtgacgttgccttgatagtcggtgcctcgcaatgcggcttcggtcaatggcgatttggagaacttgggcaaccccgagcttgtgacgcgcacctcttgagccgcaagtttctcgaacaccgtctcctcgcgctgctggtcgagcggatcgaccatgggtggcacaggaatgtgcggattggctggtctgggtgccagcgcgtctttgaactggatgagttggatgagcttatggctggcgggttcgagctgcgtatagcccgccattgcggtcagtcccgggcaggttccggtaccgaatgcggccatggccgccacagtggtgcttggagcgcaggtggcgatgggacgctgattggcgcgttcgttcatcagcgaacgcagatagggcgcgtggccgaggcgcatggcgaggttccagaagcccaggccgtccacgagcaccacgatggccgattcggcgtcgggcagtcccaacgcgcgctggcaggccttgggatcggcgtggaccttggtgggagtcggatgcccaatcgcggcggacaaggcgggcagcacggcggacaggtgcagtgctcccccacgccgatcggccggggcgtcatccccatagcccacagtgggcaccagccgcagcaactcgtccatatccggcgtctcaacactcatagttgcccattcaagtagcacccctccccttggctcagtgcgcagagaacggttctcaataacaactgtgcgctccaacgcacataatcaaacaaacgcacatcgactgaaacactggaatcacgccattttatcggcaaacatgtgcgattggcgcaccgaaaccagcgcacagttgttatcgagaaccgttctctgcgcactgtttcgcgccctcccgctaatatgggggcgttcgaaagggagtttcatggcatcacaccgcaaaccgtccgcgcaaacctacgatccgcgcacggtcaaggagcatatcgtcgagacgccgctgaacgaggagatgagcaaatccttcctcgagtatgcgtattcggtgatttacgcacgcgcactgcccgatgcgcgcgatggcttgaagccggtgcagcgccgcatcgtctaccagatgggcgagatgaacctgactcccgaccgcccgtatatgaagtccgcccgcgtggtgggcgaggtgatgggcaagctccacccgcacggtgattccgcgatctacgaggccatggtgcgcttggcacagccgttcgcgatgcgtctgccgctggtagacggccacggcaacttcggctcgctggatgacggccctgcggcctcccgttacaccgaggccaggcttggcccggcggctctcggcatgaacgcggatatcgatgaggacaccgtcgacttcacgccgaactatgacaacaagctcaaggaaccgaccgtgctgccggccgccatcccaaatctgctggtcaacggcggctcgggcatcgccgtgggcatggccacgaacctggccacccacaatctgggcgaggtggtaaacgccgccaagttcctcatggcgcattcggacgccaccctggaacaactgatgcgttacgtgcccggccccgactggcccaccggcggcacgatcatcggccgcgacggcatccgtgaggcctatgccaacggccgtggtacgctcaccacgcgcgccgccacgcatatcgagcatgtcacggcccgcaagcaggccatcgtggtcaccgagctgccgtacatggtgggcccggagaaggtgatcgagcgtatttccgacggtgtgaagaaccgcaagctggaggggatttccggcgcgttcgatctgaccgatcgtcataacggcacgcgtatcgtcatcgagatcaagaccggtttcgacccgcatgcggtgctggtgcagctgttcaagcacacgccgttgcaggacaattttgccatgaacaacgtggcgctggtggagggccgcccgcacacgatgggcctgaaggagatgcttcaggtgtgggtggaccaccgccgtgtggtgatccgccgccgcagcgaatatcgcaagaagaaggcgctggaacgcctgcacctggtcgagggcctgctgctggccatgctggacatcgacgaggtgatccaggtaatccgcacctcagatgatgcggatgccgcgaaaagccgtttgatggttgtgttcgacctggacgaggtccaggcccagtacatcctcgacctgcgtctgcgccgtctgaccaagatgaaccgcatcgaacttgaggccgaacgcgatgacctgaagaagcgcatcgaggagctgacccgcattctggcctccgccgaagcgctcgaccaggtggtcaccgacgagatggacgaggcggtcgccaagtggggctcgccgcgtcgcaccgtgctgctggacgccgacccggatggcacgttgacgccggtcgtggcgcagggtgccggggcttcgggtgtgtccaagtccgcactcgaagcggtgaaggccgccaccacgatttcctccgccgaagccgatgtggccgcagccgcagccgccgccaagaagaccggcgagcggtccgcgctgaccggagccttgaagatcgaagacgagccgtgcgtggtgatgatgagcgccaccggtttgattgcccgtaccacgccaagcgcgatggacgtgttcaatgtacggtccacatccgatgaacgtctgcgagacgatcaaatcaccacaatcttcgagacctccacgcgcgccacgtacgggctggtcacgtcggccggccgcctggtgctcgcgcatgtggttgatttgcctgccttgcccgctgccgccacattgtcgctgaagggaggagttcaggccgacgaactgatcggcatgaccgaatccaccgatccgattcgtggcgagcgcgtgattacggcgatcgccatggagcagccgacatccggcaaggccagtgccaaggatgagagcgaggatggcggggccgccgaggccaagccgttgccgtcgctggctatcggtacccgtaacggtgtcatcaagcgttggaaccgtgaggcacccaccaccatggattcctggcccgtcattgatctgaaagatggcgacgaagtggtattcgccgccgtggccgaggatgacgaccgtctggtgttcatctcctccgattcctcgctactgacctttgaggcgaagaacgtgcgcccgcagggtcgcaccgcgggcggtatggccggcatcaagctggccgagggcgcccgtgtggcggcattcaacgtggttcccgccggcaaggtggcatggacctatgaggagggcgagaacggtttgacttccggctccggcgcggtggtgctcaccgtggccggcgactccgatgcactacccggcaccgaaaacggcgccgccaaggtcaccccgctggaaatgtaccccaccaagggccgcgctaccggtggcgtacgctcccagcgcttcctcaagggccagaacacgctgattcttgcctgggttggtctctacccgttgcatgcctccacatccgcaggctccccggtcgagcttcccaagcccgatatgcgccgagacggctccggagtggacctcgcctcccccatcgccttcattgcgtaacctcaattaagctccctctgatgggccgagccgtaaagcaaacacccccagtggggtgtttgtaggcgaggagcgaacgatagtgagccaaacacatagagaagagaccctaaacccgacctacactaagcatcaaggaggtggcgatgagactactggttgccgtatccaatgaaccgttggcccgcgccattcgtggtgcgctgcttgcctgtcgtcatgaggtgtccttggcaagcaccggcagtatcgcgctcgccgcggtcaccaaggagctatttgacgcagtgattctcgatgaatccctgctcggcatctccaccgagcaactcatcgaatcccttcacaatgcccgtgcctccgtcaagattctgctgctgacttcgacgccactcagcaaaaccatcggcgaaggcagccgctggcgagcgctgcctgacgagtacgccccgatcgaagagacgccctacagctccttcagcgcggattcacacgcaaacaactcagatgccgaagccgaacagtgcacggacaatgctgccgctagcgcacgagctaatgtacgacacccggatgccgtactgagcaaaccattctccgatggcgaactgctctcatacgtcggctcgcttgccaccgactcccccaccatgatcattcgtggcaatctcacgttggataccacgaatcgcaaagcctactacgcatccacacacaccgcaatttcactgtcccgtctggaatacagtttacttgaagcactggtcaaggctgatggccagtttgtcaacaccagcgaattggtcaagctcgtcggtggcccattcttcgagcaacaagggctcctcaggaacgccctctacacactggataagaagctcacccacgccggcctcatcatgacccaacgcggctccaactaccgcattcgatagctgggctcaatcagtacagccgcatgccttggggaactggggtgaagccggactggtggaggatgcgggcgaaggggtgacgggcgttgaggggttcgccattgatgtcgctgaacgtcacggaaccggtgccattgcgtttgagagcgtaggccagttctgtggcggccttgcgcatttgttcgtcggaatcattggcggcgggttcatggccgaccgattgatcgaacgccgtcaagtgcttggctttggcagccgcgtatagtagcgcaccttgcgcattgagcacgaccgtggctccgatacggcgtgccggtttacccgcaccggcaggcgcgtccggccacgcgatggcggagccactgagatttgcggggtcgagcacactcaatgccaccacggactggccgcgatgctctgacggatgacgcaacgcatccacggtgtcgcgctcggcaaattgggccgcgccgaaaccacggacgaacatgcctcgtaccagtcgaccatgctcctccatgcgctgcaatatcggatacaacgctgagtagccacccgggatattttccttgtcgatcaccggctgcgcgatgacgccatacctgtccagcaacgtctcgaccagtgcgagcgcctgctcggtctgatcagtgtcttcggcttcagcttgcccgattacggcagaccacaaacctcctaacgtcatatccgtagtggctcggtgaatcggagcgacacgcccacgacgacgtgatgtagtggatctacgcgggcttgctgcgcctgcggttaatgcacgtaccggcgcgaagctggaattggtgaccttaccttgccagaccaagctccacaaggcatccttgaactgctgttcgctccactcttgcggaatgatttcaccggtgtttggattgatgtccggctccgcggcctcattccacacacgtttggcggcatccaccagttgacgggcatggaacgctccccctgagtccaatgcggtcagaatcgcttccggcatggtggcgtctgaagcgttcgatgtcgtaccatgttccacaccgctgagcaatattgaatccgccggatagaaagcaacctcaccggggtccatcgcactggttcccccggtttttgagccgacccagaccacatcgccgctggtcagcaactcatccagcaatgcaggttggtagtctcgtactcgtgcggggaataccgccgactcccagagtgcagtgggcagtgctatgccctccagctgctcgataacgcgcatgagcccgtcggcacattcatatcgttcgccgccgaccggcccgataccttgtcggtcgataagaaacatctggaacgcctctggttctactggcttgactgctttacgcgccttggccaatgagcgagaccgaatgcggcggaatacgtccttatggagccactgttggccttgcttgtcatcatctacaaagtggccttgcagcaactcgcctttggcagccagtacatccaaagtatgcacggcatccgtagcatcgaggtgcagatcggccatgagctgatcggcggtgaaaggaccatgggttttggcgtaacgggtcacgcgaccagtcacatcatcgtcggcaagttcattccagaaagtgcgctcccccagttcctgttcgactccgcgaatcacgtccgggttgagcacttgtgccatgtcggtggtgccgagcaagcgttcgagcacgtgcggatcgagagacaacagttgcgcgctgcgctcggcctgaggttggtcatactggtacatcaccacgccgacgaagccaaagagaatgttctcggcaaaaggcgatggcggctcggtctccacgtccttcacggtaatggtgccggcttgcaatccggtcatcacctcgttcagggcgggcatgtcgtatacgtcttgcaaacattcgcgcgcggtttccagcagcagcgggaagttcttgaccatacgtgcggcttgcaggagctgtgcggcgcgcagtcgctgctgccataggggcacgcgacggcccgggtcggatcgcggcatgaacagtgatcgggcggcgcattcgcggaatcgtgcggcgaatagcacggactcgcccacttgacgttctacatctgctttgaggtcttctgggtcgaaaaggaacaggtcttgagcaggaatatgtccgtcaccgtccggtagctgaatgacgataccgtcatcggcggcatatacctgcccatcgaaaccgtagcgttggcgcagtctgcggctgatggccatggaccacggttcgtgaacgcggcggccgaaggggcttaacagtacgatgcgccagccgccgtcttcatcgcgggtccgttccacgatgagggtttggtcgctgggaactgtgccggtgatggcttgttgctcggagagtaggcgggccaggttggtgatagcgttggggtctaggccgtctcggtggagacgggtgaggattgttgggatgaaggttgggacagctggaccttctgcggcagaactccccccagtccgcttcacgtctaatccggcggcgatttctcgggtgaagcgggctatggtacggctgaaaccgtagtcacggccagcgccttcaccgtgccagaacggcagacgggcggtgcggcccggagccggagtcacgaccacacgatcacgggtgatttcctgaatctgccatgtggaggtgccgagcgtaatgacatcgcccacgcgcgattcgtagaccatctcctcatccaactcgccgacgcgacgctggcctttgccggcgtccgcctcaggcaggaccacggtgtacagccctcgatcgggaatcgtaccgccagaggtaacggccactttctgcgaaccgggacgggcggaaatcaggccattatcccgattccataccagtcgcggccggaaggccgagaattcctctctgttgtattcgccggacatcatgccgattacggcatcgaacatgtcacgtggcagttcggcaaacggcgcagcacggagcaccgtggcataccagtcatcagcgttcaaatcgtgcatcgaggcagcggccacggtctgctgggcgagaatatcgagcggattgcgcggcacggccaatggttctatatcgccggcaatcatggcttccagacttgcggccccagtgacgatttgctgacgggtgagcgggtagaacaatgcgtgagagacgccaccgacctgatgatcggcacggcctacacgctgcaatccggaggagaccgacaacggtgtatcgacttgaatcatcaagtcgaccgagcccatatcaatgcctagctccaaactggaggtggccaccacgcagcgcaattcaccacgcttgagccgttcctcaatcattttgcgacggtctttggagaccgacccatgatgagccatggcgatgacatcatcgccctcatgcgagccgacaagcatggtggtggaaccgaccacagcatcgtaatgtgtggagaacccttcgcggccttccggagagcccggatcccgcacagtgtcgggattggtgccatgccgggtctgcgcatagagatcattgaggcgcgcggtgagcttttcggccacaccacgcgaattgacgaacaccaatgtggtgcggtgcgcgagaatctcatccaaaatactgcgttccaccacgggccagatggaaccggaggcacggtcgcccgccgctccaaccaacgcggaggaatcgaacgcatcactcgcatcagaatcgtccccagaagtggaagaaacatctctatcatccaccggcacaatgcccctgcgttcggcaagtcgctgcatggccggcgtgacaccgctgatatgcggagcggaccgttcagcctccacgccaccgacacgctgcttggcattcacggactgcaaatcacgcatgttttccaacggctcaatcatgcgcagatccattgcaggccgcccaccgggattcacgatggtaaccggttgtccgccgcccaggaatcgcgccgcctcttcaggcggattcaccgtagcggatagaccaatgcgctgcatatgaaggtcactgaggccagcaccgatggcggtatcactgccctcatcagcatccgcatcgattgcatctcgcttgcgcgattccgcgacaaggttctccagccgttccagacttaccgccagatgtgcgccgcgcttggtgcccgccactgcatgaatctcatcgacgatcaccgtatcgacagtgccgagaatccgccctgccttcgaagtgagcaacagatacaacgattctggcgtggtaacgaggatatccggtggatgggaggctatgcgccgccgctcctgtgcggtggtgtcgcctgaacgagtggcgaccgcgatcttcggcacgggcagcccttgcgcctcgcattgtgcggcaatgccctccaaaggctgttctaggttcttggccacatcggccgcgagcgcctttaacggcgagatatacagcacacgcacaccggcacgccgcgtgcgtggcacggtcatcagccggtcgatggccgagagaaacgcagccaatgttttgccggagccggtaggtgcgatgaccaagacattacgaccggaatggattgccggccatgcctgagcctgtgcctcggtcggctgaccgacggcatgctcgaaccacaccttggtgggttcggaaaacaggctcagggtttcgtacatatgtacgattataggtcagctgaagtaggcgatgacttcttcggcggtgccgtaggcgctttgggcaccaagcttggtggccgcataggcggagacataggagccgatttgcgcggattgcagcagcgtatggccagcggccaagccagccagcacagttcccatgaacgagtcgccgcaaccggtggtgtccaccgcattgacttgcgcggcggatacgcgatgccaacgtccgttctcgatcaccaccgaccccgacgcaccaagcgtcactatcgcccggtcgaatccgtaatcggtgaatcgttcggcgacctcataccagtcgagtgattccacatcgccgtccggcagacccagtaactgagccacttcatgctggttgaccagcagaatatccgtggcttccaccagttcgtgaggcagctcgtccataaatggcgagtcgttgagcagcacggtcacgccagcgtcatgcgcggtctgtgcggcggcgataacggtggagatcgggctctccaaacacagtcccaataccgcgcattcggcgatggtcgtgcgatgtgattgcacatagccggcacttgccttggcattggaacccggcgaatagacgatggtattctcgccctcagcgctcacggtgattaccgtggtgccgctggggccttcaacgtgcaggatatcggcggtgtcgacgccggcctcatccagcttgcctaataggaagtccgcgttggagtcctcgcccaccgcgcccagcaactggacattgacaccgaggcgagcagcggcagacgcctgattcgcgcctttgccgcccggcaacactttcatggcaccaccattgacggtttcgcctggcttgggcagtcgtttggtggtcacggtgtaatcggcgttcatcgagccgaccacgattaccgagcccggcgcatccttcagcgcttccaatcgttcccgtacgggctcgggcatctgtttatgttcttcttcacttatcaccatgggctccaagcatagtaggcggcgggcccaaatgcgcgcatgatcagccgcgcaacttacgaagacgctcgtgcatggccaccatcagcaccaagagcaccagcaaataccacgggtagagactgattgtcacatattgcgcgatgatgccgaacagtggcggcatgagcagtgagcccacataggcacaggccatctgcacgccgacgacggcctgcgatttgtcttcgccgaagtaggccggcgtcgagtggatgacgcacggataaatcggcgcgcacccgaagccgatgaccaccagcccaacgaccacgccaaggtggtgaggcaatggcacgaacatggtgaggatgccggcgagcaccagcacttggccgaggcgaatcatgaccgggtccttgaatcgcatggtcagaaagccggaaagcgcacgccccacggtgatgcctacatagaataggctggcccagctggcggcggtgatcttgtcgatgccgctgtgcatcaccatgtagctggaggcccacagacccgccgtggattcgatggcgcagtagcagaagaacatcacgaggatttccttggcaccgcgaatggcgagcacgccggccacgccgagcggtttgcgttcagcaacagacgccccttcagcattaccacatccctcggcattgccgtcagatgatgcggcaccatcggtcgattcgccgcccccagtcgtgccacgtttcttccacagcggcaggctcagcaccaggatgacggtcagcatcacctgcaggatcgcgatgtaccgatagccccacggccagccttgcccttgagacagcgcatagcccatgatgtaggggccgaccgatgcgccgacgccccacatgcagtgcagccagctcatatgccggctttcgtagtgaatggctacgtagttattgagcgccgcatccacgccacccgcgccaaggccgtacggtatggcgatggccaacagcacccagtaattcggggcaacggagaaacctgccaaggccgccgcagtcaacgccaccgaaacggcggtgaccttgcctgccccgaatttcaatgtcattcggtccgaaagcaacgccgagacaatcgtgaacatggaaatcaccgcggagatgccgccagcccacgccaccggcacgttcagatcctggctcatggtgggccatgcggacccgagtagcgaatccggcaaccccagactgataaacgccacatagatgacggcaagcaacagactggccatgttccatctcccattcacagtacggcaccggttgtgataacgatgtcatcagtctatcgaatagctcatgggcaacacgcataaaacatatgacaacgtgctcacctcaaacgctaattacggaaattctcggtaagcacgatgtcattatcagcgacgtcttcgatcaggtatcgatcttggagcggtcgaaatcgtcggcgttgtcgacgatgaactgcttgcgcggcggcacgtcgtcgcccatcagcaggctgaagatctcggatgcctgggcggcgtcctccatgcggatgcggcgcagcatgcgcgtgcgcgggtccatggtggtgtccgccagctggtcggcatccatctcgcccagacccttgtatcgctggatgtcgtcgttgtaaccgatgtgcttcttgtcgaggtcggccagtttgccggccagctcgtcatcggaatacgtgtagatgtattcgcccttgtgcgagccggtcaacgcgatgcggtgcagcggcggtactgcggcatacacgtagccgtgttcgataagcggccgcatgtaccggtagaacagcgtcagcaacaggatacggatgtgcgcgccgtccacatcggcatcggtcatcatgatgatcttgtggtagcgcgactgttcgatgtcaaagctctggccggagccggcacccaccacctggatgatggccgcgcattccttgttggagagcatctgcgtaatcgacgccttctgcacgttcagaatcttgcctcgaatcggcagcagcgcttggaaaccggcgttgcgggcggccttggcggtaccgagtgcggaatcaccctcgacgatgaacagttcggccacgtcgtcattgcccggctggcagtcggagagtttggccggcatcgaggcggattcgagcgcgttcttgcggcgcgtgacctccttggccttgcgcgactggatgcgtgcgtgcatttcgccgacgatcttctccagcacgcggccggattgttccttgtatccgcgtttggagccggtgatcatctcgccgaattgcttgtcggtgagccgggtgacgatcggcttgacctgcgcggtgccaagcacgtccttggtctggccttggaactgaggttcggccacgcgtgcggtgaccacggccacgagtccggcttggatgtcgtcgcgctccaccttcatggcggagtccttcatgttcaccttgagcttgcgggcgttgtcttccaccgccttgcgaatctgcttggtgatggcgttcatgaaaccgtccacgtgagtaccgccgccgggcgtctccacgatgttcacgaagctcatgattgtggtgtcgtagccgttgacccatcgcagggcgatgtccacgccgcaggtgcgttcgatttcctgggcgtgcagttcaccgccttcgcccacggcctgggtctcctccttataggtgccctcgccttggatgcgccagatgtcggagatcggctcgcctttggataggaagtcgacgaagtccttgacgccgccggtgtgcaggaattccacgacgcgcgggtgcgcgggctgctcgccgaacgcgccatcgacgacctggtcgccggccgtcagcgagaagtcctcctcggacaggctcccggtactgtcggcttgagcctcggtggagtcgtcgaagagttcggcatcgttggacgagacgtccaaagccggggcctggtcttgcgcaggttcgactgcgtcggcatcaatggcttcggcggtgtcagtcgccgtttccggtacgttttcgtcaacaatggtgattttgagtccgggcaccaggaagctggtctggcgcacgcggtcgatgagctgttcgtatgagaattcggcggttttgttgaaaatctccggatcataccagtagcgaatacgggtaccagtggttttgggagataccttgccgatgatttccagctcggtgggtcggttcttgcgagtgcgcttgaacggggaatcgggagacggattggccgggtcggcatccgtgtatacgccagggtgaccttggtggaaggtcatgtggtgcgtcttgccgtcacgatccacttcgacgtccagtcgggagctcagggcattgaccacggaggagcccacgccgtgcaggccaccgacggcgttataagacgagttgccgaacttggcaccggcatgcagtttggtcagtacgacctccacgccggacaggccggttttcggttccttatccaccggaatgcctcggccattgtccgcgacttccacggaaccgtcggtgtgcagggtgaccacgatatcgttgcagaagccggccaaggcctcatccacggagttatcgatgatctcccacaggcagtgcataagaccctgcgagtcggtggtgccgatgtacatgcccggacgcttgcgcaccgcatccaagccctcaagaacagctaggtccttggcgccgtattcttctttgggcatacagtcctattttctaataatttggctcccctcttcaggggagccttcaacggatggctccgtcgtctgacagcccactgggctgtcaaactcctcgcgcggtcggcctactaagcgggccgaccgtcattgatccaggaagtcgcgcagggtctgcgaacgggacgggtggcgcagcttggacatggtcttggactcgatctgacggatgcgttcacgggtcacgccatacacacggccgatgtcgtccagcgtcttcggctggccgtcttcaaggccatagcgcatcttgatgacgccggcctcacgcggagacagggtttccagcacctgcttgaactgttcctgcagcagggagaaggccacggcgtcggacggagcgatggcgtcggtatcctcaatgaggtcgccgaactcggaatcgccatcctcgccaagcggggtgtgcagggaaatcggttcgcggccgtacttctgcacttcctgcaccttctcaaccggcatgtccagctcgcgggccagctcgtccggcgtaggttcacgccccagatcctgcagcatctggcgctgtacacgggacagcttgttgatcacttcaaccatgtgcacaggcacgcgaatggtgcgggcctgatcagccatggcacgggtgatggcctgacgaatccaccacgtggcgtaggtggagaacttgaagcccttcttccaatcgaacttctcgacggcacgaatcagaccaaggttgccttcctggatcaaatcaaggaagagcatgccacgacccgtgtaacgcttggcgagcgagaccacaagtcgcaggttggcttccagcagatggtccttagccttcttgccgtcggcggcggcccacttgagttcacgcttgcgcttgaactccatgccttcactttcggtgtcgagcaggtgctgggcgtacaggccggcctcgatgcgctcggacaggtcaacttcctgttcggcgttcagcaggctcacacggccgatctgcttcaggtagtccttgaccgggtcggcggttgcgccggccgcgatcacacgacgcttcggattgcccgaagggatgatgttctcttcctcatcatccgtgtcggagaccacgtaggcacccttttccttgggctgctcgggtgccttggacttggcttcttcctcgtcctcgtcgtcttccacatcgtcgtcgtcggcatcgtcctcatcgaggtcttcgtcgtcggcatcgccttcgtcaacgtcgtcaagatcctcgtcgagatcgtcaacgtccaaatcgtcgtcgttgacctcggcatcgtcatcaagcccgtcatcgacctgagtgtcctcgtctttgacgagctcatcgtccttggccttcttcgcggttttcttcgcggcggacttgcgcgtggtctttttcgagggctctgcggacttggacttcttggcagaagtcttgcgcgcggtggtcgtagagctggccttcttcttggtctcggtctcctcgctggactcggctgtctgcttggttgccgtcgtttccttcgtggccaaaactgctccttctgatctctcgccgtgaagtgcatataccacacgggcccacttctggcaagggcaaatcgtcaactatgtgagtaaaccaccctccacggacgattattcccacatcgttgcccgacgtgttgccgatcaccacacgctttccttccgcgcatcgcgcataaaacctcggaaatccgccgtttctgttcattcagcccgagcaccatgccggtgccacgcctcgatcggcggctgagaatatcatcgccgccagcgaacaatcctcatcgagcagcaggcatcgcaaggcgaacaccattgctcgcggatcgcccagccaccataaggtgtaggcgatcacggccaatggttgtatgcagtacggcaccggtgaggcttcggcgatatcgagcaacataccgatgccggcatggcaacgctccttatccggcatcatgccttcatcctcgaatgcgcaagtcagcagctcgcccattcgtgttctcgtacgcgccagatgcggtcgcgccgcgaattccataagccatgacttggggcaacggctttcatcaataaccaacgagagaatcagcgcatcacgaatcgataaggtctcacgcatgcccaccgcaaacgcggccatcgtctctcggcctaggtcggtgttcccggcatcaagacaagacagccattcgtccaatggttcggccacccagtcggcattagcctgttgcgcgcctcgaagtcggcgatcattgcgaaattcctgtgatctcgtctccaactcgtcaaagccaaagggctccgtctgttcggcggcgtgccgtttggcgtgtcggttcttacgcggcttgtgtggcgtgttgttgttcatcatgtcctccttgactaatggtgtgcaatctattggtgtcgtggtgcgcgccgagccgggtagctcatgcgccgagggggtgtgtgcccactatggctgaaaacgccgtatgacgcaggaaaaaacgaccattgtggttctagcttcaaaacccttgattcccaacgttcttgtgttcttcaaaccctgtggataagttattaggcatgtgcacaactgctaacaaccgcgaaatcatcgagccacgcatcattcagttggtgcgggaactgactgccgcccccgccaccgacgaggttgccgacgccctgaaaccggtgatggaacaggttgtgggccaagccgcctcctccagccaaggaggcaaacgactgcgtgcgttgctcgcattggacgccttcgatattcttgccggcgacgtgactcctgatcggcgtgacgccatgatcgacctagcctgcgccattgaagtgtttcagacggccgcactggtgcatgacgacatcatcgacgaatccgatctgcgccggggcaagccttccgcacaccgtgccttggaacaggccgtacacagcggtgccataggccgtggcttgggcctgatgctcggcgacattctggccaccgcctgcattgaaatcacacgccggtccgccagccgtcttcccaacaccgatgccctgaacgaggcgtttcttaccatgcagcgcgaggtggagatcggccagatactggacttggccgtcgagatgaccccactgtccaatcccgaagctctggcgaacgcctcattgaacgtattccgctggaagacagccagttacaccaccatcgccccactgctgcttgcactgctggccgcaggagagagcccggatcaggccaggcattgcgcgttggccgtaggccggccgctcggactggcgttccaactggccgatgacctgttggatgtcgtcggatcaagccgcaataccgggaaacccgttggcggagacattcgagaaggcaaacgcacagtgctgttggctgatgctctgtctgcggcagatacggaggataaggccgatctgattgccatcttcgaagcggattgtcgcaacgacgaccaggtagcccgcaccattgaactgttcacgtcgaccggtgctcttgatcgatcccgcgagcgcatcgctgccctatggggtgagtcccgtaaggcgattgccggtcttgagctgaattccgaagcgcagcgccgtctgaccgaggcttgtgcgcgattcgtccccgaatccttgcgatagtccacaatgcgagccgccgggtcatgagaccatgaacaccggtgaaaacccgtgaaagctatgcgccgatgctccggccgcgtaaccggggccatgtacactgaacatgtttagtcgtgattaaaggaaccgtacgatacaacatgagtgagaacgagcccgcacagatgattgagggacgctaccgcatcgtgcgcaatatcgccgagggtggtatggccaccgtgtatgaggccatcgatgagcgtctggggcgcaccgtggcgattaaggtcatgcacacacaactcgccaaaggcccgcatcgggagcagttcgtcgaacggttccgccgcgaggccaattcggccgcgtccatcgccaacccgcacatcgttcaggtgtatgacaccggcgagttcaatggacttgattttctggtcatggaatatgtgcatggcgtcaatctgcggcatgagatgaacgcccaaggcacattctccgtacgtgagacgctgcgcgtggtcgcggagacgctggatggtctggcttccgcacatcgcgccggcgtggttcaccgtgacatcaagcccgagaacattttgatcaatgatcgcggccatgtgcagatcactgatttcggtctggccaaggccgccagccaggccacattgagctccaccggcatgctattgggcaccgccgcttatctggctcccgaaatgatcgagaacaatcaggccaccgcgcaaggcgacctgtattcggtgggcatcatggcatgggagatgctgaccggcaaggtgccgttcgattcggataatccggtgacgcttgtcttcaagcatgttcatgaggacgtgccgtccgtggccacggtctgtcagggcattgatccgtccgtggcggcgttcatcgcccatctgaccgcgcgtcaggtggatgcccgccccgccgatggcgcggcagcagctgaggaattgagccagttggccgccaaattgccgctggaggcgtggcaataccgtttgcatgccgaacccatcggaggtgatcataccgatgccaccgctgcagcgctggtaggcaatatcgccgagcaggccccgctgaccggcgtacctgccggtgcagcaacgttcgagccgtccgtaccggcgtttttggccgatgatgtcgcaagcaataccgccgataccggtggcgccgcagacgtcaatcctccggctcctccggtcgcccccaccacggcacttgattcgtcgacgctagccgatgcttcggctccccataagacgcaaatcatggcacagtccggcagcgagacacaagtgctgcctcaggccggcgatgccttcacccgagcgcttgccttttccgatgagccggacgtcgcttccaacggcaccgggccaaagaagcagcgcagcaaaaaaccgctcatcatcgtactggtgatcgtgctggtactggctgcaatcggcggaaccgccggctggtggtggtttgccggaccgggcagctattggagtgtgcccaagccggatgacgtgacctgcgatgcgaatgcaagcaccgaatgctcgttggccggcgcggattgggccacgtatgagagcacgttgaaggctctcggcatcccctacaagacgcacaaggaatacagcgacgacgtgacggaaggcaagatcatctcttcttccgtgaacaagaccaaggccgttgtgaacagccgcataagcaagcgagccaatcaggagcttacggtggtggtgtccaagggcgtgcggatgaccaccatcccgaaggatattctcgacgcgaattcggccaatggcaaggacccgttgaacgcgctcaagaaggccggcttcgataatgtcaagcatgacgagtcgaaggatgagtattcgatggacacgccgcagggtgtagcattgacgatctcccctgatcccggtaccacggccaagcacaacgatgaggtgacggttactttgagcaagggaccgatgccggtgaccatgcctaacatcgtcggtaagacccaggatgagatgcaagccgcgctcggcgagttgaagctcacggccaatgtcaccgaacagtacgatgacaaggtcgaggccggtcaagtcatttccgcgtctcaggaagccggagcccagctgaagtggggcgatagcgtggacgtggtgatttccaagggtccggagatggcgacgataccgtccggccttgtcggcaaacaggaaagcgccgtaaccaagacacttgaaggtctcgggttcgaggtgaaaaccgacaaggtgctcggtggcctgttcggcacggtacgtaccgtgaaaagtggcgatacggacctatccaacggcggcaagattcgcttgcgcgatgccaacggcaaccccaccgtcatcaccctcaccatcgtgtgagatttgaatgaggctccctctgacgagggagcctcatttgttaattacttttcggcttcttcagcagcctgctgggccttgagctcggccttgaccttctgggcgtattcgttcacgaattcctgaccgctcattttctggattgcggcggaaacacgatcggtcagcgaacgcaaatcatcatgtgtaatctcatcagccggcttcttcgcaacctcaatcggcttgccgtacaacaccttggtcttgcccttcttgggaatcgacgtgccaatcggctgcagcttgtccgagccgatgatggcggtcggcacaatcgggcaaccggtctcgagcgcaagtcgtgcggcaccggtgtgtcccttgtacagtcgaccgtctgggctgcgcgtgccttcaatgtggataccgaacaggtgcccatcctcgataatctcgcgcgcgtgctcgagtgcgccaagcgacttgctgccaccggaacgatcaaccgggaacacgcccacggacgtgaaccaccacttcttgaacttgcccttcaatcccttgccctcgaagtattcggctttgcccatgaagtgcaccatgcgcgggcaggtaatcggaatcaaagcatcgtcgatcaccgccagatggttggctgcgataatcgcgccaccctctcgaggcacgttattcagtccactgacagcagggctcaaacgatgatgagcaatagggccgagacctttgacgaagaaccagtagagcacttggcattcctcccgcagacgaactagccattggccggtcgcctgattagagtgacagttatgactgagaaccagaatagcaatgccgacggagagcggccaacccccacgccgggcaacggacaggattccgatacttcgtccaagtcgtcgactcccggtgccgccggaccggccacgaatggtgccgatacaccgcaatcgcatgacgcgaacgatttggatgcggcgtgggccgcgttcgaagccgagcatcaggccgacttgcatgacgtggcttcctccaggcaggccaaaaagttcgagaagcaggccaagaaacgcgagaaggaagcactgctttccgtagatgacttggatatcggctcgttcaccgatgatgctcgcccgagccgtggcggcaaaaaaggcaagcagtcaggcccccgtgatttcaccggctccagctggctggataccgataatgtgatggatgcctatgatgatggcggcttcactcccccgaaccctgatcttggtccggtcaaagcatctacggtactgctgacggcgttgctcatcatcggtctcgcaggcgaaacggtgatgatattcgttcccggcttgaacgcgattcctctcttaggtgcgctgctcaatattctcttcgggctgggcgtcattttgggtctgggcggattggtggccaaaatcctcaaccgcaaagaccgcccaggggaccggggcggatactacgacgacggcgcgcgggtctaacgcttggactgggcggtttcgatccacttgttgaacagggcttcagccttgccggagtcgacagcatcctcggccagcttgtaggcctcggcgaagcgctcggccagtgtgccgttgccgaccagattgccgtcagccacgatggcggaggcagcgttgagcagcgcggtggtgcgggacgtaatgtccttgccggccaggaagtccttaaatgcgttggcgttgacgtccggcacgccgcccttgagctggtcgacggtaatcttggcgagacccagatccacggtcgggtcgaactcggtttcggtgaccttgccgtcgcgaatctcccagacggaaaccgggccggtgggggcgagctcatccatgccctcatgcgaagtgtagaccaagccggactgaccacggctggcgtagacggcagccatgatcgggctcaccttgtggttggcgcagccgatggccacgtgtgccgggttggcggggttggtcaacggtcccaggatgttgaagacgcacggaatgccgagcgcggcacgaatcgggcccacgaagcgcatggccgggtggaaggtgcgggcgaacgcgaaggtgatgcccacctcgtcgcccacttcgccgacggcctccggcttcaaatccagcggcaggccgaggtcttcgagcacatcggcggcaccgcacttcgaggatgcagcgcggttgccgtgcttgacgatcttcacgccggctgcagcggcggccacggagcccatggtggacaggttcacggtggcgaagccgtcaccaccggtgcccacgatgtcggtggtctcaccggaaacggtcagcggcacggcgtgggagaccatggccttggcggcaccacgcacctcgtcggcggtcagtcccagctgctgctgcatagcgagcgcggcacccacggcggccggattggcgttaccttgcatcaggtcgtccacgaaccactccgattcctcagcagtaaggtggtctcccccgaccagcttggtgagaatcgacttccatgtgatctcggccatgatgccctccttggcgtttcctacgccgtgtgatgtatgttcgccgctcattgtaatggttcgtcatttcaaggccctgaatcttccatattgcaaaatatggcgctattgctgttttcgtggatgtcggttcgtcgtcgagccgttggtttcgtaagcgtgaggggcgttcccgcgtattctgttttccgaccaaagaaatgaatcacgaagaacgcctgggcaaaagcccattcaccggattgccgaacgtcaaaggcacggttgcagaggatgcgcggatcacggattcgccgccgcgttccgaacccgtgctcgagatccgggtgcgtccacgtgcgggcatgctccgatgctcccgatgcggaaggaggcgccgcgggcatgaccagggcggcggcgtgcggcgtcgtggtcgcttccgtgccgtgggccgagccgggcagccggtccacacgcgatttcgaatcggaacgcgcgtggccgatgagcgtcgcgaaccagaagaccgtaagcggttttccgcacgtcgcgtggcgcgccgccggaagacgccgcccatagggtcgccgaacggttgaaagcgtcgatgccgtctccgttcggcggcctcacgtcgatcggcgtggacgagaccggctaccgcaaaggccacacgtgcatcaccgtcgtcgtcgaccacgaacggcatcgggcgatatgggcgcacgacgggtacggcagggacgtgttcggcctgttcttccaaacgttgacgcccgaacagcgcgcctccatcagggtcgtcgccggggacggggcccggtggatcgactcatgcgtgcatgagtggtgcccgaacgccgaacgcgcgcccgacgggttccacatcgtcagttggacgagcgacgcgcccgacaaagtcaggagacacccgtggaaccaggcgcgccgcgacggggacgagaaatccgtcaagcgcatgcgcggcgtcagatacaccgtcctgaagaaccccggcaagctgaccgacagacggtccgaggcgtccgggaacctgcgggacacggaccccaagggccggcccta

SEQ ID NO: 87 - DNA, 10118 bp, Unknown
  R206_24m  MAG No. k141_10789
caggctgacttggggggagagacccctagagcctcaaatcatccgcatcccatacttctccgccaacgccggaatatccggcacgccatacttggccaccagatccagccatcgttgtttgttctctccgccaaatcgctcggctcgggccgtatacgcctcgacctgcaggaacttcggcggcactgacttgctatggaacttgtcggcgtacatcaccacttcctgctcgagattcatcggcacatagtcggctggtggcaatggcagctcctggcgcaccacatcctcgcgcgtaagtcccacgccggtatggttgcggcagaactgggcgatggactcgtccacgccctcgtcgagcagatactcgtagcccttaagaccgtgcagaatgtagcgtttcttgctgaatttgagcggttcgtcgtcagagccgtcatgcttgaacacgcggtaggtgccgatgtcatgcagcagtccgccgatgagtactaaatgctcgtcgagcagacgcggcggcacatggccgccggtgacgcctgcggtgggcggtacctccgcgtccttcggtaatgtgcagcggcgcgtgaacagcgcgttctgccggcgcacgatctggcagccgatggtcgccacaatcacgcaatgcgtgtgcaccagctcgtacgccgccttggacggcgcgattttgcggtgcaactcgtcgatctgctccagtgtgggaatatatccggtcatgattatcaggtttcgcctcgtacggtcagatttatcttcagattagcgcggcaatgagccgcggcaggattgtcaggagctgattcggacatctcgacatgcctatctccgtttcaaggggctgattcggcatcctcctgaggtctacttccgtttcaaggggctggtgcccaagtatacgcggcgtaaaaacggcggaatgacgttggcatgaagccgtttatactcggggtttggcggatgaccagccccttgaaacggaagtagacctcccggaacacgcaaatcagcccctcgaaatcgaaaaagctcacgatgtttggtatgtatccgaacatcgtgagcttcaagagcctgtgctggtgtgtctggtgtgtattgctaccggacagatcagatcttgaagagtgtgtcggctgcttcggcgatctcgcgtgacgcagtgagcacgataacgcaatgcttcgggtcaccggtgtgcgccagcttggccagcgcggcgaacacggtcacctcgtcatccgcgttcagccctcgtgtcggctcgtcgaggatcagcacttcggcctcggtgctgattgcacgggcgatggccaccaaacgctgctgcaccaaaggcaacgtgccgacggccacgccgctggtggcctcggagaagccgaccttggccagcagttcgcgggcgatcaccggcttgggcttcaggaagttgcggttggacgcattcatggcgtacagcacgttttgttcggcgtcgagattcggttgcacggcgtgcagctgcggtacgatgcccagacggtggccgcgcagttccacgggctcgagctcaacaatgttggcgctcttgttcatcaccgtgccagacaccggcgtggccaaaccgctcatcacgcccatcagcgcgcgacgtttggcgtcggcggtgatgcccgaatcggggtcgtcgctgatcagcagcgcgtatgcgtgtccggagtagcagaagaaattcgcgccatcgaggatgttgaccttgcccttgggaccggcgaccgtcaccttgttcagggcaaaggtcgggtaggtcttgagcagaatgtcgtcggaaccgccgcccaccaacacgcgatcgatacgcgaggccagcgtcatggtgggatcggtcgctttgccctgaggctccgcatgctcggccaatgcgtctttgtgatcggttttggccagtcggagtgtttcgttgacgcgggcggcattgcgctcggtcacttcggcggatgcgttggccgaagcgatggcgtctgcttcggcctcgctggtctcgtcggttgctccggtttcggcagatgccagtgcgctgtaaataccatcgtcaacagtgccttcgtcatcaacgtcatcgaaggtcacgctgaactgcacggagtcagctggaacggattcaatggtgtcgttcgtctcagtctcagaagtcacttcgtcagccgttgcgtcagtggtcttctcgagttcctgatcgttgttcttgtcgctcatgcctgtgcctccgcatcgtcggttgtggtggtcgtcttattggccttgccagcatcatgagcggtggcctcagcagcttcatcggtctcagcagcgccagtggtttcggccgtttcaatcgcctcagtctcgctcacggtgcccccgtcgccatcggcggcgaacagcttgttcgcgctgaagaacgcaaggcgcagggcggcaagaatcgccaggatcaggattgaacccaggccataccagaccatggtccaaatcaggtccgatgtcaccgggatggcatggccggatgccagagcaggtccgatcggcttggcggcgaacgcgcctccgaccagaccaatcacgtagaagggcagggtgacgatgaacacttccagcatgaactgccatcccaaacgcccgcgagtgacgccggacaccagtgccatgccgatctcgtcgtcacgcttgggtgcccacacgcctgacagcacgaggatgagcaacagcacgccgcccacggcaaccaacgcaatggtgccggtcttcgcgcgcgaggatagcgtatccagcggctccagagaagcgttgtaggattccagcgaaggggaagacacctcgtatcccttggcgggcagcttggacttcttgagggtggataccaaggacttgtatgtagcgggatcaccggtgtcgaacaccacgtccagatccggcaccgcccagccggaggcggtcttgtcgttggactgtgggtcgagtccggccttggcgaaggtctgatagttggtgaagatcgcgttctcgcggttgcgggcggccgtcaccggattggcgacggcggattcggatgtgtacttgtagatgccgcgcaccttgagctcggccgtggtctgggcgtccgaggcggccgccaccttgagcgtatcgcccaccttcaggttgttggcggaggcaaacgcttcagagaccagtgcgccggtggtgttcgggttggaggacttgttgtcgtagcttaggtccttgccgtccacgatttcgaaggtaccgaggtcgctggccttggcggcatcctcggtccagaaggctcgccaaatgagctggccgccggtctcatcatcggaggccgagcccagcgatccgccgtccagggccttcaaatcaccgctcacgcgggccggcacggtttcggtaaccgtaaagttcaacgagttggtggccgaccggacgagcgtggcgtattcggtgtatgaggtccacgtcatgtaatgcttggtggaagccgagtccgtagcggagaccttcttccacgtagccgcagtcgggcgaatggccaacgtggccttctgctgatcgtacgcggtggtgtgtgcgttggtatcttcttgaatgatggccagtccggcgactgtgccgaaggtgaccgccaaggtgatgaacgcggtcagggccgtacgtcctttagaacgtgtcagggcccgccaggcgttgctgaggacgaacatctaattgcctctcccgttctcctaagccgaacaaatcaatacggctttaactattgttgcgtttagtgaccgttttcttgcgcaatactgttatactcctcaatgaagtctgagaacattctgacagcgatgtggtggtcatgcggggatttgcacccggtatgggataaaccctcggtctatttcggtggcatcggtacactggcatgagatatgcgtggcgtcacgtgtgctccggcatgtctgcgattccggattcacccggagtccggcatccggaagcgtggcctcgcgccgctggataagagtatgagctgagcagattttcgggcaggataagtatgcgattcacttcagggcattcgagccataaggctgtggggcgtaggagaagccgtcatgccggtaacggaaaatccaatcgctccgcatctacgaatagcgctgcaaatcatcagacgggtcccgtaaacctgaagactccccagcacgtgggtggcgacggccgttcgctgatcagccgtacaccgatatgggcgcgagtggtggttgtactgctgctgacgttgctggccagcgtcacctgtgtgggcacgctctacgcggcatccgtctcgagaatggccacggatgcgcagcgtgtgctgacatccgccgaaagtctggccaattcggcacttggctgcggcagcgataagagtctgtcggacatctcccaagagttggtcaatgccaccaatgatctcaacgaggagctgaacggcccgcagtgggacttcttccgcgaccattcgcgatttggcagcgacatcaccgctgcccgcgaaatgctggcttccgtggatacgctggtcaacggtccgttcactgatctgctgaacctgtccaaacgattgcagggcttctccctgaagaatggctcggtggacgtcagcgccctgatggatatgccggatatcgtcaagcaggcgcataaggatatctcgcagcagctcaccaagctcaacaaggtgccgactccgagcgtcgccaaggtggccaccgtgctcgaatccgaaaaggctgcgctcaagaccgtggattcgatgctcagcgaatacgatggcctcattaacttgctaccgcaactgcttggcgaggacggcaagcgcacgtatctggtgatggtgcagaacccggccgagctgcgttcggcgggcggcatggtgggcaccatcgccgcaatcacggcagataagggcacgattaccatcggtgatttcgccaccacttctggttgggacattcctgagaagccaatggatgctacggtgctgaaggagcgccaggtatttggcgacacttttgaccagtacccggctaccacgaccatcgaccccgaattccagcgtgtggcacagatgaacaaatacatgtggctgtatcagaaaggcaacgaagacgagaacgtagcgggtgtattgtcattcgatcccgtattcctccaggcattgctgggagccacaggcaaggtcaagctttcggacggccgagtgctggatggcaccaccacggtgccgttcttcgcttcagacctgtacacggattacccggacttcgagcagcagaacaacttcgtttccgaagcggctcaagcaattatgaaccacgtgcttggtaacgcgaatgcttccaccgcatccccgctgttgaaggcaatcagagataccagcgctagcggtcatttcaagctatggatggctgatccggatgagcaggaggcgctgattgccaccggacttatcgacgataaggccagtggcgagttgtctgctgacagtcaggtacctgaaaccggcatctatctttcggagctgcagcaaggcaagcaggattggtatctgaagacctccaccacggtcacaaaaacctgcggcgacgcctcggccagccagaatgccctgtattctggcgtgctggataagcgcatcacgacagccgtgcgtaacacgcagctgggtcagtttacggaagatcagctcggtgacgaatacacggtcaccttcaccatgaagaacacgctgactaaggctaaggccgaatcgttgcctgatttcgttaatggcggctcggagaattcagtgctcggtggcatgctgtaccgcgtggtgcttaccgccccgtacggtggcgaaatcaccgctgtgcaggctgatatagattcatggggtaccaacaccgcgagcctgtatgaccgtcagtacattatgttcaaccagcagtggatcgagcccggaaaagaattgacgattgcctataccgttcgggtcagcagcgatgccacacatccactgaacgtggtaaccacgccggtggtgaatgcggatggcgtcgagacgggctccaacggtaaggtgacggatgagtgcccggccgatacgaacggcgccgatggtgcgaacggcgccgatggtgcgaacggcggcaagaacgacgcgcataagggcgcgtcctccgatccctcggccggcctggacaccttggacaagctgaagagccagatcagctgcccggtcgatctgaagtccctgacgggatccatgtgatgaccatgcccgattccgtttccggcgtcgccgtttccgacgccaccgtttccggcgtcgccggcaggccgcgcgacgtgaactacgatctgctgcgcgtggtggcgatgtgcctggtcatcggcgtccacgtgatcaacaactacatgcccgtcaagatggccctcgccggcagcgcggaaacggtgcgatccgtgctgttcgcgttgttcatggtctgcaatccgctgttcattatggtgtcgggccggttcaacctgacattcgatgccgaccggccggtgagcacccactcagcgggccgtctgccgggctctggctctgatgcccggacaggcggcggtgccggccaagccgatcccggtagcctcgcgccgtacgtgcgctactactacaaacgtttcgtctcgctgattgtgccgtatctgctgtatgcgggcggcatgggattcgtcgcctacctggtgatcgatcatcgttcggttggcggcgctgtgtctggaacgttgttcgatctgttctccgggtatgacgattccgtctattggttcgtattcatgctcgccggtttcgtgctggcgacgccgtttctggccgcgatgatgcgcgcgataggccggtcgggtgcctggctgctgatcggtctggccgccgccgtggccgccgccgagcagatctgcaatcttgccggatacccgttgacgttcctgcagtcgttcccctggcggggactgctggtctactatctgttgggattcgtgttggaatactatccgccgtccacgcgggcgcggcgcggcttgtatgcgttggcgccgttcgccctggcttggaccgttgccacgccatatctgttcgccggccagcagatgcaggtcggccgcacgctcacggtctccttcgcggtggtggtggccgcggtgttcctgttcttccggtacgacgtgcatccggcgtcggcgcggctgcgcagggcgatcacctggctggcgggatactcctacacgatctatctggtgcattcgccgctgtccaaggtgctgatcggcccgcggattcccgcgcccacggacggatggtcgtacgcgggcatcagcgtgctgatgttcgcagccacgttgctcgcggcgctgctatttgcggtgattgccgataccgtggtgctcaagcctgtgcagcgtctgctgcggaaggtacggctgtagattcggatgcggcgcgtgaggagcgcggcgttgtgtggcttgcacgacttgcgtgactcgcgcgccgccgcaacccggcaacgcattcgtaagcgcagagtgtgaagatgccgcttaaaaccggaagagccacttcatctgatgagaagccttgaacccgtgtccacatttatgatggagctccacgttgtaatggacgacacagccggatattgcctaaattgctcgtcatgtgtaagcttgcaatacgacgagcgtgggcctgtgggcttatgatcgctgttaggctaggggtcgcttcagcggcccctatgcatttctagctcagctcggttataaaaccgtagtcagttctcttttccaacggataccagaccgctgattggggcataatggcagggcgaataacatcaacgatttttagcacggctttgtctccgtcatttaatttcttggcgctatcgatgccgctcgcacgtccacacatgaaaagagccatgtcaatcatctgcagcccgtacagtatgcgcgaatcctcccactggaaaggcattttgatgcgtgccaaatcagaggggaaatatccttcagtattgccgatcagctgataacgagcaatctgaccttcttgagcagcttggtctgccactttatctgccatgattgacacgtcatcacgttcctgttcggcaatcatattgacacgttccagacaatgttgaagagacacctgatgaggattgtgagcgtgctcgcgatagcgttcctgtagttgcccgacatgcacgccgcgtataaccaatctggcaccgctgtcggccagaattcgcattgctgcgcggtagatacctgccgactgcctgtgcatgcctttcatgcacttccagtcgtccttgtattggaacatgcactgaccgtgaaattcagcgtcacgaggtactccgaatttgtgatgcacctgctccagtaagttgtctaagccgttatcgatgacagctgcttgagctgacgtggcaagcaggcagccgacataatacacgtcatatccgtgccgattgggttcctcatcgcatcgctgcgtatgtgactcatcgatataggccagaagcatgcattctatgctatctcattattcatttggcttctgattttatcgtgtcagttgttttgatagatatggatgatgtggtgaataggattgatatatcgttcggattattgttcatagctaccggattggtttttggcaaagagtggttgttcctcgaaggaacaaaggtcaataagtcgaacgcggcatgggcggccatgatttgcgtcctgcttggactatgtatgctgggcgcgatagtgcctcagctgggtcaggaaaagtacggcgggtcgaaaaatgtttcggaagatgacgcattatccattgatctcaggtctcctaatcatgatggtagaaatcagcgggagtgcaaaggactgggtcgctgaggtggtaataacatatttgcttatccaaggtatgagagatttgtggtacctgtggctggaaaaggataatgagggactccgaaaggatgcttaatggtagggaaggaagaacggtatatcgattcaatcggcttgtcgtatgtggacggataccgattatgcgcttgaggttggtgcgcgtattgagtgtgtggtcgaaccagctgaagatgagtgggggtgtcattgttgacgttcaagaaagcatggcagataccaggtaaatgatttacctaccttcatattttgcggtttgggctgacactaaaagatgggggtgtgactcacggttgcgcccccatcttttagtacgtcgctgtcagtgcctcttgttgtatgcgattttgttggtgtcaatgacgaaagtcttgcggtcgttcttggccatgacgtcgaggatgatgccggcgatgatgagcagcagccccgtgatgaccagcatcaccgcgccgatcagcgtggggaagtgggtgaccacgccggtcttggcgaattcgaaggtgacggtgccgcagagcacaatgccaacgatgccgatgattaggcccaatccgccgaagaaggggaggggcttgtattcgcgaatcatgcggaagatggtgctcatgaccttgatgccgtcacctacggtgtccagcttggacactgagccttcggggcggtcacggtactggattggcatctcgtagagtcgcaggttgttgttcagcgagtggattgtcatctcggtctcgacctcgaagcctcgcgagagtacgggataggtcttgacgaaggtgaagttgaacgcgcggtatccggtcatgatatcggtgacgtgcgcgccgaacagcccgttgatggagccgcgcaccaaacggttgccgaaattgtggaacggacgcttgttctcttggaaataagtggatgagaggcggtctccaatcaccatgtcgtagccgtcgagcaccttggacaccatggcgggtgccgcgtcggccgggtaggtgtcgtcgccgtcggccatgacgtacacgtccgcgtcgatgtcctcgaacatggcccggatcacgttgcccttgccctgg

SEQ ID NO: 88 - DNA, 38837 bp, Unknown
  R206_24m  MAG No. k141_11771
cgacacgaccaaaccgttttcgcaggccgtgaccatcgtctcatacggcaaatagcgtatttcatcgtcagttgcacgggtaaataggggaggagtgctacccttatccgagtaagtgtgacctcaaggaggcaacaatggaagtcggagagatcgctggcctgatcgcggccatcgcgttcgcagtattggccggtttcatgatctatccgctgatcaggctgggcaagatgtttgatcagatatcgcagacggtccgggagtccggtgaacacgccatccccgcgctggacgaaggcgtgaccaccgtcaagcaggtcaacaagtcgcttgaagacgtgaacaagatttccgccgcggcttccaccaccgccaacaacgttggtgcgttgaccgatttgtatggctccttcctcggtaagcccatcatcaagattgcttccaccttctacgcgctgaaaaccacgggtcagtccttccttgcgaagaacgccgcgaagaccaccgtcaacgacaccgccgagaagggggagtgatgttcaaacgcatcttctgggtcggcgtcggcgtggccatcggaatcgttgccgtcaccaaggcacaggcctatgtcaaggccaatacgcctgatgcggcacgccagttcctgcttggccccgatcaggacaatgtgccgatgaaaacactcgaagggttggtcaacgagttcaatgccacccgtcgagcccgcgaggctgagctcaaccgtcagtacatcgagcgcgccaactgacacgcgcatgccgccttgccatctagtcactgaaccagctagaacaaactagtcctcataatccagtctttttccaccaataccaggcgcaactgcgcccattacccaaacaaggagttcatccgctcatgcgcactgcggacatcgccaagcgatacctcgattacttcgccaaacatgatcatctcgtcatgccttcggcatccctgatttccccgaaccccaccacgctgttcaccatcgccggcatggtgccgttcattccctaccttcttggtgagcagaccccgccgaagcgccgtatgacatcgaaccagaagtgcgtgcgtacgctggatatcgatgaggtcggcaagaccacccgccatggcaccttcttccagatgcttggcaacttctccatcggcgactacttcaaggaagaggccatccactacgcctgggagctgctgaccaccccgcaggaccagggcggttacggctttgacccggaaaagctgtgggtcaccacctttaccgacgacgaggaagcccgttccatctggaagaacgagggcttcgatcccgagcacatgcagattttcggcatggaagacaacttctggactaccggcggccctggccccggcggcccctgctccgagatctacgtggatcgcggccccgaatacggccgtgatggcggccctgcggccgacgagacgcgcttcatcgaaatttgggatctcgtgttcgagaactacgaggtcgacaatgtcaagtccaagaccgacctgcacatcgtcggcgagctggcccagaagaacatcgataccggcgccggtctggaacgcttggcctacctgatgcagggcaagcagaacatctacgagaccgatgaggtcttcccggtcattgaggccgccgagcgcctgtccggccgcaagtacggcgaggacgagaccgctgatgtcaagttccgtgtcgtggccgaccacgtgcgttccgcgctgatgattatgtccgatggcgtgcgtccgagcaacgtcggccgtggctacgtgctgcgtcgcctgctgcgtcgcaccgtgcaggccatgcgtgtactcggtgtgaccgatccggtgattcccgagctgctgcctgtctccaaggaggccatggtcgccagctacccggagcttaacgacaccttccacgatgtctccgaagcggcctacggcgaggaagatgcattccgtcgtacgctggagaacggcatcgagattctcgacgtggccgtcaagaaggccaagaagaccgccgacccggtggtctccggttccgacgcattcactctgcatgacacttacggcttcccgatcgagttgaccctcgaaatggccgccgatcagggcgtgaaggtggacgaggccaagttccgcgaactcatggccgagcagaagtcccgcgcacgcgccgacgccctgaagaagcgccacaacgtggacctgtcggtctatgacgacttcaagaagacgctcgccaagccgatcgacttcctcggctacacggacatgtccgcccgtgccaaggtcatcggcatcatgcaggaaggcaagggctccgtgcccgccgtgaccggcccggccaacgtcgaggtcatcctcgaccgcaccccgttctacgcggaggccggcggtcagcttgccgatcagggcgagatcctgtccgacgacggcgccgtgctcgaagtcgacgatgtgcagaagcccatcaaggacctcatcgtccaccagtgccgtctgaccgaaggcacgctggtcgtcggcgccgaagtcaacgccaacatcgacctggcccgccgtggcgccatcgcccgctcgcacaccgccacgcacatggtgcacaaggcgctgcgtgaggagctcggcccgcaggccacccagcgcggctccgaagacgccccgaaccgtctgcgcttcgacttccagtggtccaaggccccggccaagtccgtgatctccgcagtcgaggagcgcgtcaacgacaagctgcgcgacaacctcgccgtgaccaccaaggaaatgaagttcgacgacgccatcgcactcggtgccatgcacctgttcggcgagaagtacggcgacatcgtacgcgtggtctccatcggcgaagacggctggagccgcgagctgtgtggtggtacccacgtggaccacgttggcaagatcggcatggtcaacatcctgtctgaagcctccatcggctccggcgtgcgtcgtgtcgacgccgtcgtgggccagggtgcctatgacttcaacgctcgtgagcacgcgctggtctcccagctgtccgataagctcaacgctcgcccggacgagctcgccgagcgtgtgaacgccctgctcgccaagctcaaggaatccgatcgtcgcttggcctccatgtacgagtcccagctggccgcctcggttccggcgctggttgctgacaccaagaactccgcggccccggtcaaggtggccgtcaagaacgtgggccacttcggcgcggtcgacgccctgcgcaagaccgtgctcgacgtgcgcgcacaactcggtgaagacgcccccgtggtggtggccctcgccggcgtgaacgaggatgacaagccgatggtcgccgtggccaccaacgaggccgcccgcaaggccggcatcaaggccggtgatctggtgcgtggcgcagccaaggtcctcggcggcggtggcggcggcaagccggacttcgcccagggtggcggtgtcgatgcctccaagatcggtgaggccctcgaagcgctcaagcacgaggcgcagaaagcctgattccgccagtggtgtggttaggcgttgatttgggtaatgcccgggtcggactggcactgtccgacccggagcttacctttgcacaccctgctggcaacattcatgttgccggcgactatttctttgctattgacgaggtcctgaacgtcatcgaagacgaacatgtggaccatgtaatcgtcggattgcccctgcagatggacggtacagaaggcaaaagcgccaaaaaagcgcgcaggtgggcggccaatctggagaagaggctgcaagcagagagtgaagacagtgattctacggagtatcagattccgcaggtgtcattgatagatgagagattgacaacagtcagtgcgcatcgtcaactgttcgaggcccataaagcttcgaacaagcacaggccggtggttgaccagcagtcggcagtggtgattttgcagacggcactcgaccgtacccgggagcagtgaggtatcggttatgaccgatgattttaacgagttctttgatgacaacacgcattgggtcgaacaggggtcagaaccaatgcgcgggaccgagccgccagaaccgccgaaatcccgcaaggagatgcgcaagcgacgtgcacagcgcaagcgcaagcgcgtcagtggcattatcatcgctatcgccatcgtcgccctgcttatcggcggcggctatttcggcgtaaccaagctcatcgcatggcgcgacagccggagcaaccagtcgacggccatcgcggactatcggggaccgggctatggcgaggtcgaattcaccgtgagcgagggccaaggcgcggcggagatcgccgataatctgctcaaggccgaagtcatcaagtctactgccgcgttcaccagcgtggtcaacgccaatagcgcgacactctatccgggaacgttcacattgaagaagcatatggccgcatccgatgtgatcgccgttctctccgacaccaaccaagcggcgggcttccttgaggttcatcccggtgaacgtgctaccgatgtgttcgccgacgccgcgaagctttccggcgttgcccaaagcgaattcgacacgattatcaagaacaagggtaaggatattctgcccaatgaagcgggcggtagctttgagggatggctggagccgggaacctacaacgtcaagagcatgaagagcgcttcggaaatcctcaaggccatggtcgataagcgtatcgccaagttggatgaattgggcgtgccgaccggcagtgaccgcgaacgggtgatgatcatcgcctctatcgccgaggccgaggtcaacaaagccgattactacggcaaagtgacgcgagtcatcgagaaccgtttggagcagggcatgtcgttgggcatggattccaccgtggcctatggcaataacgtcaagcccgcgcaggtgaccaccgagatgacccaagacgagtccaacccgtacaacacgtacaagatctccggcctgccgcctacgccgatcagcaatcccggcgatagcgccattcaagcggcactgcaccccgaaagcggcaattggctgtacttctgcacggtcaatctggacaccggcgaaaccaagttcgccgtaaccgccgatgaacatgaccagaatgtggccgaactacgcaagtggcaagccgaaaaccagtagtcatcccgttagcttccctcgccgaggggagctgtccgcaaagcggactgaggggagtgatacgggattaagccccaacaaccaccgccacaatcgcgcccaccaatatcaccggcacatacggcaccttgcccgcatgtgccggtgatgtgcgttgtgggtcgaatcgcgtccacagggcaatccatgtgatgccggcaacgcccatcgccagccaccagaccaccacaggcaacaggccaaacagtccgacagacaatcccataggtatcaaggcggtcacatcgccgaatcccaatgaccgcggcaccagcaacgccaacgcgaactggatcaggcaacatagcacggtgaacaacagcgcctgcaacagcacgaacaggtcgttcgccaccactccatgcgcgaaatcggcggccaactggattaacgcgcccacggccacccatgcgatcggcacccgccgatgacgaacatcctcaatggacagtgcaagcccacatagcagaccgggtagcgtgaacaggtatggcatggcttaacattaacccctagttagacgtacacatagacgtacacacatgaaacgagggaagttatgctgcgttggcagacggcaggggagtctcacggagaagcattggtggccatgattgaagggttgccggccggcgtgcgcattagcacggacgatatcgtttccgcactggcacgccgtcgacttggatatggccgtggggcccgcatgaagttcgagcaagacaaggtccgtctgctgaccggtgtacgccacggtctgaccctcggctcgccggtggccatcgaaatcgccaacaccgaatggccgaagtggaccgaggtcatgagcgccgatgcactcgaccatgacctgccgcgcgaaggccgcaatgcgccgctgagccgcccgcgcccgggccacgccgatctgaccggcatgcgcaagtatggttttgacgacgcccgcccggtactggagcgctccagcgcccgtgagaccgcctcccgtgtggccttgggcgaggtggccaagcagttcctggatcaggcgttcggcatccgcaccgtagcccacgtggtggcgctcggtggcgtgcagaccaaccctgatttgccgttgcccacacctgacgatctggaagcgttggatgcctctcccgtgcgtacgttggataaagaggccgaggtccgtatcatcgaacgcatcaacgaggccaagaaggccgccgatacgttgggcggcgtgattgaagtgctggcttacggtgtgcctgccggcatcggcacgtatgtggagtccgaccgccgactggacgcggctctggcctccgcgattatgggcattcaggcgttcaagggtgtggagatcggcgacggcttcctggaagcctcccgccccggttcgcaggcgcacgatgagatcgtggtcaacgccgacggtcgcatcgaccgtctgtccaaccgcgcaggcggcattgaaggcggtatgtccaatggccaggtgattcgcgtacgcggtgccatgaagccgattccgtccatccccaaggccctgcgtacggtcgacgtgctgaccggcgaatccgcacaagccatcaaccagcgttccgacagcaccgccgtgcctgcggcatccgtggtggccgaggccatggtgcgtctgactttggcgaagtacgcgctggataagttcggtggagacagtgttgccgaaacacggcgcaaccttgagtcgtatctcgcctcgtggccggagcacatgcgctgaacgaagggcgtatggtttcgtgacgactgccgcggaaccatcagcaactgtacccaccaatcgtcgagaggattcgtagattatgaccgcacgcccccgcgccgtcatcatcggcatgatgggagccggcaaaacacgtgtcggtaaggaagtggcgcatatgttgcgtctgccgttcgccgatgccgatgtggagatcgaacgtgaagtgggcatgaagattcccgcctacttcgaggaatacggtgagccggcattccgcgaggtcgaggccgatctcatcgccgatatgcttgaggatttcgacggtatcttttcgctgggcggtggcgctcccatgacgtcctccacccagcatgccctcgcctcctacatcgaccatggcggtcgtgtggtctaccttgatgccgatccggcggaagccatggaacgcgcgaaccgtgggggaggccggcccatgctcaatggcaacgccaactcccgttggaaaaaactgttcaagcagcgtgacccagtattccgcgaggtcgccaacgttcatgtccatacccgggggcttacgcctcagggcgcagcgaagaaagtgattgatatggtatctgagcgagcagtgcatgttaccggaacggcaattgagccgtatgatgtggtcattggcgaaggtgccatgaaccatctggccgatgtgctgggacccaaacccgccaaaatcgcgcttatccacactcagtcggtgcagcgacactccgatcgtgcccgcgctctgttgcgtcagggcggctatgaggtttccgacatcgtgattccggatgccgaacccggcaagaccattaccgtggccaacggcatttgggaacgccttggcaacgaaggtttcacccgatccgatgccgtggtggggcttggcggcggtgccgcaaccgatttggccggtttcgtggctgccacgtggatgcgcggcgtgcgctatgtaaactgcccgacctcgctgctggccatggtcgatgcctccaccggtggcaaaaccggcatcaacaccccgcagggcaagaacctcgtcggctcgttctacacgcctgccggtgtgctggccgacaccaagacgctggctacgctacccaatgacatcttcatcgagggtctcggcgaagtcgccaaatccggtttcatccgcgaccccgaaatcctgcatatcctcgaagaccacgcagctgaactgcgcgctttcgacggctctacattcctcggctcgccgctcgaagacgtggttgccgagctcattgagcgcacggtaaaggtcaaggcctaccacgtctcctccgatttgaaggagaagggtctgcgtgaattcctcaactacgggcacacgatgggccatgccatcgaaaagctcgagcacttccgctggaggcatggcaatgcggtggccgtcggtatggtgtatgccgccgagctggcccatctgatcggttacatcgatcaggatctggttgactatcaccgttcgttgctcgcttcgctgggtctgccgacgtcgtggaatggcagctcgttcgacgacgtgctcgcattgatgcatcgcgacaagaaagcccgtggcaacgaactgcgtttcgtggtcctcgacgagattggtcacgtcgtacacctcgacaacccgcccgccgaagccgtagaagaagcattccgtcgtatccagcagtaattgaacggccgtaggccgtgccgttcgccatcccctcagaaaaagtacttggctcccctctaacggaggtgccccggagtcggatttaccttctacctccctctgatgagggaggtgccccgaaggggcggagggagagaagcacaaacaaaaggagtcccaatgaccaaagtcattgttgtcaatggccctaacctcggacgtctcggcgtccgccagcccgacgtctacggtcgtcaagacctcgacaccctgcgcaagctctgcgccgaatggggcaaggacctcggcctcgaagtcgaggtgcgccagaccgacgacgaagccgaaatggtgcactggatgcaccaagccgccgacgagaaaaccccggtggtcatgaatcccgccgccttcacgcactattcgtatgctctcgccgacgccgcgcacatggtcattgatgagaacctgccgcttatggaagtccatatttccaacccgtccgcccgcgacgagttccgcaagcgttccgtaatcagccctgtggccaccggcaccatcaccggcatgggtttctacggctacaagctcgcgctcgatgctgtggcgcacttgctgagcgaatagaaccaagccctccagccaatcacgggtagcagtcgacgttgcgcccgggattcctgttccgacgaatcggaccagaatcctcgtcctggtgcgccttatggacccgaagtacgccgtgtattcgaccatatgctggccaaggcagaacgagatgggctgcctacgcacgactacaccggccacgtcatgaacacgccgggtcatacacggatgatagagtgaaattccatggttagaagaacacatggtaattctcaagaacacgtcaccaagcatattttcgtcactggcggcgttgtctcctctctcggcaagggcctgaccgcatcttcgctcggtcgtttgctgcgcagccgcggtatccatgttctgcagcaaaagctcgatccgtacatcaacgtcgacccgggcaccatgaacccgttccagcatggtgaggtctacgtgaccgaagacggtgccgaaaccgatctcgacatcggccactacgagcgtttcctcgacgtcttcctgagccagaaggccaacgtcaccaccggtcagatctatcaggaagtgctgcgcaaggagcgcgccggcgaatacctcggccagtgcgtgcaggtcatcccgcacatcaccaacgaaatcaagtctcgtatgcgcgcccaggcttccgatgacgtggatgtgatcatcaccgaaatcggtggtaccgtcggcgacatcgagtcccagcccttccttgaggccgcccgcgaagtgcgtcgcgatctcggcccggacaactgcatgttcgtgcacgtttccctggtgccgtacatttccgccgcccacgagctcaagaccaagcccacccagcactccgtgatgatgctgcgtcaactcggcatctccccggacgccctcgtgctgcgttccgaccgcccgctcaaccagtccatcaaagacaagatctcccagatgtgcgacgtcgatgccgaaggtgtggtcaactgcgtggatgcgccgagcatctacgatgtaccgaagatcctgttcgaagagggccttgatgcttacgtggtgcgtgagctcggcctgccgttccacgatgtcgattgggatgaatgggcagacctgcttgagcgcgtccaccaccccaagcacgaggtcaacatcgccatcgtcggcaagtacatcgatctgccggacgcctacctgtctgtcaccgaggccatcaaggccggcggctttgccaactgggccaaggtcaacgtcaaatgggttgctgccgaccgttgcgaaaccactgaaggcgcggccgccgctctcgacaacgtcgacggcatcgtgatccccggcggctttggcattcgcggcatcgacggcaagatcggcgccctgaagttcgcccgtgaaaccaagctgcccgcccttggcctgtgccttggtctgcagtccatggtcatcgaatactcccgccacgtgctgggcattgaagacgcgaactcttccgagttcgagcccgattgcgccaacccggtgatcgccaccatggaagaacagaaggacatcgtggccggcaagggcgacatgggccacaccatgcgtcttggctcctacccggccgagctggaggaaggctcgctggtcgccgaactgtacggcaccacgcatgtcaccgagcgccaccgccaccgttacgaagtcaacgtggcctacaaggatcgtctgcgtgaaggcggcctgcgcatctccggccagagcccggacggcgagctcaccgagttcgtggaactgccgcaggacgtgcacccgttctatgtggccacccaggctcacccggagttcaagtctcgcccgaccaagccgcacccgctgttcgccggtctggtcaaggcggcgctcggccatcaggcggcccgctgaccgtggatcccgcgcggtcggtccgcgcacgatgaaggcgtgacggcacggcatctcaggatgcttcgccgccacgccttcgccgtttggcgccatccgtgatgccgcatggcccgatggcgcccgcatgtaatcaagcccacagccaatatgcgtcagggcagctagtgtttgcacttgggttctgctaggttttcatagggttaagtgtgatacaaggaaggcaggatggtgaccgaaaacacagcaccaaacgccgccgctgacgtggagatgagccagtatgtggctgatcgtacccgcgtcaacgaggacaagatcaagaaggatgacgagatcatcagccagttcggcgactacaactatggttggcatgattctgatgccgccggcgaagccgcaaaacgaggcattgatgagaacgtcgtacgcgcgatcagcgccgacaaaggcgagccgcagtggatgctcgacatgcgtctgcgtggattcaaggcgttcctcgaaaagcccatgcccgattggggtgtggatctctccggcttcaacgccgacgacttcaagtactacgtcaagccgatcgagaagcaggcgaagtcgtgggaggagctgccggacgacatccgcaacacctacgatcgccttggcatcccggaggcggagaagaaccgcctcgtctccggcgtggctgcccagtacgagtccgaggtgatctacaactccattcgtgaggacctgaagaagcagggtgtgatcttcgtcgacacggacaccgctgtgcgcgaataccctgaactcgtcaagaagtacttcggcaccgtcgtgcccccggaggacaacaagttcggcgccctcaacaccgcggcatggtccggcggctcgttcgtatacgtgccgaagggcgtgcacgtggacatcccgttgcaggcatacttccgcatcaacaccccggccatgggtcagttcgaacgtacgctgatcatcgcggacgaaggctcctacgtgcactacgtggaaggctgcaccgccccgatctggtccgaggactcgctgcacgccgccatcgtcgagatcatcgtcgaaaagcacgcccgcgtgcgctacaccaccgtgcagaactggtcgaacaacgtctacaacctcgtcacccagcgtgcctacgtgcgtgagggtggcacgatggaatgggtcgacggcaacatcggttccaaggccaccatgaagtacccggcctgcatcctcgccgaaccgtacgccaaggcatccaccatgtccctcggcttcgccggcaagggccagtaccaggacacgggcgcgaagatgattcacctcgccccgcacaccagctccaccatcgtcgccaagtccatctcgcgcggcggcggccgctccgcctaccgcggtctggtcaaaatcgtcaagggcgcgtacggttcgtccaactcgaccgtgtgtgatgccctgctggtcgacgacttctcccgctccgatacctacccgcacgtcgatgttcgcgaagacgacgtttcgatggcccacgaagccaccgtttccaagatctccgaagaccagctcttctacctgatgagccgaggactcacggaggaagaggcgcgaggcatgatcgtgcgcggcttcgtcgaaccgatcagccgcgagctgccgatggaatacgcgcttgaactcaacagacttgtggaacttcagatggaaggatcggtgggctgattccgatgaccgacaacacaacacccgtcaaggaaatcaagattccggtcgccgaccccaacgacccgtacgcgattccggccgccatgccgtcctccgtggaccatgccgtgcgttcgttcaacgcaggcgactacccggagcccagccgcaagcaggacgaatggcgctacacgcctatcgagcgcatcaacgagttcttcaccgtgttcaagccttccggcgaaacgcagatcgaagtctccatgattgactgctcgccgttggccgaaggcgcgaagctcagccagatcaagctcggtgagggcctgtccggcactgtgtccaagcccaacgaccgcgtctccgcagtcgaatgggaatccggccacaccgcaaccattctggaactgtccggtgagatcgcccagcccgtgctcgtcaaggtgcacggcgcgggggaggacctcgacgccttccatctggtgatcgccgccgccgacaaggctcatgcggacgtcgtcgtggaacacgacggtgacgcacgactggccgaaggcgtggaaatcaccaccggcaaggactcgcacgtctccaccacgttcgttcaggaatgggccaaaaccgccaagcatgtggccaaccaccgcatccacgtcggcgaaggcgcatccctgcgccactccgtcgtgaccttgggcggcgacatcgtccgcatccgcatggatcaggacttcggcggcgaacagggcgacctcaacatgctcggcatctacttcgtggaccccggcgagcacatcgagcaccgcacgatggtggtacacaaccaccccgactgcaggtcccgcgtggtctacaagggcgcgcttgacggcaagggcgcgcactccacttgggtgggcaacgcgctcatccagcccaccgcccccggcaccgactcctacgagctcaaccgcaatctggtcctgaccccgggtgccatcgccgattccgagccgaacctcgaaatcgaaaacggcaacatcatcggtgccggtcacgcctcttcggtgggccgcttcgacgacgaggaactgttctacctcgaatcccgcggcatccccgaaaccgacgcccgcaagctcgtggtgcgcggcttcttcggcgaactcgtcgaggagatcggcattcccgccatctccgaacatctgatgaccgtgattgaccgccgactggcccgtggcgaaaacgacgccatggcacaggtcctcgaagacaagtaagaacagcatttttaggagcacaacaatgtcaacactcgaaatcaaggacctgcacgtccacgtcgaaaccaaggaaggcatcaagccgatcctgaagggtgccaccctgaccgtccactccggcgaaacccacgccatcatgggccccaacggttccggcaagtccactctcgcctacacgttggccggccaccccaagtacgtggtcgactccggcgaggccctcctcgacggcaaggacatcctcaagatgactccggacgagcgcgccaaggccggcctgttcctggccatgcaatacccggtcgaagtaccgggcgtgtccatgaccaacttcttgcgcaccgccaagaccgaaatcgacggcgaggctcccggtattcgccagtgggccaaggacctgtccgcagccatgaagcgcctcaagatggacccgaagttcgcctcccgttccgtgaacgaaggcttctccggcggtgaaaagaagcgcgccgaagtgctgcagctcgaactgctgaagccgaagttcgccatccttgacgaaaccgactccggcttggacgtggacgccctgcgcatcgtgtccgaaggcgtgaaccgtgccaaggaagccaaccagttcggcatcctcatggtcacgcactacacccgtatcttgaagtacatcaagccggacatcgtgcacgtgttcgccgacggccacttcgtcaagaccggcggccctgagctggccgacgaactcgaagagaacggctacgaccagtacctgcccgaaggcgccgactccgagtccgcactggcctgagtccgtgaccgtgggagcctgacatgccctattctcgacacgctccgggccactcaggccaagtctttacggtcgcgaacaggccatgtccgactcccactcgtttcgtacaattgttacgtaagtaggggaacataatggttgattttaaggagattcggggcgagttcccgattctgaatcaggagattcacgggcacccgctcgtgtacctggattctgcggccacctcgcagaagccgaatgcggtgatcgacgccgaggcgaacttctaccgtacgatcaacgccggcgtgcaccgcggtgcccacgagctggcggcccgtagtaccatggcttttgaagaggcccgtgccaaggtcgccaagctggtcggcgcgaatgcagcggaaggcgaagaagagatcgtcgtcaccggtggtgccacggccggactgaacctgctcgccaccgcattcggcaatgcatcgctgggtcgtgggggagaagccgccaagcgttttgccctgaagccgggcgatgagatcgtcgtctcgcgtgcggaacatcattcagtgctgctgccattccaggagctggcctaccgtaccggtgccaccttcaagtggatcgacctgaccgaggacggccgtgtgcgtacggacaacctcgacgaagtcatcaccgaacgcaccaaggtcgtggccgtcacccacgtgggcaacaccacgggtgccatcaccaacatcgcccctatcatcaagcgtgcgcatgaagtaggttcgatcttcatcttggacgcttgccagtccgtaccgcacctcaaagtcgatttccatgcgcttgatgtggacttcgctgcctggagcgcgcacaagatgtacggtcctaccggcgtcggtttcctgtacggtaagcgcgaactgctcgaagccctgccgccggccaacttcggcggctccatggtcgaactcgcctacatggaccacgaggcccaatacatggcccctccggcccgcttcgaggccggcacccagccggtcgcccaagtggtggccgcaggcgtcgccgccgaatggatgatgaacatcgggctcgagaacatcgaggcccatgagaagaccatcgccgccgaactgctgaagctcggcgacatcgatggcattcgcatcctcggaccgcgcgaaaacgtggaccgcatcggtaccgtggcgttcgacgtggccggcgtgcacccgcacgatgtgggccagttcatcgacgcccagggcatcgcgattcgcgtgggacaccactgcgcccagccggtgcaccgccacttcggcctatacgcatccaaccgtgcctcctccggtgtctacaattcggtcgaagatgcccaagcattggtcgaagcggccaagggcatccgtaagttctttggagtggagtaaaacagaacaccatgaacgaattcggtatgagcggggatgacctcgaacagatgtaccaagaggtcatcctcgaggcgtcaaaacatccgcatggcaaggaatcctttgcgcccaacgcggcggtcgaacagtccgcggacgcggcggccaatgtcaccgtgcaagccagccacgaatactgcacgcccggtgaatcgcaccagttcaacccgacctgcggcgacgaggcgaccatccatgtcgaagtctccgatgacgaaccgcacaccatcaagcgattggtgtgggacggccacggctgctccatttcgcaggccagcctgtcggtgatggtcgatctggtggacggcaaaaccgtggacgaggccatggatctggaacagacattccacaagctgatggaatcgcgcggtgccggtctggacgacgagaacctggaagaaaagctcggcgacgccgtggtattccaaggcgtgtcgaaataccctatgcgcatcaaatgcgctctgctaggctgggaagggctgaaggactccatcgccaaagccctcgctgcaaagaactgaggaaatatgtccaacgataatttggttcccgaaccacagccgtccgttttcgatgccgtcaacggcgtcctgcaggacgaggaggccgctcgccgcgtgatggccaacccggccttggccaagggcttcccgaacggacgcccgatcgagcactctgctgcgtccggcgatgacacctgtgcgtgtggcggtcaccatggcaaatgcggttgccgggatgacgaacagtccgatggcagcgagattccgatcaaggcgattgacgatatcggccgcgccactgccgaagacgtgcgcgaggcactgcatcaggtgattgatccggagcttggcatcgacgtgatcgatttgggtctggtctacggcattgagatcgatgagctaggccgcgccattattacgatgacgctgaccacgccggcctgcccgctgaccgaccttatcgaggacgaatgcgcatccacgctggccggtctggtcgaggagttccgcatcgactggacgtgggacccgcgctggaccatggagcgcatcacgcccgaaggccgcgaccagctcgccgcccttggcttcaacttcgacaacatgccaaagtactgatagcgcttagtaagctccctctgatgagggagctctatacgcgagaaaagccccgcatgatgcggggcttttccaagtctggactggtcaatcagtcatcgacgatggtgttcttcgggacaaccgtaatgccgtccggcgtgacggtgaagccacgggccagatcgtgctcggtatcgatgccgacagtggagttttcggtcaggaccacgttcttgtcgagaatcgccttgtacacgcgggcgcggcggttgatgatcacaccgtcgaacagcacggaatcgacgatctgtgcccacgagtggatacgcacattgggggagagcacggagtggtgcacttcaccgccggagacgatcacaccgggggagacgatcgaatcggtggcgtggcccagacggtcgcggccggcgtgcacgaacttggccggcggcaggttgccggacatcgtgtaaatcggccaatcctggttgtacaggttgaactcgggcacataggcgatcagatccatgtgcgcatcgtagaactgcttaatcgtaccgacgtcgcgccagtaggcgtgatcagtgaccgtggaacccggaatctcgttcgagttgaagtcgtagacgccggcctcgttgcgggaagcgaagtacggggcgatgtcgccgcccatgtcatgcttggtgtcggcagccttctcatcgagagccagagcctcgaacagggccttggtgttggcaacgtagttacccatggaagccagaatctggttcggattgtccggcagaccggtggtggtggccggcttctcctggaagttcctgatcatgttcgggtgatcgggatcgacctcaattacaccgaactggttcgattcctcgatgggctggcggataccggccacggtgaactcggcgccggactcgatgtgctgctgtaccatctgctcgaagtccatgcggtagacgtgatcggcgcccacgatcaccacgatgtccggctggacgtcctcgatgatgttgatggtctggtagatggcgtcggcggagccgaggtaccagtgcttgccgagacgctgctgcgcgggcacaggggagacgtacgagccaagcagcggggagaaacgccagacctgggagatgtggcggtcaagcgagtgagacttgtactgggtgagcaccacgacctgacggtacccggagttcaccagattgctcaacgggaaatcgatcagacgatacacaccaccgaagggaacggcgggcttcgcgcgatcgcgggttaacggcatcaggcgggtcccctcaccacctgcaagcacaatcgacagaatcttgggattcttggccatcgtaactgtcctctctgttactgagcgtctttcgacaccgcactgctgggccggatgcttccttgcattcggtttacatagttaataattgcagaaaaattcgaacatgcaaggctttcgcccccgcgtgccgtgaacttgcgatgaacagtttcgtagatttgtttaaggatccggccttttcggagcgcgtgcgattccttagcgtgtcgcgtagaacgccactgcgctggatgccgccacgttcagactatccacgccgtggctcatcggaatcttcacggtcaaatcggcgcgggcaatcgtatggtgggacaggccgtcgccctcggtgccgaagatcagcgcgagcttgtcgatatgcgtcggatcttcggcaggcgcgtgcagacggcgtgtcagctcgtccaacgaaatcgaacgatcctccaatgccatggccacggtggtgaagcccagcgacttcaactcgtcgatgccctggaacggccagtaatgcttgttttcggtaccgtcgtcgttgaacccggtgatacgggtccacggaatctggaatacggtgcccatcgacacacgagcggctcgtcggtacagcggatcaccgcaggagggtgtggccagcacggcatccacatcgagcgcggctgccgaacgcatcagtgcgcccacattggtgtggtccacgatgttttccattactgccacgcggcgggcgctcctgcagacctcggctacggagggcagcggccagcgtcgcatcgcgcatagggcgccgcgatgcagacgatagccggtcagtcgcttgagctgctcaggtgaggccacgtagacgggaatgtccgtgccccagcgcccgtcgatgaagtcgaaggtgtctttcatgccctccagccaaggttcctcgaccagcagtgacagcggttcgcggtcagcggccagcgcgcggtcgataaccttgggggactcggcgatgaacacgcccttggctggttccaagcgattgcgcaactgcatttcggtgaggctcacatacgcttcgacgcgcgggtcgtcaacggtgtccagtgtgatgaactgcattggtggcctttcgtgtgtgcagataacgaaaaaccccttgcaatgcaaggggtttatctgtgcccgagacgggacttgaacccgtacgcccgtataaaataggcactagcacctcaagctagcgcgtctaccattccgccacccgggcaggtgtcgtttggacaacgagtaaatagcttagcatgaaattacagggatgcaattcgcgcgtgtgcccggcgtgtcgcgtgtagccttgaagtcatgactgatgccctttttcttttcgacccgcaggtcgacgatgtcccggtgaacagcgacgaacttcacgccggctggaagctaaccctgcccgcgcacatcaagcgccatgctgtgcaggctatgcgactcaaggcgggggacagcctgcaactttccgacggcaacggcttgagaatccaggcagtgatggccgatcctgaagccggacttgctgaagttgtggaagtggggcgcgaacccgagccgctcacccgtttggcgctgattcaggcattggcgaaaaccggccatgatgagcaggccatcgatatggctacgcagattggcgtcgaccaagtggtgccatggcaggcggaccgatccattgccaagtggaaggtcggccgtacggacaagaagtggaattcggtactggatgccgccaccgagcagtcgcggcgcgcttttaagccgcaactggaggcgtgcgcgtccagcaaggaggtcgtggccatctgccgcagggcctgcgtgcatggcgatgtggtgattgtgctgcatcaggatgctaccgatacgtggtccggcgtggaggagaaggttacgcagttggtggaacgcacgctccaggacggccggccgcggactgtcagtgtggtggtcgggcctgagggcggcatcagtgagcaggaggtagctgatttcgtcaaggccggagcggtgagctgcgtactggggcacaatattctgagagccgcgacggccggtcctgtagcgttgtcgctgttgtctcgggtgttgggacgttacgagtaacgcccacgcgctaagctggtgcgtagcaacatcaaaccaaggagcatgatgagcgaatccgacgattgcctgttctgcaagatcatcgcagggcagattcccagcagcaaggtctacgaggacgagacgacctacgcattcaacgacatcaaccccaaggccaaggtccacgtgctcgtggtgcccaagaagcactacgccaacgtcgccgaacttgccgccgacgacccgaccgagctggcccacatcgtctccatcgcgcagaacatcgccgacaaggaatttcacggcgcctaccgactggtgttcaacaccggtctcgacgccggccagaccgtcttccacgtgcacgcgcacgtgatgaccggcgaaaagctcgacgagtagtaggggaatatccgcttcgtggcaacgactacacgtaccatcaccatcccgccccaacttgaccccgtcgccgtgctcggcccggttgacgaggtcattcgcgaggtggagcgcgcctttccggacctgacgattatcgtgcgcggcaaccgcgtggcgatcgtctcccgctccaagcagaccgaagcccaggccgcacaggccgaggatttggtcaacaccatcatccaagccgcctacaccgcgcctatggacgccgacaccgtgcgtcgcatgctcgaccagaacgtgctcaagaaccacgtgcgcctcgaacatccaggtcacggcccggtgcatgacaaactggcgcaatcgacctcaaacgaacgcgcccatgcacgttctgccggctcccacgacccgacgtaccgcaagcccacggttcccggcgtcatcacctttgccgccggcgtgccggtccgtgcgaaaaccgccggacaagtggcctacgtgaacgccatcgaatcgcacaccatcaccttcggcattggtcccgcaggcaccggcaagacgtatctggccgtggccaaggctgtgcgtgccttccaggacaagcagattcgccgcatcatccttacgcgcccggccgtggaggccggcgaaagcctcggctttctgcccggcacgctgaacgacaaggttgacccgtatctgcgcccgctgtacgacgcgcttggcgacatgctcggcgccgaccagctcaagcggtacatggacgacggctccatcgaagtggcgccgctcgcctacatgcgcggtcgtacgctgaacgacgcgttcgtgatcctcgacgaggctcagaacaccaccgaacagcagatgaagatgttcctgacccgtctgggcttcaacaccacgatggtcatcaccggtgatatctcgcaggtggacctgaccgtgccgcgctcgggactggccaccatcgaacgcatcctgggcggcatcaacgacatcgcattcgtgcatctcaaaaccgaggacgtggtacgtcaccagctggtcggccagatcgtggccgcctacgaccgtcactccgccatcgccggcgaccaccgcgacatcgaacgcaagggccgccgcaaccataccgacttcgatgcccgccagcaaacggattcaaccaaccaaagtgagacagacgatgagcgttgacgtcaccaatgaaacccagtgggtcatcgaccccaaggtcttctccgatttgggtatttgggtactcgaccagatgcgcgtgagcacccagtccgacctgaccatcatgttcgtggatcccgatcccatcgccgaactgcacatgcgttggatgaacctcgaaggcccgaccgacgtgatgagcttcccgatggacgagctgcgcccaggcgacggcaaaaccgtgatggaaggagtgctcggcgacatcgtcatctgcccgtgggtcgctgcccaacaggctgccgcagccgggcacagcaccatgcaggagatgctattgctcaccatccacggcatcctgcacctgctcggctacgaccacgtgacccccgagcaggagcgccagatgttcggcctgcagcgacagctgctgctcaccttcttcgccctgcgccacgatgccaacgtgcaggccacgctgcccgccggcacacccgacgcgctggccctgtacgacgccgcgcacggtgctggccgcgacctcgattccaaataaacttccaaatcaatcacaccaaattcggattattctataccgttcaaggacattcaaggacaccgaaaaaacattatggagtattccagtaccacgctgatcgccgtcaccgtcattctcgtacttgtggcggccctgttcgtctggctttcgctgaccatggccgccgctgaaggcgccgtggcccgcgtaacgcgagccagcctcaacaatctcatcctcgaggtgcagaccgactccgaagcaagccagttcctcaagatgaagaagatcgacaagattcatcgcgtgcaacggctcatcgccgaccgttacgccaccgccggcagctgtgcgttcttccgcatcgcctgcaatgtgctcgacggcgtactggtgtcttccatcgcatccctgtggggtgcggaactgtgggttgaactgctcgccggattcctgttcgcgattatcgtagccgtggtctccgtactggtccgcccgcgcaccgccggcatgaccaagccggtcgacatcatgatttccaactcgcgcatcgtgtcgttggccaccaagctcacgccgttcgcacgcatcggtggcgacaagtccggttccaaggggccgggccgccgctccaaggactccgatctgtccgatgacgaggagcttgagaagattcagctcgagcagggcaaggccgccatcgaccgactggtggagtccaacgacttcgatccggaagtctccgaaatgttgcgcaacgtgctcaccctgtctgatacgttgactcgcgagatcatggtgccgcgcaccgatatgatctgcatggagcgcgactccacactgtcttccgcgctgaaactgttctcccgctccggtttctcccgcgtgccggtgatcggtgaggatgtggatgacctgatcggcgtggcctatttgaaggacgccgtgcgcgccaccgccttcaacccggcggccatggagcgcacggtcgaatccatcgtccggcagccgctgcttgttcccgaatccaagccggtggacgacctgttccatgagatgcagcgttcccgccaacatgtggccgtggtggtcgatgagtatggcggcatcgccggcatggtgactatcgaggatgccatcgaacagatcgtcggcgagctggaagacgagcacgaccgcacccagcgtaccgagccggagaaaatcggcgacaacaagtggaagatgcccgcccgtacgccgattgccgatctggaggagatcttcgagatcgacattgatgaggacgatgtcgataccgtgtacggcctgctgaccaagattctgggccgcgtgccgattgtcggtgcttcggccgtgacgcgcggtctgcgactgaccgccgtggactccgccggacgccgcaagaaggtgtccaccatcgtcgtcgaaccggcgcacgtcgagggcggcgaggaaaatagcaggacccatgaggaaactgacggcgagcccgtcgaaggcgatgataccgccagcaaggagtgatatgaccgaccagaacaacagcacgaacgacgtcgatgacattgacgtcaccgatgcttccgatgttgccggcgttgccgaagtcgacgcgaccggtgaaacggagaatgtgaccaagcaggacgtgtcgtatcgctccggattcgtggccgtggtgggccgcccgaacgtcggcaaatccacgttgatcaacgcgttgatcggcaagcagatcgccatcgcatcctctcgcccggaaaccacccgtaaggcgattcgcggcatcctgaccgccgaccacgcgcagctcgtgctcgtggacacgcccggtatccaccgcccgcgtacgttgcttggccagcgtctgaacgacgtggtcgacgaatccttggccgatgtggacgtggtggccttcctgctgcccgccgaccaggaaatcggccccggcgacaagcgtattctttcccgactgcgtaccgacttcgccaccaagcgtgaggacggtacgttcaagtggcgcatcccgctgattgccatcgtcaccaagatcgacgagcttggccgtcagcaactcatcaacaagctcatcgaaatcaacgatttcgccgatttctcggacatcgtgccggtgagcgccctgaagcacgacaatctggctgaagtgaagaacgtgctcattgagcacacgcccgagggcccgcagatgtacccggacgatcagatcagcgaggagcgtccggaagacaccatcgccgaactcgtgcgcggtgcgttccttgagaccctggacgacgagctgccgcattcgctggccgtggtggtcgattccatcgactatccggaagacaacgagaccggtcagggctatgacggcaaggcgcaggtcaacgtgtccatttacgtggagcgtgactcacagaagccgatcatcatcggcaagggcgcctcgaacctcacctacgtcaagaagaagctacgcaccccggtcaaccgcatcgtcggccaaaaagccaagctcgacctccacgtcaaggtagccaaaggctggcagtccgaccccaagcaactagaacgcctcggcttctaggaatcggccttcggccggttataacaaagggagattccaatggaatctcccttttgctgtactcgagtcctccttacttcttcttggtgtacatctgggtgttgaggagggtggagtagcgcttgatgaccttggggcgaatcaccttcatggaggcggtcatgaggccgttctcctgggtgaactcctcgggcaggatgatgaacttgcgtacggattcggcgcgggagacgccctcgttggcccgatcgacccactgctgcacttcggcgcgcacggcggcgttccttgccgcgtcctcgagggacatgttctcgtcaagccccttggcggcgagccacgggcgcaacgacttctcgtccaacgtcaccagggcggagatgaacgggcgtttgtcgcccagcaccaacgcctgggagacgatctcgcaacgctggatgacttcctcgatcgggccgggggagacgttcttgccgccggcagtgatgatcagatccttcttgcgcccggtgatgtacaggaagccatcgttgtcgatacggcccagatcgccggtggcataccagccatcttcggtgaacgacagctcagtggcctcgtcgttcttgtgatagcgcgggaacacagcacgacccttgacctgaatttcgccgtcctcggcgatgcgcagggagaatccggggaatgcgatgcccacggaaccagcgtggaacggcgtacccagcgggttgaacgcgcacggtgcggtggtctcggttagaccatagccctcgtatacaggcacacccgcgccacggaagaaagccagcagttccgggtcaagcggggcaccgccggccacaatccacttggcgcgaccgccgagcacttcgcgcagcgaagagtagacaatcggatcgaaggcagcgcggcgagtgcgggtcagtgcacctgccttgccgttggcggagacttccttcatatagttctgcgcagccaccacggcggaggcgaacaccacgcccttggggccgtggccggccttctgggacgcggcgttgtacaccttctccagcacgcgcggcaccacgatcatgagagtgggcttggccacctgcagatcgctgatcagcgtcttgatgccggtggcgatgtagatgcggacgttcgaggagacgacgatgtagttgatggcgcgggcgaaggaatgggcctgcggcaggaacagcaggatggtgtttttcttgtcgtgcagcagatcgggcatgtaggccggcagattcagcgcggtctggcagtagtgctcatgggtcatttccacgcctttcggcgcggccgtggaaccggaggtgtacacgatggagcacaggtcggtcttcttgaccgaatcgatgcgctcgtccagctcctcgtccgagaccgtggtgccgtaggccttgatttcgtccaagccaccggtctcgatggtgatgatgtgctccagggacgggcactcttcgacggacccatccgccttcttacgcatgtccgtgtcctgcacgatcagcagtcgggcatcggagttgttgacgatattgcgaatctgctcggcggaatcggtgtcgtagatggtggcgagcacgccgccgcacgccatgatcgccgcgtcggtcaggtcccagtcgtaggaagttcggcacatgaatgccacggcatcgcccttcttcaggccgtaatgaatcaggcccttggccacggcacgcacgtcagccaggaactcgttggcggtgacggtcacccaatcgttgccggacttgtaggtgtacagcggctcatcgcccatacgttcggcgcggtccgcatacaggtcgtagatggacgtaccttcgtccagcggcggattgccttcggtggaggtggtgagcaggccggtggcggggtcgatgtcggtgacggtcaggtggccgtcgtcccaatcgtcgctgtgaggcaaagcgatattggtctcgaccggcacatcggcgttggacaggtaatcgggctcgtccggggtgtcgtcgtggaccgggtggacgaagtcggatcccaatctgagcgccttacgggtgagattgatagtgtgctgcgtgaaggaattgataaccgacaagtcttgctcctgtaaacctttcagtgtcgtccagccatgaggcgaacgcttctcaaagttcaaattgtaatcgcccaaaccgaactcgtcaccttacgcaaccgtaggattctggcgggttaggggagtgcgtggcaaaatattgcacaggtcccgatattgttgagtaaccgtgagctacgaaacggtgattgtcgataattactgagcggttggttgctgatcgatgccgggtgattgttggacgacttccgagcaattcatccgcaatgcacatggacacattcgtatttctcactaatttcgggttcgtttctgtttcgattggcggaatctcaagtcatggtctttaccttccgactacactttctatgcggataaccatgtccattttgaagtagaacaagaaagggctctcatggcgcaaaacccagaagccaccgtggtgttcggcgttttgaacgaaacgtccgaaacggaatcccgcgtcgcgctgacgccggatatcgtcacccggctgaagaggagcggtgtctcctcgattattgaggccggtgccggcattgccgccgaatacaccgatgaggattacgaaaaggccggtgcgaaggtgaccagccgtgacgaggtgctcgccgaagccgacgcgctcggttttgtggaccgtccgtccgccgagaccgtggccaagctcagggccggccagtgggtcattggcatgctcggttccttcaccgatgccgattacgtggccgcgctcgagaaggccggtctggtgggcatcgccatcgaaaagctaccccgtaagctttccagcgcccagtccatggatgagatgacctctcagaactccgtgatgggctacaaggcagccatcaccgccgccgatgcttacggttccttcctgccgatgatgaccaccgccgccggcacgattcgcccggccaaggcgctggtgctcggtgccggcatcgccggcctgcaggccattggtacgctgaagcgtctaggcgcggtcgtcaccgcgtacgacgtgcgtcccgcctcccagggcgaggtcgagtccctcggcgcgaagttccttgatctgggacttgacttctccaagggccagggcgagggcggttatgcccgcgcgctgagcgccgaagaacaggctcagcagcaggctgccgttgatgagaaggccgccggctttgacatcatcatcaccaccgccaaggtcccgggccgcaagcccccggtgctgctcaccgcagccggcgtcaagggtctcaagcgtggtgccgtgatcgtggactgcgctgcatccgacctcggcggcaacgtcgagggctccgccgtcggcgagcagatcaccgagggcggcgtcaagctgatcggcgctccctacctggcctccggcgtctccacgaccgcatccaacttgctttcgcgcaacgtggccgacatcctcgtgcacttcgtgcgtgacggcaagctcggccaggatctcaccgaagaactcgacgacgcgctggtggttgccggtcgtgccgccgccccggcagctgctgccgatgccgagaagtccgagaagtaaggaagaaggaataccatgcctactctcgtcgtttccattaccctgttcgtcctcgcgctgctcatcggtatcgaggtcatcggcaaggtgcccgccaccctgcacacgccgcttatgtccggcgcgaactccatccacggcatcgtcatcgtcggcgttgtgatcgtggcagccgaagccaatagcccactggcctacgtgttcatcttcctggccgccgtgctgggcaccatgaacgtcgttggtggctacgtggtcaccgaccgcatgcttgagatgttcaagtccagcaagaacgagaagaagggggagtcgaagtaatgacctccgcaaccgttggcgccatcgacatcgtcgcatggttcgtctacctgttctccgccgtcctgttcgtggtcggcctgcacttcatgaactctccgaagaccgcccgcaagggtaaccagatctccgcgttcggcatggtcgtggccgtgctcatggcgttcatcgtgcttttcgccaagggcttcgtgaacattgtcgccgtggtggtgctggtcgtcggcatcctgatcggtgccgtggccggtgtcgtctccgccaagaaggtgaagatgaccgacatgccgcagctggtttccgtgttcaacaccgtgggtggtggcgctgccgcactcgtggccctgaacgacatcctgaccaaggaaggcaccccggacatcgtggtgctcatcaccgctggtctcggtattctcattggttctgtgaccttcaccggctcgctcatcgctgccggcaagctacagggcatcaagtgggtcaagaagctgaacctgccgggcaagggcgtatggaacattctgttcgccgtgctgtctgtcgcctcgctggttatgctgtgcgtccagcccgaacagcgcctgctgtggtcgattctgaccaccgtgttcgccctgtgctacggcctggtgttcgtgattccgatcggcggcgctgatatgccagtggtgatctccgtgctcaacgcatgcactggtactgctgtggccatgtccggtctggcgattgacaacgttgccctgatcgtggccggcgcactcgtcggttccgcaggtgtgaccctgtccatcctcatggctcaggccatgaaccgtccgctgctctccgtcttggccggtggcttcggcggtggtgctgatgccgccgctgctggcgacggtccggaaggcaccatgaaggagaccacgccggacgatctggccgttcagctcgtctacgcgcagaaggtcatcttcgtgcccggcttcggtctggctcaggctcaggcccagcgcgagctcgctgacctcggcgaactgctcaagggccatggcgtggaagtctcctacgccattcacccggtcgcaggccgtatgcctggtcacatgaacgtgctgctggccgaggccaacgtgccctacgaggagctcgtggatctcgatgagatcaacccgcagttcccgcaggccaacgtggctctggtcgtcggcgccaacgatgtgaccaacccggctgctcgccgtcctggcaccccggtttccggtatgccgattctcgacgtcgacaagtcccagaacgtcgtggtcatgaagcgtggccgcggcatgggctatgccggcattcagaacgagctctacttcgaggacaacacccagatgctgttcggtgacgcgaagaagagtctgcagtccgtcatcgccgccgtcaaggaactgctcgcgtaaccattcttggctcccctcacagaggggagccaagctctatatctactacagcccaaacacccgcttaacaaagccgttaacgcgacgccaatagcggtccggatcggtgctggcgctcatcgtgtggtcggcgccgggaatcagcagcttctcgcggtcgatgctggcgcaggcgttgtaattgatgtccagatacttcgggttgacaaaagtatccgctccgccatgaatgaacatcatcggaatagtcgcgtgccgtaatgccttcacacaggaggcgtcctcaaaccggtatccagccttgcgtttagacacatgactggccactttgaccagcagcacggccaacgagtgcggcaaacggaacatcgcctcggcattatccgtaaactgcgagaccacggaactgtatccgcaatcggaaatcgcggcgacgacgttgcgggggagtcgcgcatcgccggccgccatcatcaccgtggcggcgcccatcgaattgccatgcaacagaatgcgtgcatccggatcagctgcggtgatcagcgaaacccagcccaacagatcgtcgctttccagcaatcccatacccacgtaacgcccttcgctcaattcatgggcgcgctgcgcgggtagcaggaccgtaaaaccgagttgcgcatagcgatgcgcccatttggccatttccgcgggctctccggtatagccatggcagcagatcgcgtatagatgcggctgtgggtcggaacaatccgggtccaacagccagccgtggagtttccatccatcatggctgcgcagcgtgaccgattgcttggcctcctcgaaccaccgggtggcctcaagctgctcggacatgtcgaattcgatgcctttcggcgtctcctcgtgcggcatgttgaacatcgaacgtttggccttggtgtccagcgcgaacatgaacatgacgttggcggccgcggctgtgacgccggctccggtggcggctatcgcggcaagtgccgcagccatacccctgacaacgcgagtgtgtgcggcgatgacgtcatggccatcctcattgatgacgtcgtccgaacgagtcatatcaacctcccgatacggtactcaccatcgtacgttatttttcgaaatcatccccaacttcgtgaaagaccgtacactgagtgtcgctgagcgtacggttttcacgaaatggcgaacgatttcgtgaaaaccgtatgatgagaacgggtaagcgtacgttcttcacaaagttagggattatttcgcggaaaccgtacgttgacgtagctgggacggcctatatgcagtgtcatcgaagcatcattacgcaaagtccggggttggcgtatacttgacaattgttgctttggcgagggaagtgtgcatgctgacacatgacacagattccgttatcgactcggcgtatttcactccttgtagggtgtctttcggcgcgtcgtggcgtctgagcgagacagtacgaaacgaagatacaaggagtatccattatggctatcaccattaagcttgagggcgaggcccgttccgagttcggcaagggcgttgctcgtcgtctgcgcgttgccaacaagattccggccaccatctacgccggcggcgaagagcccgccttcgtgaccttgccgatgcgcgagaccaccctggccctgcgtcacaccaacgccctgttcaccatcgccttcgacggcaacaccaagatggccgtcgtcaaggacgtgcagaagaacccggtcaagcgcatcatcgagcacatcgacttcctcgaggtcaaggccggcgagaagatcgacgtcgaggtgccggtgttcgtggaaggcaccccgaagggtgctgccgtggcgttcgtcgacattcaggagctcaaggtccgcgccgacgtcaccaacctgcccgagaagattgtggtcagcgtcgaaggcctgaccgacggcaccaaggtgttcgccaaggatgtcgtcctgcctgagggcgtcgagctggacgtcgaggatccggaagagtccgtcgtcaccgtcgaggtgccggaggatgccaccgagtccaccaccgctccggaagctgctgccgccccggctgacgccgctgctgctccggccgccgacgccaagtgagtcggtcgcttcgatagcgaacaattcagaacataactgaaacgtggaagcccgcagccgttgagaacggtgtgggcttcttcgttttttcaccatgtgaactctgccacacgagtaacacatgggtgtgcaaaagtatgcaacagagttcgcgccacaagcgcacagcacacaccccatatggtggctttcgggccgccaaagtcaagaagaagtagttagtgatgactgaaaacacgcaccacgatccggcagcactcgacaagctcaccgaaccgttcaccgtactgccgaacgacaaccccgcatccgatgagaagcgccagtccctcatcgacaagccggctttcggccaggtgttctccgacaacatgacccacatgacttggaccaagggcgaaggctggtccgaccgccgcgtcgaaccgtacgcaccgctcaagatggacccgggtgcttccgtgctgcactacgcacaggagtgcttcgagggcctcaaggcttaccgtcatgccgacggctccacctggctgttccgcccggatgcgaacgccgagcgtttccagaactccgccaagcgtctgtacctgcctgagctgccgattgacgacttcctcggttccgtggccgcgctggtcaagcgcgacgccaactgggtgccgtcccgccgcgagtacacgctgtacatgcgtccgttcatgttcgcttccgagccgttcctcggcgtgcgcgccccgcaggaggtcgactactgcgtgatcgcctctccgtccggcccgtacttcccgggcggcgtcaagccggtgagcatctgggttgaagacaagtggttccgcaccggccctggcggcactggtttcgccaagtgcggcggcaactacgccgcctccctgctcggcgagtacaagggtgttgagaatggctgcgagcaggtgtgctttgtggacgccgccaccaagacctaccttgaagagctcggtggcatgaacatgatggccgtgcacaaggatggccacgtggagaccccgtccctgaccggcaacattctgccgggcgtgacccgtcgctctctgattcagctgctgcaggacaagggccacgacgtggtcgagaccatgatcgccctcgaccagctgctcgaggacatcaagtccggtgaagtcaccgaggtgttcgcttgcggtaccgccgccatcatcaccccgatcggtcgcttcaagtccgagaagttcgacgtcaccgtcgccgacggcggctccggcaagctcacctgcgaactgcgcgacgagctgctcggcatccagctcggcgaagtcgaggacccgcacaactggatgtggaaggtgtgctgaactagcaccttttgtttccgactaagaccccttagaatgtcaacaattccaaggggtcttggcgtattggaaatgttcctggctagagaggtacagatggatttagcaacatttcgcaacaaataatatgatttaggtcttctgcacgttgcgggggttggttatggttcatccagatgagaacaggagcaaacctatgagcaagatgagtgacatgacggaatactatgcttcagcctaccgtttgccgtcaggcttcgagcattgctcgaaactgaagccggtggcagaggcagcgacggcgttgcgtcggtggtgagacaagacatgagcttctggcgacgctgggggatgttcaatgtcagtaatggttcaaggtttggactgctgacgtcgctgagacagcttagcgtcgttaacgggtcaggttctggcgatcaaacgacggtaaaaaggggcttagcgtcgttagctgtacataagttggcacggcaacgacactggagcgcgtgatcgtcggtgccgtgccaaactttggccaacctccgacaaatgagaaggactaacgtcggtggctgctcaaagtttggcgcgctggcgacgctgtaagaaaaaaagtgtggagtcgaaccggcaatagcatttattcggtttgttctctagtccaattgcgtcaggcaaggcctgttgtaggctcgggtacgacgggctgtagcgccgaataaggatgaacgggaacagaacgaagacggactgagatgaaccgaagcggtaccagaggggagcggctcatgcaggtggtgttggagaacaacatcgtttttgtggtcatcgagtatttagcaatcctgtgttggggattgtcgggcggacttgccgccattcgcaagggctacgacatcttcaccatcatgctgtgcggatggcttaccgcactcggcggcggtcttgtgcgcgacgtgatgctcggtgccctgccgccggtcggcatcaccgacaaaggctatgtgctcaccacgctgttttccggcattatcgtggtggtggcccacccggagatcaccaaactcaaatggacgatgactgtcatcgatgctctgggcctcggactattcgcagtcagcggcaccgcaaaagctctggcctacggttcctcaggcatgacagccgtattccttggcatgttcacagcactggccggcggcctcattcgtgacatcttcatcggcgatgtgccaatgattattcgagacaaacacctctatgccgtgccctcgttcatcggttgcattctgaccgtgcttgtatggcgtggtgtgcactacggttggttcgacatgtgctcggaaatgctgctcgacgtgctgatcgtcatcatcgtggtggcgctgcgcctgctctcggtcggcttcaacgtcaccttgcccggagccgtcgagcgtcatcgcgtctacctgcccagcgaaagccgatatctcaagcgcccggtcatccatccgcacgccgataccgtcgatcccggcgataccaccaaggacgaagaagacaagcctcaggatgattcaagaccgcctcagggctaactgccttcaaagaggtacatttggccttctgcaaaatgacaactgctttcaaagaggtacctgaagcacgaaacgtcgagtataagcgttgcaatgacggcgtttatacttgggctttctcggattcggtacctttctgaacggagatgtcatttcgcaagaccgccaatgtacctctttgaacggagatataaaaagtcccgcaagccagatgacttgcgggacttgctaaaaccttaagaggcttatgctcacagagcgttgatcgcaacagcgaggccggacttgcggttggcggcctggttcttgtggatcacgccagcgccagcagccttgtcgagcttctgggcggcaaccttgtaggcggcctcggcggcagccttgtcaccggcggcgatggcttcgcgggtggcgcggatggcggtcttcaggccggacttcacagccacgttgcgaaggtgcgccttctcattggtgagcacgcgcttcttctgcgacttaatgtttgccacgtttactccaaacgatgtgtgttataaggacatacaaaaggtagaggatagcatgagccccggaaaaacccgcgcaatgccacgccgaatacagtccctcggctacactaggtgaagtttgagtatatgccaagaggaggaatgcgttggtcgtccaacacaatcagccgggttccacggatcagtcggtgattcgcaacttctgtatcatcgcgcacatcgaccacggcaagtcgaccgtggccgaccgcatcctgcagttaagcggcattgtgcccgagcgcgagatgcgcgatcgcttcctcgaccgtatggatatcgagcaggagcgcggcatcaccatcaaatcccaggccgtgcgcgtgccatggacctttgacggcaccgaatacacgctcggtatgatcgacacccccggccacgtggacttcacctatgaggtgtcccgcgcactggccgcctgcgaaggcgcggtgctgctcgtcgacgctacccagggcatcgaggcgcagactctgtctaacctgtacatggccatcgaccatgatctggccatcattcccgtgctcaacaagatcgacctgccgtccgccgagccggacaagcatgccgaggagatcgcaggtctgatcggctgcgagccgagcgacgtgctgcgcgtctccggcaaaaccggcgaaggcgtggccgacctgctcgaccagattgtcatggacgtgcccgccccgcacggcgaccccgaggcccctgcccgcgcgctgatcttcgactccgtctacgatccctaccgcggcatcgtcacctacatccgtatggaggacggcgaactgcacgaccgcgaaaaggtccacatgatgggcattggcatgacccacgatcccatcgagatcggtgtgatcagccccgatatgacccgtaccaaggcactcggtgccggggaggtcggctacatcgtcaccggtgcgaaagatgtgagtcagtccaaggtgggcgacaccctgacctcggccgtccgcccggccaccgagccgctgcccggctaccgcgaccccaagccgatggtctacgccggtttgttcccgatcgacaacgcgcagttccccgaactgcgcgacgcgctcgacaagctcaagctcaacgacgccgccctgatctacacgccggaaacctccgtggctctgggtttcggcttccgctgcggcttcctgggtctgttgcacatggaaatagtcaacgaacgactgtcacgcgaattcggcctcgaccttatccagaccgctccgaacgtcacctacgacgtgaccgccgaggatggcagtcagcatcatgtgaccaacccgagcgaattcccggacggcaagatcaagaagatcgtcgagccgatggttgccgccgacatcatcacacccaaggaatttatcggtgcggtgatggatctgtgccaggaccaccgcggcattatgggcacgatggagtacatctccaccgatcgtgtcgagatgcactaccgcattccactggccgaaatcgtgttcgacttcttcgaccagctcaagtcccgcaccaagggctacgcttccctcgattaccatgaggatggcgagcagtccgccgatttggtcaaggtggacatccttattcagggcgagaaggtcgatgcgttcagtgccatcgttcaccgcgataaggcgtattcgtacggtgtgatgatgaccaagaaattgcgtagtctgattcctcgccaacagtttgagattccgattcaggccgcaatcggttcgcgtatcatcgcgcgtgagaacattcgtgcgttgcgcaaggacgtgctcgccaagtgctatggcggcgacatcacccgtaagcgtaagctgctcgaaaagcagaaggccggcaagaagcgtatgaagatgctcggccatgtggaggtaccgcaggaggcgttcatcgccgccctgtccaccggcgaggactccaacgaccgcgacaccaaagacaagatccgcgccgctcagaagaccgagggctagtgttcgaggtctacatccacgtcccgttctgcttgcggcgctgcggttactgcgacttcaaca

SEQ ID NO: 89 - DNA, 15088 bp, Unknown
  R206_24m  MAG No. k141_11866
gaggcgctgcgcgatcaggtggccatggtgttgcagaagaacgtgctgttctccggcactattgccgaaaacctgcgctggggcaacccgaacgccaccgatgaagagattcgccatgccgcgcagctcgcgcaggccgatggattcgttcaggaattccccgacaagtacgacacgtacatcgagcagggcggtaccaatgtgtccggcggacagcgccagcgcctgtgcatcgcccgtgcgctgctgaagaagccgaagattctgatcctcgacgattcgaccagcgccgtcgataccaagacggacaagctgatccgcgccgcattccacaacgagatcccggacaccacgaagattatcatcgcccagcgcgtggcctccgtgcaggaatccgacatgattcttgtcatggattccggccgtatcatggcctccggcacgcacgaggaactgctcaccacttgcgacgaataccgttccatttacgaatcccagaccaagagccaggctaagcccgaagaactggccgctgccggacaggctgctgagtcatctaccgctgagccgtccgaaaccgtgacggtgacagtgaccatgcccacggccgataccagcgcagctgataccaatgcagccgataccaaggaaggagaagcacgatgagcaacgaccagagtttcaagaatcgcaagcctgacatgggcaaagccgaccccggaaccatcaagcgcatcttcagctacatcttccaatacaaattgcgcgttatcgccatcgtagtgtgcatcctgatcggtgccgccgcgcaggccggatccgcgctgttcctccaatcgctgattgacacctacatcctgccgatggtgggggaatcgaaccccgactgggctccgttgctgcgcgccatcagtctgatgggctgcctgtatgtggccggtatcgtggcatcctgggcttggcagtggctgatcatcaccgttgaacagggcacgctcaagaagattcgtgacgatatgttcgcccaccaacagaagctgccgatccgctacttcgacagccacgagcacggcgacatcatgagccactacaccaacgacaccgatacgctgcgccaggccatctcgcagtcgttcccgcagatgttctcctcgattatctccgcgattgcggcattgctgtccatgctgtggctgtcaatcccgttcactgcgttcgtgattgtgttcaccgttctgctgtatttcatcgtgcgcaagatcgtgagccgttccggccgctacttcgtcaagcagcagcagtggatcggcgacgtgaacgccttcgtggaggagtccgtcaatggtcagaaggtcatcaaggtcttcaaccatgaggatgccactcagaagaccttcgatgagaagaacgaggaactctttgaggcgtccgccgaggcgaacacttggggtaatgtgaccatgccggtcgtcggcaatatgggctatctgctctacatcctgctcgccatcgtcggtgccgccgtttcgctggccggcgtcaatgacatcggtctgaccggtgtcaagccgctcaccctcggcacgctcgtctccctgctgaccttgtcccgctcgttcatcaacccgatcggccaggtctcccagcagctgaccatggtgatgatggcgctcgccggcgcctcccgcatcttcaagttgatggacgaacccatcgaggaagacaagggcaccgtgacgctcgtgaacgtggaacttgggccggacggccgcaccatgaccgaagtcgaccatgagaccggccactgggcgtggaagcgtgagatcggcgacgatggtacgaggtctctgaaggccgccgaaaagctgcgcggttccgcctgcgaggtggcgatgaaggccaaggagcaggcgatcacctcgcctgatgggcgttatacgctgctgcgcggcgacgtgcgcttcaccaacgtgaccttcggctacaacccggacaagccggtgctgcacgacatcacctggttcgccaagcccggccagaagatcgcgctcgtcggcgccaccggtgccggcaagaccaccgtgaccaacctcatcaaccggttctacgatatccagcaaggtcagattctgtatgatggcatctccgtggccggcatcaagaagcctgatttgcgcaggtctttgggcattgtgttgcaggacgtgaacctgttcaccggtaccgtgatggacaacattcgttatggccgtctgaacgccactgatgaggaatgcattgaggccgcgcgtctggtcaatgcggacagcttcatccgtatgctgcccgagggatacaacacggtgcttgagggtgatggatccggcctgtcccaaggtcagcgccagctgatttccatcgcccgcgccgcggtggccgatccgcccgcgctgattctcgatgaggccacgtcttccatcgatacccgtaccgaggaagtcgtgcaggccggcatggataacctgatgaagggccgtacggtcttcgtcatcgcccatcgtctgtccaccgtacgcaactccgacgtgatcatggtgctcgaccacggcaacatcatcgagcgtggcccgcatgacgagctgatcgcgcaaaagggcgagtactatcagctctacaccggcgcggtggagctggagtagtcggtacgcctgcaaaaaccgcacctcgattatcgggttgaagtaattcttatccggtagttgggggcgcggttttctatgttgagagccgtgtgttggcgcaggattgcgaatattggcggtgaaaagggtacatttgaattgttgttttgacgatgtatcggccgcaaggaggggactatggcgttcgtgacgttgaaggatgtcgctcaacgtgccggtgtgtcggctgctgccgtctcccaaatacttcacaataaaggccgcttttctagcgatacgcgacagttggtgctgaaaactgttgaggaaatggggtatgtgcccgatcaacgtgctcgctccatgcgctcgtcggatactaagactgttggtttgctggttcctgatttgcgcaatccgtatttcgccgatttggtctcgtcaatggaggatgagttgtatgcccggggctattccacgctgattggtacttcagcagaaacagtggaacgccaggatgcgtttattggcaatctgctcgggcagcgtattgatggtgcgatcgtggtgccgcaaggtgtggagtcacccggggtgcagtcgttgattaaacgtaatttgccattggtgttcgtggatcggcgtgtgccgggcgtcgaatcggtgccgtttgtggtttccaatccgtatacgggcattcgcgaggcggtagaggaattggtacgtttgggacaccgttgcgtgggatatgtgtcgcatccctcattagggtcgttcagcgtcaacgaacgagagaccgcattccgtgcggttgcgtcggatatgcttatcgagggtaacggcgtggtagtcgcttgcgactccacttatgaatcgcgtacggcagcggttgagtcgttgcttgatgccggcgtaagcgcgatgctgtgcgcatactcgccggatgcgctcacgatgattggtgtgctgcacgaccgtggggtttcgataggtgaggatatgtcgctggtgtcgttcgatgacattgcggcgttcaccttgatgacaccgcgtatcgcggtggtttcccaacaggccgagctgatggggcggcagggcgtggatttgctgctgtgccgtattcgctctggtgcttcggatgagggcgtcacccattccgtgcccacgatgttcatcaaccgcgggtctgtgaagcagggcccctccgcagccgtcgccggctgattgtttcagtattttcctgcttctactacttctttgtccgtatgcgtgacacgcagaagactatattttgacaacgatgatttaacgttttatcattactcccatcacttgataaaacgttaaatcttgtgacggcgacaaggcctcggcttggtcgtgaggagacggtcatggaagacgtctccgatttttcggcaaggaagctgatggaaaggaacatcatgaagaagatcattctcgatttggataccggcattgacgacaccttggcattgtcatacatccttggatccgaagacgcggaactgattggtattaccggtacctatggcaatgtgttgttggaaacgggtatccgtaatgatttgaatttgctggaaatgtacggacgaccagatatcccggtgtttaagggtgtgccgcatcccagtgatgcggattctttcgaggtgcctgacagttcaggcatttttcacggtcgcaatggcaccggcaatgttgaggtgcctgcaacggcaacacgtcaggcgtctgataagtcggcagtcgatttcattatcgaatccgctcgcaagtacagcaaagaagagcttgtctatgtgccaactggtccctcgaccaatattgacgccgcattcgtcaaagcacccgatattgttgacaagctcaccatcgtcatgatgggaggggcgctgacgcagccgggcaactgcaacccctacatggaagctaatatttccatggatcccaaggcctctaatcgcatgttctccacttcggccgacatcacgatgattggtcttgatgtgaccatgcaggcattgatgaccaagaaagatacgcaggctctacgcgatgtcggcactaaggccggtgcatttcttgccgacatgactgattactacatcgatatcagtgaggaaactgatcctgcattccagggcggatgcaacctgcatgacccattggctgctgctgtggcccttgatccgacactagttacgactttcccgattgaccttatggtcgagactgaaggcccgagcattgggcgtaccatcggcgatccgacaagattattgagccagccgaagaacaccaaagtagctcttggcgtagatgctgaacgatttacttcgcaattcatggaacgactgctgaagcttgccgccaccgtcgattgaatcactaagaaaaaaaggagaattgtaatgacggaacaaatacagtcggttgcttctattgatgattttgaagccaaccgagcaaagaccaaaaaagcactgcctgcactgctgattgttttcactttgggaacactgatgattcaggcattcaatctggtgttccaaaacattggtgattcgctcggcatgtcatcaagtgcctcactgatcagcacactaccaggcatcgttcttggtgtggtgtgcatgctgtatggcacattgtgcgacttcatatccccgaagcgtatgacgctatttggcgtagttgcattagttgccggtagctttttggggttctttggctcgttcaacttctgggtcgtgctcatcgcacgtatgattcaggttgctggtgcacaagttgctggttctgtgttcctggtgatgacagtcaaatatctgaatgacaaggaaaaggccatctacattggcatttacaatgctgtgtattatttggccgctgctatcggtgtgtttgcgggaggcttcatcacctctttcgattggaagtacctgttccttgtgccggcgttatctgtgttctttattcctctgctgattaagaacactccagacatcagtgccaagggcgagaagatagattccattggcgttctgttgtttgcggtatttgctgcgctcattgccatttacttctcgttccccggagtcggcatgattattgcctcgattgtattcgctgtactgtttgtgctgtggatttggaaaggcaagaatccgttcctgggtcgttctttcgtgaccaatggtgcgtatatgtccattctgctgctgcaatttgtgctgtacttcttcaactttgcttgtgtgccgatttacaacgtgattggtgagcagatctacaacgtgccgttgaccacggtttcgctgtgtctaacattggtctacattgtggccacaattgttggatgcgtttctggtccagtaatcaacagactcggacgcatgcgcacactggttatcgctatcgtgctcatgattgtcggcttcgcaggatctgccatattcattaagagtgggttcggagtgctgacttttcttgcctgcttgttcattgctggtgttaccgctgtatatacgccaatctacgacgctgcgtcagatgcgttgccggtcgaggagaatggtcgtggcgtaggaattctcgatctgatgatgaacacttcggcctctatcggagtcggcgtatactccagtctcatggccagtgacaccatgggcaagggtggtctgttcggtgttggcagtggtgtggaagcgcagacctccaacatgttctggattatgtgtgcggtttcggtgttgtcgatgattgtactgttcgtatttcgcaagagttttacggcaaaacgcaatgtctgattgcgccagctggtgcggagcatgttgatcgaacagactaccgcaccagcagcatctatcattcagaaagggaatatcatgcctgctatggatgaaacgcttgtttctcttgattgcattcatggggccgtgtccgtcgttggctcgatgaatgccgattataccgtcaccaccgagcgtctgcccaaaccgggggagacagtgctaggagggccgttgcgggtgcttcctggtggcaagtcggggaatcaggctgtttcggccgctcgtcttggagccaaagtccgattgtttggtgtgctcggttccgacgctaatgcggattttttgcttgaagcattgaacgataccggtgtggacaccagttatattcggcacgtggatggggccagcgggaccacggtcatcaccgtagacgcggcaggagagaacacgattgtttattctcccggctctaacgcttacgtcagtgttgagtatattcaatcgatgcgggataatctgacctcagccgatgtactgggactgtgtttggagagtccgatggaaacggtcacggcatgcgctcgcctctgccatgatgccgggctcaaggtattgctcaacgattcgccattcgttgctgaactacccgctgaacttatcgaggcttcggacattctgctggtcaatgaacatgaaatggcacagctgttgggcattgccgagcctgacgatgacgattgggatggactggactggtctgatgtggcgcggcagatgcatgacttcggctttaatcaggcggtaattacgcttggcggggatgggtcggtggtcatcgatggtgatgatatctatcgtattgcgccagttgcggttgcggccatcgacactaccgggtgcggagatgcctttatgggcacggttctggccggacttgcctcgggtcatgcgttggcggacagtgcgcagttggcctcgtacgtttccgcgtacgccgcgactggggtcggtgcgcaagcctcttatggtactgctgctcagattcgtgagcggtttggtacgaattgattactgagaagtgtggagtattgccggccgtgaattggtgcagacctaacacgttcatttaggcgctatgcagtgtcgaatgttctcggcgcggattttacgaagtattgtcagcaaatgcatcaaggcaatggcggcggtctgggcgggactacggccacgcataacagtatcgagtactcgaatgagtcctatgacgcgaaaactcggaccgtgacgatgcatgccgttatcgactggagtgatccgtaccgattcggggattcgaccggcagttttactgcgccggacatcaccgttgtctttgacaagtccgggaaaatccagcgcattgactccacggtctggggattcccgcctgcccgataattatcggagggcctgaaacatgcacgttctcatcagcgctgcggattgacgatgctgcaaccatacggcgtcatacccgcatgacgtgagttacactatgtagtaaagttatttactgaaatactgcgtattgttacgtactgaggcgtggaaggctcaactatggtcacgatgaaggaaatcgcacagaaatcaggcttctcgcaggccacggtatcccggctgctcaatggggacccgacattgtctgtcaaagaggagacgcgacgtcgcatcatcgaggtcagcgagcagcttggctacgctaccggatcacgccgtatcgcattgccacgccgtgtggccgtactcgacaacgccacccgcgaggaagaactggcggacgcctatttcgatgaactacggtccgtgctcggcgacaatgccagagcccagcacatggaactcacgtcgttttcccatatcgacgatctgattgccgacgccggtgatttcgacggcttcatctccatcggaccgtccgtactctcttcggatagactgttgaagctccatctggtattgccctatggcgtattcatcgacaccaatcctgcgcccagcctgttcgattcggtacaaccggatttaagccaaaccattttggacgcattggatatgttggtgtcctcgggcaaacgacgcatcggctatatcggcggtactggcttcacgatgggtttgcacgaatatccggaagacggccgattaaccgcattccgcaattggaccgagcgtttggggctggatgcggaaggcctgatttacgcgcaaggcgcgttcactgtggacaccgggcgcactctaggggaggaagcggttaacgatcatcgagatgacatgccggatgcgttcatcgtggctgcggactcgattgcagtcggcgtactgcaggcgtttaccgctgcgggagtgctggtgcctcgcgataccagtgtgatcagtatcaataaccaggccatcgcccagtacacttcgccgacattgaccagttacgatatcgaccagaatgagctggccgatactgcgattacgatgcttgccgaggccatctccagtcggcgcacgctgcaccaccataccttcatctccaccaccctagtggtgcgtgacagtttcgtaccagcacgataaagaagctccctctgtgcgataaagaagctctctcgtcagagggagcttctttatcgctgttagaacagttccagattcacgtcgagcgtgtaggcgcgatcggcgggcagctggtactgctcatggacgggcgcgccccatgaatcgtctccgcccacgcccatttgcgcggccaacaggcgcaggaacgtgtgacggaccggcggcaactcgttctggtgggtcgcctcttccagcatgagcgagctgtacggcaacaggctcgccgcgaaatgttcgctgccggcctggctgatacgcatgccgtgtccttgggcgtcaagcacttcggcccaacgccagtcttcatggttgccggtctcctgcggcaccagatacggtgcattgtcttcggccgcggtgcgctcgaaaatgccgagcttgccaccgtgcagacggtcgtgataggtttcctcggggccaaggccgtagaagcgcaggttctcgtactgcttgggaagtgtccattccaatccgaatgccggcagcgtcggcgcatcggtggcaccggcatatcgggcggtcagatgtacacgtccgctggcggcatccacctcatagcgcacggcaacttgggtttcacccggttcggccaacgtatgacgaatgccgccaacgggcaccaacctcgttgacggcattcgtctttccaggacaccgcaatcgcggatgcatgccgtttacgcgttgaatacgtattggtcaaggcggcgcatggcctccttgacgcggctcaagggcaatgcgagattgacgcggatgctgtagggggcctggaacatgctgccgtcctgccatgcgacgcccacatcccagccgcgtttctccaactcgggcaggctcaggccgtggcgttcgcaccactgctcgcagtcgagcagcagcatgtaggtgccttccggtttggccaaactcactccttggaaatgcttggtgatgtagtcgtaggcgtaatcgacgttgccggtgagcaccgccttcagttcgtcgagccactcatggccttcgggccggtaggcgccgatcagcgcgtgcatggaaagcacgttcatgtcgttgtagtggcatttcgagcttttggccacgatgcggtcccggagtgtgggattgtagatgatgtggtaacttcccaccagtccggcgagattgaaggtcttgctgggcgcgtagaacgccacggtcctgttgcgtgcgtcctcgctgaccgattgggtggggatgtgctggtggttccccagagtcaaatcggaccaaatctcgtcggaaatgaccacgcaatcgttggccttgtacacttccatggccttctcgatttcccaacgttcccacacgcgcccgcaaggattgtgagggctgcagaacacggccacgtggatgtgatgctccttgagcttcctgtccatatcctcgtaatccatgcgccatacgccgcgctcgtccagcgtgagcggactgtggacgatgcggtagccgttgttttcgatgctccgggtgaacccgatgtaggtcgggctgtgcagcagcacgccgtcgccgggggcggcgaacgcggtcagcgcactgatcacaccgcccaggaccccgttctcgtagccgatcgcctcccgggtcaatccggtgaccccgttgcgcgtggactgccagtcgatgatggagctgtaatagtcgtcggtgggggagaagtacccgtaggcgggatgcttcgcccgttcgatgatggcctgcgggatcgtgggcacggtcgggaagttcatgtccgccacccacatggggatgacgtcgaaaccctcgcgtggcgggtccggcgcgaatcccgggtcggtgcccagtccgtcgaccgcgatcgaatccatgccatgcctgttcatgatggacgtgaaatcatacgtcattgtccgacaatcctttctcggtccgtggtggccggtcccaatctaaatcgggctcctgacggtgccgtggccgtgggcggcgatttgaccgcgtggcgtgttaggatatgcaccgttgtgaggcagtgatccgttatcagcggggagtcttcggaagaacggcggcaatcgcccagtagaaccgacgggatcggcccgagacagccgaacacaagcggtcgcgcaggctcgcggctccgagtgcaacagttcggagcggcgcaaccggtgcgataagcgaggtggtaccgcggtgcggagcgcataccagcgctcgtcatcgtcctcgtaggcaggaacggcagacatggctgttccgggcggaacacagtcggttccggctgcgaggcgattgactaatcggcccacggttcggtacgtgacattcgtgaaaccagccggcacacgtcggcgcccggcaatcgccatcaatgacgctcctgtaggaccagtgcacagtactaacaggagatttacggtgagcgaaaacgtatatcccaaggcgagcgagggcggcgagaccgcgcacgtcgcgccgaaccccagcttccccgacatggaggagaccgttctcgactactgggacaaggacgacaccttccagcagtccgttgaacgcaacccttccggcgaccacagccagaacgaattcgtgttcttcgatggcccgccgttcgccaatggcctgccgcactacggccacctgctgaccggctacgccaaggacgtgatcccgcgctaccagaccatgaagggccgcaaggtcaaccgcgtgttcggctgggacacccacggcctgcccgccgagcttgaggcgcagaaggagctcggcatcgactcggtcgaccagatcgagaagatgggcatcgacaagttcaacgacgcctgccgcgcctccgtgctgaagtacaccaacgaatggcagaactacgtgcatcgtcaggcccgttgggtggacttcgagcacggctacaagaccctgaacatcccgtacatggaatccgtgatgtgggccttcaagcagctctacgacaagggcctggcctaccagggctaccgcgtgctgccgtactgcccgaaggaccgcacgccgttgagtgcgcacgagctgcgcatggacgccgacgtgtaccaggaccgccaggacaccaccgtatccgtggccgtcaagatgcgcgatgaggacgacgcctacgccgtcttctggaccaccaccccgtggaccgtgcccaccaacttcgccatcgtggtcggcgccgacatcgactacgtcgaggtccgcccgaccgaaggcaagttcgctggcaagaagttctacctcggcaaggatttgctgccgcactatgagaaggaactcggcgagaattacgaggtcgtgcgcgaactcaagggcaacgagctggcaggccgacgctactacccggtcttcccgtacttcgcgggtgacgaggccgaatccgaaggccacgtgcccggcccgaacggctacacgatcttcaccgccgactacgtcgacaccgtcgaaggtaccggcctggttcaccaggctccctacggtgaggacgatatgaatacgctgaacgcgcacggcatcaagagcaccgacgtgctcgacgatggctgccgcttcaccgcgcagtgccctgactacgagggcgatttcgtgttcgacgccaacctgccgatcctgcgcaacctgcgcgccggcgacggcccgctcgccgagattccggaagagcgccgcgcgatcctcttccaggagaagagctacgtgcactcctacccgcactgctggcgctgcgccaccccgctgatctacaagccggtctcctcctggttcgtgtccgtgaccaagatcaagccgcgtctactggaattgaaccagcagatcaactggatcccgggcaatgtcaaggacggtcagttcggcaagtggctcgccaacgcgcgcgactggtccatctcccgcaaccgcttctggggttccccgatcccggtgtgggtgagcgacgatccgaagtacccgcgtgtggacgtctacggttcgctcgaagagctcaaggccgacttcggcgactatccgcgcgacaaggacggcaacatcaacatgcaccgtccgtggatcgacaacctggtccgcgtcaacccggacgacccgaccggcaagtcgcacatgcaccgtatttccgatgtgctcgactgctggttcgagtccggttccatgtcgttcgcgcagttccactacccgttcgagaacaaggagaagttcgaacagcacttcccggccgactacatcgtggaatacatcggccagacccgcggctggttctacctgctgcacgtgatggcgaccgccctgttcgatcgcccggcgttcaagaacgtgatctgccacggcatcgtgctcggctccgacggccagaagatgtccaagcacctgcgcaactacccggacgtgaacggcgtgttcgacaagtacggttccgacgccatgcgctggttcctcatgtcttcgccgatcctgcgtggcggcaacctgatcgtcaccgccgaaggcattcgcgacaccgtgcgccaggtcatgctgccggtgtggagctcctactacttcttcaccctgtacgccaatgcggccaacggtggggctggcttcgacgctcgccagctgcgcgcggacgaggtcgccggtctgccggagatggaccgctacctgctggcccgtacccgtcgtctggtgctggccgccgagaagtcgctgaacgagttcgcaatctccgacgcctgcgatgcggtctccgacttcatcgacgtgctcaccaactggtatatccgcaacacccgtgaccgtttctggaatgaggacgcttccgcgttcaacacgctgtacaccgtgcttgaggcgttcatgcgcgtgcttgcgccgctggccccgatggaagccgagtccgtgtggcgtggtctgaccggtggcgagtccgtgcacctggccgattggccgttcgtggtggacgagaagaccggtgaagacaccgaactcggccgtgtgctggtcgacgatccggccttggtggacgcgatggagaaggtgcgtgaggtcgtctccggcaccctgtccctgcgcaaggccgccaagatccgcgtgcgccagccgctttccaagctcaccgtggtggtcgagaacgtggacgccgtcaaggcgtacgacgatctgctgaagtccgaacttaatatcaagaatattgagttctcgactctggaggacgcctccgcccacggtctgaagatcgtgcacgagctgcgtgtgaatgcccgtgcggcgggtccgcgcctcggcaagcaggtgcagttcgccatcaaggcctccaagtccggcgactggcatgtcgatgctgcgtccggtgcgccggtggtctccacgccgtccggcgaccttgcgctggtcgaaggcgagtacgagctgatcaaccgcgtggaggaggagaacgccaccgaggccgccgcttcggtctccgccgctctgccgaccggtggcttcgtgatcctcgacaccgcgctggatgccgatttgctggccgaaggctacgcccgcgacgtgattcgttctgtgcaggacgcacgtaaggctgccgatctggacatcgccgatcgcatcgccctggtgctgaccgtgccggctgttgatgtggccaaggtcgagcagttcaaggatctgatcgcccacgagacgctggctacctccttcgaagtgaaggaaggtgccgagctgggtgtggaggtcgccaaggcgtgatgccatggcggactgaccgcgcctgatgcgcggtgcacgggcgcgtggaatgcatgaagtggtcccgccgtttagcggcgggaccacttttttgtttcgtggtatgcttgcgctgcgacgatggcgttgcgatacggagcgattgacgaggtgacgataatgtgtgcgacgtactatgcgagaaccagcgatcacgggtatgagacctgcgcggagcacctggccatggccggttgc

SEQ ID NO: 90 - DNA, 3939 bp, Unknown
  R206_24m  MAG No. k141_12389
cgactcagtgtgtatgggaagtcacaggtgccggtggcctcttcgccgagttcggtgggtgagaacggggtggggccttcgacgaatgggttggcggcggcttcgatatagacggtgaagtcgccatgttcatcgagttctacagtgctgctgccgtccgcgtagacgagtggaatccagtggttgcgtgggttcgcggatttgatggcggtgccgtcggcacgatagacaagtccctcggattggaatccggggccgcggtgatcgagccagccgaggtctaccatgagttcgacttttcgtcctttgaccgccgccatgtcgatgtggccgttcacctcgaaccatgtggtgccccatgtggtgccccagacgccgggaacgcggaaaggttcgaagggcacttggccgttgcgcactttggctagaaattcgctggagggcaccggttcgccgggattgtggaacgaacgcaaggtgcatgcggcgagtgtggtgtggatatgcggtttgacgcgctgctgcatgacgcggtcgcagcgctccaactgctgattgggcagaagaaacatggagagttctcctttgctgtgtctgatggaaatgatgggtgtggtgacaattgggaaaaccgtaatacgacatgcttctgccgcctcatggttcgaggaggcagaagcgtcagacgggaattcagcgcgtgatgcgcagggtggcgagctggaacgggccaaagtgcaacgtggcgccttcggcgttctgcctaccgtcttgcagcgcgaccggcaggtcggcggccagatcgtcgccttccagcacattggtctcatgcaccgaagcgcctgcgagcgccgggcagacgtgcagcgtggcatcggccctgccgccggccgcctcataggcgcgcacaatcaggtcgccggagccatcgtcggccagctttatccagtccaacaccacggtgccgtttgctgactcgatcgaggcgagcggcgctaagtcgggcatgtcatgaagcgtcggtgcgttgagtgcgcaagcggcgtcaagcgcacggcccaccgtggcgttggccaccacggaccagtcgaactcatgcgcaccgatatcggtgcgcgggtcggggaaggtcggcgcggagagcagcgacagtcggaacatggtgcccgagtcacgaccttcggcggcgttcccggagatcggcgcggcatcggacccgtacaccgatccgttgatgacggccgccgcgtaaccggcgtcgccgataagggcgaagcggttcgtgctgctctcatacttggcttcgtcggatgcggtgtttttgacgattgggcggcggaccagaccatactggcagtcgtatgttgcttggtcggccacgatacccagcggcagatcgactttgaggaagcgttcacgttcgtgccagtcgatatcggcatggaaatcgagcgtgtgtgaaccggggcgcagcgtgatggtggtggtgatgacggtgtcatcgtcggcggtacgcacgcggactcgtgccgcaccgttttcggtatcgaccgattcgattgatccggtcatggcattcgccatgagcagggattcgcgttcgatctcccaggcatcccaaacggcgggttcgtccctcaacagttcgtattggcccaatcgggtgccggccggaaccagttcacggccatgctcctcgtcaagcagtgacgagattgtaccgtcggcctcgatggtgacggacagtacgccgttggccagcagtacacggccgttgtccaatgtctgggtcagtacggaaagcgcgttggtcggttcgttgatgcggctggcacgccaagacgcgccgtcattacggaactggctgatgcgggcttcggcgagcaggtcggcctgcgggttggccttgcgcagcacggcgcacatgccttgggcgatttcagcgagacgcttcaggtcgcggcgatagtcctcgcgggcttcgcggtgcacccatgcgatggccgagccgggcaggatgtcgtggaactggttcagcagcagcgtcttccatatgcggtccagctcctcgcgcgggtagacgtactccggatcggacaacacggcggctgcgcccaggtattcgaccgtgcgcaacagcgattcctcttggcggcagccgcgtttcatgtcctgttgcgaggtcaaggtgccacggtgcagttcgagatacagctcgcccttccagacgggcatttctgggccggcgttctctgcaagctgctgatgcgccttgtcgaagaagtcattcggctcttcgatgctcaccttggagacgccttcgaggttctcgtagcggtgcaggtgctccatcatgttgcgcgtggggccgccaccgccatcaccgaaaccgaagagcagaagcgagcggtcggagagatccttgtcctggaagttcttctcggcgtagtcgagttcctgaaccttgcaccaagcagcataggtatccgccggcgggaagtgggtgaagatgcgcgagccgtcgatgccttcccacatgaacgagtggtgcgggaacttggtggtatcgttccacgagatcttctgcgtgaggaaccattcgtacccggcacggcgggcgatctgtggccatgcgccggtgtagccgaagctgtccggcagccatacgcccttgggctccacaccgagatgttccttgaagtatttgcggccatatgcaatctggcggatcagtgactcaccggcgggcaacatgccatcggcttccacccacatgccgccgaccgggatgaaccggccttcttcaatgcgccgcttcatgcgcttgaagatgtccggatgatcctcttccagccaggcgtactgctgggcggagctcatcgcgtatttgaagtcggggtcggcgtccatcagcgccaatgcgttggatacggtgcgggccaccttgcggcgggtctcgcgcaccggccacagccatgcggagtcgatatgcgcgtggccgatggcgctgacgttcatggccgaggcattggccggcttggccagtacgccggcgagtgctgcgcgcgcggcttccacggattcggggttgcgctcgtcgtaggcgttcagcgaacgctgcaatgctttggcgagttgccagtagcgcggcgactgtttgtcggcgaattccatcagggagctcaccacgtcgagatcgacggagtagttctcgtagcgttcatcgaattcggccagatcggcggacttgaatacgtacggctcgtccggcttgccggtggcatggtcgcccagttcggtctcaatgaacggaggcacgccgagcagcagcgggttgctggcggcttcgaggtacagggtgaagctgccgtcttcggcgaccggcacttgcgcgttgccctcagcatccatgaacggcacccaatagttgagcgggtgtacggctttgatggcggtgccgtcggcacggtagacgaggccctcgatatggccgccgcaggagtgcgagtaccagccgaggtcgaggatgagctccagcggcttgcctttcgggtagccggccggcacggtaccggtcaggcggaaccagactgtgccccatgtggtgccccattcaccgccgagcgtaaacggcttgaagtcgatgtcacctcgattgagcttctcgaagaactcgtcagtgggcatcggctctccgggaatgtcaaaggactccaccgcaagctgtgcgatcgatgggtggatatgagggtccacgcgctggcgcactatgcgcttgcaccgctccagttgctgttcaggtttcaggaacatctgctgttcactccccttatctctgccgcttgtgcggccacatcattgtgctgcccgttcatgggaaacatatcgacatgcgccctcgcccgcagaagactaaagcgctttagtaacatattggag

SEQ ID NO: 91 - DNA, 4620 bp, Unknown
  R206_24m  MAG No. k141_13650
gaagttatgcgcattttggatgatttgcaggcgcgcggcaccactattgtgcatgtcacgcatcatccggatgagaccgttcatgccgatcgcatcgtgcacatggaggccgggcgaatcgttggtgtcactgcagccgccgataatcgacccccgctagcggaggctgtctcgcaaagcgagactgagggtggtatcggcacagaagccgcccccagtcgtcctacgaacgacagcccccgccagcggaagcgcgaagacggctccgaactgccgctgctctccgacggcatcggtgatatgacgaaccccatcattcgcgtctcgcatctgacctatcgctatccttcggccaaacgggcggttatcgatgacctgtcgttcaccatcgcgcgcggtgaaaccgtggcactgatgggcgtgaacggttcgggcaagtcgacgctggtgcgcatgctgtgcgcgctggccgcgccgaccgccggcagcatcgaggtggccggcgttccggtggcctcgaccggcaaacgcggtagcaacgcacggccggagccggcgaatcgcaggcaattggcgcaattgcgccggcatgtgggttacgtgatgcagcatccggagcaccagttgttcgcggacacggtggccgaggacgtggcgtacggcccgcgcaaccaggggctcgccgaggccgaggtggccgaccgtgtgcgcgaatcactggacctgttgcatatcgggcatcttgccgaccgctcccctttcgacctgtccggcggacagcagcgattggtggccatcgccggcgtgctggcctgcaatcctgacgtgctcatcatggacgagccgaccgcgagcctggacgtccaggccaaggagcgcatccatgagctgttgcgcacgctcaaatcgcgcggcgtgaccgtgcttatcatcacccatgaccgagcggaggccaagcatatcgccgatcgcgtggtacgtatgccgattgccggcgcggctggtgctgagagcatctcggcaaccgagactgccttccccgccgagtccgtctcccctgacaaacccgcgcactcggtgatccaccgacttgacccgcgcgtgaagatggtgggcttcctggccgccatgttcacgatgttcgcggtgaacacacccctccagcttgcgctgggcatcgccatcaccctggccgttatcgcggcggcacgcctgaacccgttacgggtgctcgaatccattcatccgattctgatcctgctggggctgatgggcgtggtcaatctgtttgtggtacgcaccggcacgccggtggtggcgctgggcccgctgagcatcaccgatcagggcgtgaccatagccgtgctgtacgcctgccgtttcgcattggtaatcattctgggcgcggtgttcctcaccaccaccacgcctaccgccatgaccgacgccttcgacaccctgatcagcccgctcaaccgactcggcatccacgcccaggagatcgcgctggtcatgagtctggcattgcgattcattccaacgctgaccgatgaaacccgcgccatcgtcgatgcccaatccgcgcgtggcggttccatcgaaaccggttcgctggcccagcgtatcaaggcgatgagcgcgattatcgtgccgattttcgccggcacgttgcgtcacgcggacaacctgagcctcgcacttgacgcccgctgctacgaggagagcatccgccgcacccactggcgtgccctgaccatcgccgcgcaagatctcgtgttcgccgtcgccgtcatcgcctacatcgccgccatcatcgcgctgtagggcggcaaacagcacagacagcaccggttgctatgctggtgtggttatacgaaagatgtaaggaaattcccatggcattgaccaagaagcaaatcaagcagctgcgcgcgatggcaaactcgctgaagcccctgttctatgtgggcaagaacgatttgaccgagtcggccgtcaatcaggccgatgaaaccattgagaagcacgagctcatcaagtgcgccgtgcaggacggttctggcctgaccgccaaggaagccgccgccgagcttgccgagcagctgaacgccgaagtggtgcagtccatcggcaatcgtttcgtgctgttccgtcgctcccggcgcgacgatgtggagcatatccgcttggtgcgcgagtagcgttcgctctgctcgatcccgtagcttgatatgagtaatggcggttggaatcagtccgattccaaccgccattattcatattcgcccagcgagcaccgtcactgatccaagatggacccgacgattcccgcaacaatggtcagaaccaaggaccccagtaccgaccaccagaaaccgtgtacgaagacgcccacgccgaacagactgaccgccagccagctggcgagtcgcatgaacagccaattgataatcaaggtgaccagcccgagagacagaatcgcaaacggcagtgcgatcagatgcacaatcggcttgattgacgcattaatcagcgccatgaacaaagcgaacgcggcgatgccgagaatcggaggctcccccaccggggtcatgccgggagtcaccgcgaccatgacggcggcggcgatagtcataatcaaccagctggtcaggaaacttttcatggcccaatcgtagcgcggcaggttttactattaggcaaaacgtgagatgatgttgtgcagaaacggtaagaaggtactgccgttcccgattgagaagggatagacccacatgactgataatcaacaacaaccgtacggttcggacagtgttccgcagccggcacaacctgcacagccggcacagccgtcgtacggccaagatgccgcacggcagccgcagggctatggcgccccacagcccgccgcatacgctcaacccgccgccggaagctacggccagcagcagccgcaatacggccagcccgccggcgcatacgctcagtctcagtacgctcagtctcagtacgctcagccgcagtatggccagccgcagtatggccagcccgcacagcccgcagcgggctacggccagcagcccggctatggacaggcctaccagcagccgaatgcctacgcacagccgcaatacaccgccgctccgtatgccgccgccccggtgtggcaatcatccaagtccaagttggctgccggcctgttgggcatcttcctcggcggacttggtgtgcacaacttctatctcggcaacaccggcaaggccgtggcccagctgctgctgacgcttgtcggctggattctgctcggacttggcccaatcgcagccgccatctggggctttgttgaaggcatcatcattctgtgcagcaagcccggctcgccgtggcataaagacgccaacggctacgaactatcagactgagactgacctcgggccacgttcattgggcctctgatcaaccacgcctctgcaggtatcatctcgatgccgcagcctccgtgggatgcgacacgccggccgtgtacatgagttcatgtacacccgatacaggcgaatcagtatcgcacgagattcaacagttcctgctgtttggcatagcgggaaacgttggtgagggcgatgcggatgatgtgttcggaagtcttttccaaatgattgccgccggccacatgcggggtgatcaggcaatgcggctcatcccacaacggactttccgccggcaacggctcaggctcagtgacgtccaatccggcaccgtggagccgtccattgtgcaaggcgtcggccaaggcctcgggatcgatggcgtcgccacgcccggcattgatcacgatggctgtggatttcagacgccccagacgatccgcattcagcagatgatgggtctgcggcgagcgcggcaccgccatcgccaccacgtccgccaatggcaacagcgcttccagccgctcgaagccatacatcttttcaatgcccttggccggcacgtccgcatgacggcgcacgccgaaggtacgcatacctatggattgggcaagctgagcgaaatgcgacccgatgtcgccgacgccgataatcagcgcgatgccaccttccgggctcaataccgggccttcatcctgccactgatgatcgtgctgattggaggcataccggttgaggttcttcatcaatgcccacatggtggcgaacatgtgttccgacacgctttggccatacgcgccgctcgcattggtgaccatggtgccgcgaggcagcacacccgggcggatgtacgcatccacaccggcgctgaaggtctgcaaccattcaagacgggtgtattgggaagcctgcgagaccggaaagttgccgatgactgcggtagctcgggagcgaagctcctcgggaacagcggccgaccagaccatgtcgccgcggtgcgcttcgtcgcccacgaattcctgcggcacatcgcgggccgccttggcgaaagcgcgccgttctccttcgttgagtggcaggcagttgacaatcagcttatgcgtgttctcaatacccatggttcaccaaactaggcggcagggcggatattatcgcgtgtttcctcatgctgaaccaatgccgaacccgccccgcc

SEQ ID NO: 92 - DNA, 17488 bp, Unknown
  R206_24m  MAG No. k141_13903
cccaccccccaccacttgcccagaacccaccacaaccagcgaatagccaaaaaaatgacgcatgtgctgttatacattaaaacgcacagaaaatcacacatatactgtgcgattttctgtgcgttgcagtgagcagctactcagttatgcgcggcgcttgcgccagatggacagcgcagtgccggcagcggcgagcagcaccatggcaccgctcacgccatatacggcggcaccggtggccggcaacttgccgtcagacttggtgtcatcggtcttgttgtcggtcttgtcgcctgcgttatcgcccttgttgtcaccatcgccggtatccggcttggtgggcgtttccgccttctgcaatgctgcgatggcggcgctcagatcagcggcggccttgtcaaccacagcctggtcggaggaagcgagcgcagccttggcggcctgcagtgccttggcgagcgcagcccaggaatcagccgtgtaatcggattccttgagcgcttcggcagcggcgatctgcttgttgagctcagccaaatcgaccttgccctgctcgatgccggccacctcggtcgaggaggggtttaccaagccatcggtgtagccgtcgtaggcgaccgcaacagtgccagagatggtgaccgggagagtcaccgtggccttgccttcggcgtcgagcttcacggtcttggaccagtcgccagcagagaatttcaccgagccggcgagcgtgcccttgtcagcggcggtcaccgtggcggtgagttcgcgggtttcggcgttgtactcggccttggtagcggagtcaacagcgggcagcgtggtcggggtggaggtattccacttgtgcatgttctccgcgatggcagcggacacgttcacgaacgcgccgtggcgggtcggggtcggcatgttggtcggggtcaccttacccgtgacattcggcccccactgcttctcggtaccccagccgtcggtggaggacagacggttggtccagctggacgccgcgatggcggactcggaggtcatgtacggcttgtatccgccggagtcggccatgatgatcatcgcatcgccagcctcattctggttcgggtcgccagcattgagtttgatggactccgggccttcgaacggcaggatgttctggtcaacgagctgccaggtcttggtcgtatcggcgttcggatcagcggcggcggtggtgcaagtcaggcactgggaacgctcaaggaacgtggacttgccgttggtgatgtaatcgccggccttgccgctttcctcgttcttggtcaggcgatagtacatatcgccaatcttgaacacggtggaatcaatgcgggagtactgggtatcctgccacttctcggccggagtgaacgtcttgaagtcgcgggtggtggccatcacaaggatgttgtatgcgccgttggtcttcgagctcttcactgcggtggcacgggtgtcatcggtgtattcacgcgaggaccagaacaccacataggagttcagcgcgtcatcccagaaagcttccggtgcccaagtcatgcccatgttgtcggcgttgaccttgataccggtatcgccgtcctcggcgttggtgcgagtccagttcaccatatcggtggactcccatgcttcaagcttcagagagccatactgctggttctggccccagccctgcgaggagaccttgaggtcggtggcgatcatgtagaacttgtcgccatccttggacttgagcacatacgggtcacgcaggcccttggtatcggtgttggagacgataaccgggttgccgctgttaatctcgctgaacgagaagaagttgttgccgtcggtggcggactcgtacagcgcctcaccgatcttgccgttggtggtggcctcatcggaaaggaaggtcacggccgcataagcgccgtccggaacggagcgggtttgctccttgacagtgacttccacggtcttggtcacgacctcgccaccgttgtaggaggcagtggcggtcagtgtgacaggcttggaatcaccgtcgccgtaagccgggcgagtcaccacgccggcacccttatacggatcggccataccgttcttcggagcctcgtacttggcgtcagtgccggtaatgagcttttcatcagaggacttccacgtaatcgcagaaccattcttggtgccttcggcaactagcggcaggttctcggtggtggtggtcttcagcgcggaaatcgcggcgttgaggtcggcttcggcagcgttcttggcgttcatcggctcaacggtgacgggcagttcggccttcacaccacccagctcagtggtggcggtgatggtggcagtaccagccttaacgccggttacagtaccgtctgcggcgaccttggccacggactcatcggaggaggaccaggtgacgttcttgctcacggcgtcgtccggggtgacggtggcggtgagcttggtggagtccttctcaatcagggtgagcttgttgttcaccacaccggtgccggaaatcgcaacggcggtcggcatggtcaggtcagcgcccctgtagaccttgatgtcatccattgcaccattccagtactcatcgacggagtagaacgacttgccgatgtaggcggtggtcgcgccgagatcgctcatcttgatgccggtgttggccttgaaaataatcagggcattgttgcggaacacggcaaggttggtgccgtccacgacaatcttgtaatcggcccagctgttgtcgttgccggaaacggtgaccttggatccctgttcgttaccccagttgttgttggagataacgcccttgatggcggtcttgctgttgtagaacatcaggtacttgttggcgttggactgatcggtggtgttggcgtcgttcgagccgtccttgccgacgatgaacgagaagaacttgccgctgtcgtcgtgacgagtcttggacgcgaactccagagtgaaggagtcgccggcgtccttgaacagctggtcatcgatctgggcgtactggccatcgccgcgcagtgagagcgcctcgttgttgctgcggtcaccgtactgttcgatcttggcgttgtctttcagcgtcaggttgtacttgccggtcgaatcggcaatcgcgctgttcgttgtgccgtttttgcccgtgaagtcccagctggcgagcagcgtcggttcagcagccttagcagtctgcactgtcgcggtatcggttgtctgtggttgggaatcttccgactccatggcatacgtcgtcggaactactgccatcatcgttgatattgcaaccaacgatgctgccatcttcttccaatgcttcaccgcatctctccttgccctttgcctcgacccacttgtcgggtgtctcgttcgcctctacgtgaacgcaaacattatttgcgatgataccattacggcactgagactcagtgtgccagattccttatgtatataagcacttacagggggcaaccgcccagcccgaacactccccgtatgccaaaagcccccttccaagccaatcactaatacccctcaatcggcaccccgctccgccagccgccccaaactgttatcaatttgttatctttaccgcgcttgcgtggacagagaacgctcagacctcgaagatcgccgcatattcgcgagagaacccgcctagtcaatgagatatggattgaaaacacgctcggtgacggggatatggagcatcagcatggtgccgtaaccaagaatcactagcaggaacagtccaccgggcatgtagaaccagctggccaccagcagcgccacgaacacggcatccacgatgaccagggccacggtcatcgcgatgtgggagatgccgaagatgaaggcgttcttcaaggtgccggccacggtgttctcgaagcgtgcctgaagcgcgaacacccattcgaagccgataagccagaggatggtcagcgcgaatttgatgatgagcagcggcgtgatctgcaggacgatccatgaccagaccagtgcaatcagcaccaccaagaacggcagccacagcagtgtggctttgatgaagttggctttgaatgacttgaagtagttggcggttacgcctttgccctcgccctcgatggagcggcggcaagcatcatggccggcggtcagggccgcaccgatggtgatgagcggaatcgaagtgaccagcatcagaatgttgatccatacgccgtcaacaagattgctccacgcgcgcatgaatttcgagtccggtgccagccagttcatcaactactccttgtgtcgcctgtggctcccctctctgaggggagctgtcatcgcagatgactgaggggagacttgatggagctcagggtactcccctcagtcggcttccgccgacggctcccctcaaagaggggagccggattggtggagctcagcccttgaccgctccgccttcggccctgcaattacggactcgcctacgacgaggctcatcattagcttcgccgctgtcgcggctcagcctggagcctgctggaagcccactgggcttccagccatgggctgacgacgcgagtcgtcagcccttgacggctcccgccatgacaccagagactatatacttctggcataccaagtagaagacgatgatggggatgatggccagcaccaggcaggccatcatggcgcccatatccacggaaccgtagccgcccttgaggtattgcacggcgaccgagatggtcttgtacttgccgaggtcgagcgtcaggtacggcagcaggtagtcgttccagatccacatggcttcgaggatggccaccgagacgatcgacggcttcatgattggcaccacgatctggaagaagatgcgcggcactgacgcgccgtcgatcatggcggactcctcaagctcctgcgggatgcccttgatcacgccggtgaagatgaacacggccagaccggccccgaaaccgaggtacacgatgcacaggccccacggggtattgagcttcagcatgtcggcgatcttggagagggtgaacatcaccatctggaacggcacgatcatattgaacaggaacagggtgtagagcagcttcgcggcccagttgttcacgcgcacgatccaccatgcgcacatcgaggtgcacaccagaatcagcaccaccgagccgacggtgataagcaacgtccagccgaaggaggcgaagaactgcgtggtctcgatgccgcgcacatagttctcaagtcccacgaacgccttgccggcaggcagggagaacgcgttcttggagatgtacgccttctgcttgaaggagttgatcagcaccaggacgatcgggaaaatccagaacagggagacaacggcaaacagcacggtccataatgcgccatgcttcacaggcttgttctcgttcatcaggctgccacctccttgctcgtggtgagcttgttctgaatcagggcgatgaccgcgaccaggatgaagaacagcacggccttcgcctggccgacgccttcccagcccatacggccgtagaaggtgcgggtgatgttcagcgccagaccttcagacatgttgctcggcgcaccgttggtcaatgcgaggttctggtcgtagagcttgaaaccgttggtcacggtcaggaaggagcacacggtgatggacggcatcatcagcgggatgatgatgcggaacatggtctgccgtccgttggcgccgtccacggccgcggcctccagcacatcggtgggcagggcttgcaggccggcgatgtagatgatcatcatgtagccgatctgctgccagcacaccaggatgaccaagccccagaacccgtaggacgccttataggtcagggcgcggccccagtgggccagtacgccgttcaggagcagcagccagatgtagcccaggatgatgccgccgataaggttcggcatgaagaataccgagcggaacagcgtggagcccttgatcgccttggtcagcatgtaggcgatggcgaaggcgatcacgttgatcacgatggtggtcacgatggtaaacgcggtggagaagccgagcgcgtgcaggaattccttgtctttcaacgctttgccatagttcttaagccccacccattcaccgtcggtaacggtggtgaattcgcaaaagcttaagtagacgcccatgatgaagggcaccaggaacccgatgatgaatgcggcgaatgtggggagcgcgaacagcgcccaccatctgcgtatcgccttgccagccatgctgatcatgacttttcctcctccttgagtccgctgcgttgcgacactgcatcgtgcgccggctgcggagttcaactcaatgcgagcctgccgatcgagaaccgcatgcacggcctattctcgttcaagcctatgttcatagtaaacgccgaatcattatatgtcaaacgttgtcattttcagcgtttcaagctcgagcatactccggctccagcaatcttctttcaactaagataatggctatataaagccaatctaacgccgtcatagacactttgcaaacgtttgtaatacaatcgttgtcatcgccgcagatcaatcaatcagcatgtacactggagtcagttgtgcatgtgtattgcgattttccattcaacgcaagggggctgcaatggctacgagcattcaggatgtcgcccgcgaggccggcgtctccatctccaccgtctcacgttccttcaccaggccggatctggtgtcggccaagacccgcgagcgcgtgctcgccatcgccgacaaactcaatttctcactctcccgctcggctgcggccctgaaatccggccgcgccctgcgcatcgcagtactgatgagcggccatatccgcctgtggttcaccgcctcggtcatcgaggggctcaacgaggtgctgcacacgcagggctacgatatttcggtattccagatttccagcatcgaggagcgcaaggaattcttcgagatgttgccggtacgccgtaacgccgatgccgtgattgtggcgtctttcgatatcgacaacaacgaaatcgcgcaactggcttcagtcggcgtgccgatcgtcggcatcaattcagtcgagcccgaagcccgcggctttaccgccgccgtcaatatcgacgacgtgcagggctccacgctggccgcccgccatcttatcaatctcggacatcgccgcatcacctatatcagcaccaatcgcgaggtgtcgctgagcttctccgtgcaaagccgattcgactcattcaccgcctgctgccgcagggaaggcatcgagccgcaggtcatcgtctgcaaggtcgatgacgatggacgttatgaaatcagcgacgtggtcgaccaactcatgagccaagacgagatgcccaccgccatcgcatgccaggaggatggcatcgctttgccgcttatgttccagctggagcgcaatggattctccgtgcccggcgacgtctcgctggtcggctacgacgatagtttctacaccggcgatatcggcctgaccaccatccgccaggatccggtggaaatggcccgcgtggcagcccgcatgacgctcgatctcattgacgaaaagccgattgagcaaccctacatcgtgttcccggcccagctgaaggtccgctcctccacctcccgcgttaagtaggctcacacaacaaagcccaccatagaaaaagtgtgaggcaaccgcacaataacgctcaatcgcacattgtggagaatggcgaaaaatcgccgattcatggccccacagcgtgcgattgagcgggtgcgtgcctcacacttttctgcggcggacgattttgtgcgagactcagcaatacaaagcggcgcccctggagaaggaaaggcaggggcgccgcggattgttacttatcggctatgggactctatgagactcagtgcgaggcctcgtattcggaagcccaaccgtccacgaaggcggtcttgacggcatcccacttgccggtgccctgcgcgtactcgagcagcgcctggccgaccttgttcttccattcctcggacggcatcatggtgaagttccaagaaacctgggtcttgccggactcctggtcttccacggcggcctcggtcagcgggttgtcgcttttgacgtcatcgaaggtcttgaacggggtggtgaagcccatgtcctgagagagggccttcttgccggtatcagaggtgatcacccacttgaggaagtcctcggtggccttcttgtcggcgtcggaggccttgtcattgatgcaccagtagttctcggaaccggtggtcagaccctgcttctcctcgcccttgacgccgatgtagatcggcatcatgcctacctgatcggcggtcatgccggccttctgcaggtcggtccaggcccaggtaccgttctggtagaaggcggcctcgccgagcgcgaactcggagttcgcatcatctccggtcttggcgctcagctgggtgggttcggtggtggagtcggtgatgtacaggtcgaagatcttcttgtagttcggcaggtaggtgcccttgatcttggccggctgctcggtgacgttgtcgtccttgaactcgtagtaaagcggcagattggccaggtgggtcttgaagcgccagtcggagctggagtcgaagccggcggaggtgaacgcgcccttgatgccgagctcgtccttgcgggcctgcatgtcgtcggccacggccttcagggtgtcgaagttgtcgatttcgtccatggacgtggccttggcgccatccagcgcgaagtacttgttgaggatgtccttgttgtagatcaggccgtaggtttccatcacgtacggcacgccgaccaccttgtcgccatccttcagggccacatcttggttggtgagctccttgtacacatccgtattggacatatcggcggtgtacttcttccagttctggtagccgaccgggccgttgacctggaacaaggtcggggcttcggttttggcgatttcggacttcagggtctgctcgtaggtaccggaggccgcggtctgcaccttgacctcaacgcccttttccttggtgtattccttggccagagcggtccactgatcagccgcttccggcttgaaattcaggtagtagaccttgcccttggcgtcatcgccggaggtcgagcttccgcaggccgccaaagcgccgagggacatcgcagcgacagccgccatcgcgactgctgacttgactgtacgattcatcatcgaacctttctctttcatcgtcgacccggccgtccccggtcgggacaggtacgctaacacgcacctttacgactatcgacatgcactattgtgcaacggtttgcttctttttgcaaacgatagcaatatcggcgcgtcataaatcatcattttcaggccattgtcaacaaatatcccattaattcagtcatttttgcctcattatcgcaatgcaagcgttcgcaatcatgagagcgctaacatatctttcatggcaatcgattgccacttatacccatcaaaaaaacaacacgccgacgctatcgtttgcaaatcatttatcgacataccgcaattcccgccacaaacaataaaggcccgcccgcagtagcgggcaggccagcgcaatcgcagcgcaaccggggctaggcgttccaccgttcgatgacgttatctcccttatagacgctgagcaccgagtagtgcgccgtatccaaacgcagcaaccgtgcgaaatgcgggtccacgcccagccattgcgaggtgaggatgcgcaggatgtgcgcatgagccaccaacagcacattatggccgtctttcagcagcggcgtaatctcgtcgatggcgctcttggcgcgtgccgccgcttcttccagcgtctcgccaggcccggcatggaccggcacctgttcgcccgaaggcaaggtctcgacccagtcgccctccagcgtgggcgtcagcgagcgcggcccgtcacgccacacatcccattcaaaaccgctggcctcactcacctgctggcgcgtacgcccctcggctcggccgtaatcccattcagcgatgccgtccaacacaccgtggtccgcaaaaccagccaattcagcggtttggcacgcccgcttcagcggactggaaaacacacagctctggctgaatccttcggggaaggcctcgcgcaggcgccttccggcatccgctgcctgctgctcgccgaccgcggtcaacgggatgtccgtgcgcccggtatgctgcccggattcgctccacacggtctggccgtggcgcagcaacaccaaaaatccattgccgccacgagagttctcgacggcaacggtgccgttcacgttctgttcgctcatgcctccactctagtctgcgctcgttcatgactccaccattaacgcccatcttttgcgctgagatgattgagatgctattagactgagagtcatgagcgacgaaacgaacaccgacttcccctccagcgccgaccgcgcggtcgacagcctgcaccgcatcgacgagaaggtcaacaggctgcgcgaggaccggctcaacgaccctgattctctgggcgacaagctcatcaagtcggcagtcccagcgctggcgggcttggttgccggcaaagcattccagatgatatgggacaagggcacaagcaaacgcaatctgcgcaagggactggcggcagacgcgccgcaaagtctggcaatgagtctggcattcgccgccgtttcggccgcactcggcgcagtggtttcgcagctgtcggatcggggctccaaggcgttcgtcgaccaccgccatcgcaagcccagccgctaatcccccggttggatgatggtttctgttggctgactgatgactcatcgctggaatttcgtcaaggaaccatcagtcaatttccgacgaattccatctcaagtacagctatcgcttcacccaagctcagaacgacgcagtgctggccctgcacgccatggagaccgccgcctattcgctgggactgggctgcgtgattctcggctctctgctcaacaacatccccggccttatcgacgtgctgaatctgccggaatacacgtatccggtgctgggtctggccatcggcaagcccgatcagaacccgaccgtcaagccgcgcatgccgcgcacgatgcagttcttcgagaacatctacccggctgacgccgatggcgtactcgaccagctgcccgccttcgacgaggaagttcaccggtactacgatctgcgccaagccgaccgtccggtggacgctttcagcgatcaggtcgccacgatcagtcggcaggatgtcagccatcagacactgctcgacaaggccgccgctcagggcttccgtctggatcagtgagaccagaaccaacgagatagcctcggataggctcgtcactgagtcgtctcggtctcagcactgcgacgactcagttccaacacctcaacatttcatcaccggataccggcaaaattgcacagccatcccgccggtgtcgcaccatcaacaaacgttcacatatcagtcccattatgcggacaaccaacggccagttttgcaagaaaacccgccaaaccagcagtatccgcaccagtggtgggaatagactgcatgtggccgcaatgactacgaaccggaaaagagggactggatgcggacggtttggcaagtctttctacgcgattgcagacgtatcttacgcaatcccgttgccgttgtggtgacgctcggcgtagcaatgctgccctcgctgtacgcatggttcaacattctcgccaactgggatccctattcagccaccggcaatctgcaagtggccgtagccaatgaagaccaaggcaccaccaacgatctggtcggccatctcgatgcgggccggcaggtcgtcaagaaactcaagcagaacgacgaactcggctggcgcttcgtagacaatgaggaacaggccgtccacggcgtggagaccggcggatactatgcagccatcgtgctgcccaaggatttcagcgccagcttggtcgaatcggtgaccggaacctccaaacagccgaaaatcaagtattacgtcaacgagaagaagaacgcgatcgcgccgaaaatcaccgacaccggcgccaccaccatcgatgagcagatcaactccgccttcgtcaccacggtagccaccaccgttgcctcggccatttccgaaaccggagacgatctcggccaagccactggcaaagtccagcacgatacgatcgatgatctcaatacggtgatgtccacgctgaacaccgttcaggattcactcaccgacttacaggacacgctggcccaatcagacacgattctcgccgacgccaaacagaccaccgcctcactcaagcagaccgtcgcggccgcgcagaatgcctcccgccagtccggcacactgttggcggaaacacaggccgggtcacaagccttctccaccacactggtcggcgcgctcgacagcagttcagcacaactctccggactggccgtccacgtcaacaacgccgccggcagcatcaccggctccttcaacagcgcgcagaactccgtcgacaccatcaccaacacactttcggccccactgaacgccacccaaacgtcaatcagcgatctgaaagacgcgctgaccaaagccggcatcggcaaagacaccaccgacccggtcggccagaacatctggaaacaaatcgatgcgctcgactcattgatcagcaaacagcagacacagctcaacaccttccataccgacaccacacagttcatcaactccggcaaagacgccaccacgaacctttccgaagccatgaccaacaccaccaccggcggcatcgcggcgctgaataccgcgcgcggctcgctgaccggcaccgtaatgccgtcgctcacctcatcattgaacagtttcgccgccctgaacggcacgctggatggcacgttgacttcgttgtccggcaccttggatcaggccgacgggctgttcgaccagcttgtcgataccctgaaccaaacgaaaaccaccatcagcagcacgcaggattcgctgcgccaggcggccagcgatgtcgccaccgtacgcaccgatatcgccacgctcgatagttccgccgcttaccagaaaatccgggatacgctgcatctggatgacaagggattcggcgagttcatgggcaatcccgtcaccctgaccacgaaagtcgtgtacgccaccgacaattacgggtccgcagtcaccccgttctacacgaatctggcactgtgggtaggcggtttcgtgctgattgccatctacaagcttgaggtcgaccgcaaaggcattcgccgtatcaccgctacgcaagcatatcttggccgctggctgctgctggtcaccatcggattcctgcaagccatcatcgccaccattggcgatctggtgctcggcatccaatgcgagcatccgctgctgttcatcttggccggaatcttctgttcgttcgtctacatcaacattatttacgcgctggccgtggcgttccgccatatcggcaaagccatcgccgtaattctggtcattgtgcagatacccggtgcctccggcctgtatccgattgaaatgatgccgaacttcttccgcgaactgcacccatggctgccctttacctacggcatcaacgcgatgcgcggcccgatcgccggcctgtacgcgaaccattactggctcgacatgctgcacctgttctggtatctgccggcggcgcttttcgtgggacttgtcgtacgccggtatgcgatgaacctgaacgcgctgttcgaccatcgtttgggagataccgacctgatgatcaccgagcacaacagcatggtgaacgaacaggtgagcttgaactccgtattccgcacggtgtccgacagcaaggaactgcgcgatatcatcgctcatcgcgcgcaccggttcttcgcgcggtacccaaagatgatcgttgccggtctgacattgctgaccgtactcccgttcgtattcctggtactgctgttcgtcacccaagagaaaatcgccatgctgacctcctggattctgtcgattattcttatcgacgcctatctcattgtggttgaatacgcacgcgaaacctacgccatgcagcttggcgtcagtgccatgagtgccgacgagttccgcaatgtgatgctcaacggatatgtgtggcggcgtttccacggccacggacgtcacgaagcggcgatgggcagcaatccggatatcggcgaaaccactgaacgactcacactgttcggcgatcaggccgccgagccgactgcgcacaccgcacagttcgagcagtccggtcagtctgggcagtctgggcaaggaggcgcacgatgaagcttatctggaaaatattcgtacgtgacgtgcgccaagccacccgcaatgtgatcgccgtaatcgtggctatgggattggtgattgtgccggcactgtacgcctggtacaacatcgccgccagctgggacccgtacggcaacaccaaggccttgaaggtcgccgtggcaaacgtggataagggctataagtccgatctgatgccgatcaccatcaacgtcggcgaaaccgtgaccaatacgctcagggccaatcatgaccttgactggcagtttgtggatcgtgctaaggccatcgatggcgtgaactcaggcgaatactatgccgcgctgattattccaaagagcttcagctccgatatgatgacgctgttttcaccgaagatcaagcacgccaagctcgaatactatctcaatgagaaaatcaatccgatcgctccgcatatcaccgaccagggtgctaccaccgtggccacgaccatcgaccagacatttgtgaagaccttggcgagcgtggcgctggatttggtctccaacgtggccgattacgcgcaaagcccgcaaatggagcagtacgtcaacaacgcctccagtcatattgccaccatgtcgtctcgtttgaccggcactgcgtcgcagatggattcctatgccaatctgctcggggccgccaacagcatcattgattccaccgataagctgctgggatcaacaggctcagctgcggccacaaccaaaaaggcgttgaaacagacccgcaacggcgtctccagcctcgacaaggcattgtccggagccaccgatggcgtcggtacggcattgcagcaggccggttcatcctacgataccattgccaagcagatcgatgccgcttttgccgatgtgggctcacaatcctcgcagatatcaaacaagctgaccgatatgcaatccaaagtggaggctcaggccgacagctttggaaagtatgccgccgctttacgagatctcgccaaacaagcggcttcactgcccgtgggcggagataccgttgccgctcaactgaacgcggctgcagaccaagccacaaaggcgcagcagagcatgcagcaagccgccaccgcgttgggcgatgcggccacgcacatagcaaatggtactgccgatgccgatacagcgcgtcgagatctgaaatcacagatcgccgccgccaaacaatcgattactcaggcttcagacacgtacaagagcacgctgaaaccgcaactgaacaatctgacctcgtccatggacgaagtggccacgcaggcaagttccgtaatcgacgggcttgcgtcgaccgtcagcagcgtgtcaggtctttctggcggcgtttcagacagcctgacggatatccagtcggccttgactgacgcagctagcgctttgacccgttcggcgaagaaactcgacaacttgtcttcccaactcgcctctatcaccagtggcggcaccaacgacctgtctgtgatttcctctgcgaagcccgatgccattgcttccatgctggcggcacccgtagcggtcgaccgcatcgcgctctatcccgttgccaactatggttccgcgatggctccgttctacacgattctgtctatctgggtcggtgcgatcattctggtcgccatgttgaaagtatcgatttccgaccatgagaaggcccgtatcttagggttgggcaatgatctgccgctcggttcgggagtgggtcttcgcgaggccatgattgccgggcggattgccggaccggccgccgcgttggatgtgctgaagaagccgcgtgccgagtcttccggcaatgcgcggcagttcggtttacgcttgcaccacgaatatttcggccgatacatgattttcggtttccttgctttgctgcaaggtacgctggtgtgcctgggcgatatgttctatctcggcgtgcagtgtgagcatccgattcagtttttgatggtcgggtggttgtctgcactggtgttctcgaatattgtgtatacgctggccctatcgttcggtgatatcggcaaagccattgccgtggtactgctggttatgcaggtagccggttccggcggcacattccccattgaaacactgccgacgttcttccaggtcgtttctaaatggctactgttcccctatgcggtggatgcgatgcattcggccatggcgggctcattcggcatggaatactgggtttccatgggcaaactggcactgttccttgttccctcattgctgttgggacttatgttgcgcaagccggtaattcgcttcaacgattgggttatccgcaaccttgaaagcaccaaggtgatgtgagtgttggacggagtgtgtccgagcgccctgaacgcttagcagcctacgacctggcgtgtttggaccgtaacctgcctcagatacggcgttggcgaggcctgtggagcttctgacgctaacgtctacgtggcttgtagccctttttacgactgtgtggcttgagttgctggttcagcggtacatgccggtaactggattgtggatcgcgatgtgtgaggtgccagcatccgcaatattcgcaacggtacacccatagctcggctccacgctcgatcaggctttgatcagcggcacgctgagcctgcgccttatcgtggtacatgattttattcgacgtggcgcaacgtttaggggtgaagtaatgcatggcagaagccagtgtagagcgaccccataaccaagccagtttctggctcccctctggaggggagctgtctgcgcggcggaccgggggccgggcgtcgggctcccacggtcgcggacgcgccgcgccgttcggcctcgccgtcggggctggccgggaatggtcccgggcgtgggtctcatgggtatgcggggaggtcccggtgcccgtgcgggttcgggccgggaccggttccggatatagggaaagccccttggggcgtgtgctccgaggggcttcctgtacgtgtggtgcggcggcgtgctactctcccacaccctgtcgggtgcagtaccatcgccgtgccaggccttagcttccgggttcggaatggga

SEQ ID NO: 93 - DNA, 12184 bp, Unknown
  R206_24m  MAG No. k141_13922
aaccaggaacctcaccgaacccattcgtgcataatcgcgatggcagaaagcgttaatcattgcctcacggaatgcccctcgatcgaagtctggcagatcgacacgaatcaagccgctcatgacttcgtggctgggattccatggctccatcagctcgcctacacgatcaaacatatccaccaaaggcaacacgaacggatccatattgacctttggagacatgcctttcatcacttgaaaaacagccgatgcggctggaaccgatcgatgaatagcatcaaccgaaccaatggtgagcagaccagcaacagatggctgcaatccatacgggccatcaacaaccagctcaagtgcccgatcgaaatcctcatcagtaaaagacaacaacgagttttgcgcattggcactgcgaatacggcttctcaacttgttccgtgagtctggattcaaatcgtccaaccgagcctctggtgcaggttgcgcgctgaaatcgtagaaccgttgctgagataaacggctaatgaattgggaaacaaacagcggaacgacctcaggcgagccgtctgctttcagccggcgctgcaatgtcttcccctgactggtagatacgatttgctgactgttatccacctcaatactgactatcggcacctcgttctcatacaagagcgccacgcgagcgggaagctgcggaacagtcttattgaaaattagtaccgcaagtccattgatattgcgatgctcgtcacatacgccggtcacagtgccatcgtcttcaataccgagatacagtgtgccgccttcggtattggctagagccactacggtgtcaacaatttcatcatgcgattgaggacgcttctgctcgctcttgaactcaaccgtcaaactttctttagtcggcaacatgagcatcccctttcaccatcttgcaataattcttacatgttaacagagagttcttacatgtaagaattattgcaagatggtgaaaggggtaaagagcaatccatcctgtcatctccagcaacttaaatccgatcatcgctgctttcggcatatctgatatcagccgctggtgccagtccaattacccaattgaagctcaacacggccaaagactctacgccgcagtggattcgcgctcgatgagcttatagcccacattcacggtctgcgggaagaactcgtcgtccaggttctcgatacgccgcataagcaaggtcagcgcggtatccgccatgcccttgaaatcggtggccacggtggtcaaagtcggcacgctgtacatgctctggctcaggccgtcgaagccgataacgcgcacatcgcccggcacacttacgccatcgtccgccagaccacgcagaataccgagcgcaataccgtcgttcaggcagtacagaccgtcgtacttgcacttgcctttcttggccaagccgcgcccggcctcgataccgccgtcaatcgaccacgaggatttgatgaaatcacggcgctcgtcaaacggcagtccggccgcgagaatcgtctccttggcggcccgcatacgaatatcacgcgagccgggaatgatgttgggattgttgggatcgtgattgtcgccgacgatgccgatgcgcgcacagccacgcgcgataaggtgttcgattgccgcccgtgagccggcgtcgctcggcgcgttcacggtgtcgatgggcaggctggtgtcgtagttttccagcatgacggccgggtgccgcttcaggatatcgaccgcacgtggcgcattgatggcgatgatgccgtccgaaaacgtgtacgacagatcgttatcgtcggtaagataccgggacagttcgatgagcatgtgcgagtcgcgcttgtgcacttcctcagccacacacatggccagatgggagaaatagtcgccctcgaggcccgaggtaaggaaggtgatggtatcggaccgcccagaacgcagggaccggccagacaggttgattttgtagccgagtttgcgggcggcgtcacacacgcgttgcgtggtttcgggcttgacgtaatccttgcctcgcagggccgcggaggcggtggtggcggtcactccggccagttcgccgacatcctttaaggtcaccatcgttaccatctccgcatatcacgaaccttatcgataagaatccatagtaccgcccacatctcagccgaggatgagaccctcggtcgaggccctgcccggcgactcgaacgccgcggtcaccgtggtgagcaccgacgctgcaaacgaaaacatgtcaaaccaagaaatggacatgacggagtcattgttttccgagagggatatgccgcgtccacgggcagacgtcacgtatcaatcacgccgataccgtcatataactgttttcgatgtgagaaagctcatagcttccgaccacagaaatcagccacagcaaccccataacagcgttatagttctgtttgtcggcgtcgacaagagccagcagcgccgatgaaatgcacaccaaggatgtttagcgaattgttcgcagttcgcacgattcgatttgattcgattcgtgcagcccggatggttcacgggggcatgccgtcgtgatgtgcgtggatatgggcgatacgactctcgttcgggtcggcaggtcatcgtacaccagttacgaaaggatccgtccatatatggcaaggtttaccgagaatcgttggaccagcgcgattattcccgcactgctgattcatatcccaatcggtaccgtctattgctggagcgtgttcaagcagcttatcgctgaccgtctccacgccagccccgcctccgtggaatggggcttctcactcgccatcttcttcctcggcatgtccgccgcgtttgccgggccaatggtggagaaaaacatcaagaaatccgcactcgtctccatggtctgcttcgtggtcggcttcgccggcacgggcgtgagcatcgccctgaacttcctgccgggcgtgttcatctgctatggcgcgatcatgggcatcggcctgggcgtcggttatctgactccggtcaagaacctgatgctttggttcgccgacaacaagggcctcgccaccggcatcgccgtcgccggcttcggcctggccaaggccattgccagcccactgatggaatatctcatcggcacggttggcctggtcagcatgttcttcatcctcgccgcggtctacgcggtgatgatgttcgtcggcttcctgctcatcaagcgtccggccggctgggtgtacgatcccgcgacctcacacgtcagccgcaagacaatcctcaagaagcccgtgttctggggcatctggatagccttctatatcaacatcacctgcggcctggccctcatcagccaagagaaggacatcctgcacgatgtgctcagggccttcccgcagtatgccaacctgagccccgccaagtttgccgccgccatctccggcatcatcggactggtgctcgccgtggactccgtgttcaacacggctggccgcgtgggcttctccacactctccgaccacctgaagcgccgcgagaccgtctatcaggtaatcttcatcatgtcgattgccgtgtgcttgctgcagatcttcaccaacagcatcgacaacgctctgctgtgggccgtgctggccatgctgttcctcgtcaacgcgggctatggtggcggtttctcgacgctgcccgtgctgcttgatcagcacttcggcaccaaaaccgtctccaccacgcacggtctgacgctgagcgcctgggcgttcgccggtctgtccggcaaccagttggcctcgttcgtagttgcccacgcgcctgatcaggcccaccgctacgccgcactcatcccggtaatcaccggcctgttcgttgtggccctgatcagcatcagcctggtcaagtacctcggcgacagaaacgccacgaaggccgtcgaagaccgaggctgagctgccgcaaaacaacgattctgccggagtcgggcgcatcgatcgcatcaatcgatgtacgtcacgattttagcagaatcgttgttgttgctgttgagtacctgaggtcgtgcggcttacgcgccgaccagttcgagcatttgggggatgctctttttgccgaattcgacttgctgggtgccgtcggcgtgggtgatgacgatgcagggcacgctcatcgcgccgtactggtccttgagttcggggaagtgcgagacgtcgtaggcttcggcgcgcacggccgggctcagggaggcaatgcgctgggaagcaagcacggtttccggacacatcgtgcaggtgagcgagacgaggatcatgatgttcagcgggtccgtgatggacttcgcgcgttcgatcaggtcgtcgcccagcggctggccgggaccggccgcattgtacaggccaagcacgaacgagttgaactcgtggccggaaggtacgccgtggaaggccagaccggtgaagaccagtgaaccattgccgtccttgccggccttgccgtcgccctcagccggcacgcagatgcgcacggtcggacgggcgagcggcaggacgccggcgacgtcgaacgtggcacggccggaatcgtccaacgaaccataagtgggcagttcggcaccgtccggcaaggtgacggacagcggttcgccgaccaccaaagaagtaggcacagaagcaccatccaccgccgtgatcagccctgcggcatcaacggcaaccgagttcagcttgccgccggacagcgcaaccatctcgccgatgaaaccctgcaattccgccgaaagcggagtgccgtccagttcgagagcgagcgtgaccgggcgggtcatgcgtccgaagaccacgccaagctgctgcttgatggcggcggagaacagttcgccgggcttcttggcggcgctggctgcgactgcggcatcggcgctgcgtttggcgggagccggggcgggcgtcgtgccagcggccgaggcggcggaggcggccttggcctcggactcctcataagcagaagcagtgggacgcggcggcaccaagccggttttctcgctcatctgcttggcgtaacgctccagttccacggcggcaatcgcaccgtcggcggtggcggtgaccacctggcgcaggttcttgacgcgcagatcgccggccgcgtacacgcccggcaccgaggttctgaggtagtcgtgcgtgaccacgtaaccgtggtcgtcgagctccaccacgccgcgcaccaaatcggtggcgggcacatagccggcgaacacgaagacgccgaaggtgccggcgtcggcgggcttccacgtttcggtctggccggtggcaaggttcaggatcgaggcttctcgcaggcctccttggccggcggtgacgcccttcagctcgacctgataacgcacgtcgatcttcgggttgttcttggcttcggcggccactgcggcatcgcaggtgaagtccggttcgcgcacgagcacggtgactttggaggcgtatttggtcaggaacacggagtcctcggctgcggcgaatccgccgccgaccaccagcacctccttgccggcgaagaactcgccgtcgcaagtggcgcagtaggccacgccgcggccggcgtactcggcctcgccctcgaagcccagcttgcgcgggctggcgccggtggcgatgaggatgccgaaggtcttgaggtcgccgcgtgaggtgtgcacggttttgatgtcaccatccacgtcgagaccggtggcttcggcggagaggaattcggcaccgaagtcctgagcctgctggcgcatggtctgggtgagtgcgcggcccgtggtgcggcccacgcccggatagttgacgacttcgttggtgatggtgatctggccgccgaaatcgtccttttcgagaatcagcacgcggtagcgagcgcgggccaggtacaggccggccgtcaggccagccggcccgccaccaatgacgacgacgtcatagagattgttggtctgagtcatgaaaactcccttacatacactggctcccctctctgaggggagctgtcgtagtgagactgagggaagcatatcggatcaggctagctctcgcgagcactccccccagtcgctttcagcgacagctcccctcagagaggggagccaaggttaccgcctattcagtgtcgatcacagctggccgacaaggtcgaggctgggctcgatggtttcctcgccaggggtccagttggcggggcagacctggtcgccgtgctcgtggacgaactgggaggcctgcacgcggcgcagcagctcctcggcgttgcggcccacgttggaggagatgacctcgtaggccacgaccttgccctccgggctcacgatgaagtcgccacgctcagccacgccatcggcctcgttgtaggtgtcgaggtccttggccagcagggcggtcgggtcggcaagcatcgggtactcgatcttggcgatcttctcgttggcgtcgtgccaggccttgtgcacgaagtgggtgtcgcaggagacggagtagatctcgcaaccgatttccttgaacttggcgtagttcttggccaggtcttcaagctcggtggggcacacgaaggtgaagtcggccgggtagaagaagaacagggaccagtggccgagcacatcgtccttggtcacttcgtggaactcgttgttctggaatgcgttcaccttgaaatcggtcagttcatgctgcagaagagtcatcagcggtcctgtcgggaattgttaatcttcaagcgtttaccaccacctatcgtaatgtggtgagccaaggctcgcgcggacagaacatatgagccttatcacaccagccacagcccttgtgctgactatcatcacggcccacccttaaacaggattgagattgtgagcgttctcattatgctttgggcaaagccagattatgcatgcagtcgcgaatccgcacttccaatcgctactatgggtaccagcagtccgctgataatggaggttttcatggctcaggcagacgttgaacaggaatcgaccgcaaatgcgacgtggagccgtatgctccaaggcaatcgccgattcgccgaaggcaagcccgaccatccatggcaggatcaggagacccgccagacgctgcttgatggccagaacccggatgccgcggtgctctcctgctcggactcgcgcgcgcctccggaaatcatttttgatcagggcttgggcgatctgttcaccgtgcgcaccgccgggcaactcatcgatagcgcggttatcgcctcgctggagtacgcggtcaagaaactgcacgtcagcctgatctgtgtgctcggtcacgagcactgcggcgcaatcgaggccgccgagcaggagctggacgacctgatgcacaccatcacttccgaagccgacggctcactggaggccgcggatgcgatggacgacctcgacgagcacatcgccgccgccgaatcgattattctgcgccaggccggcatgtccgtctggcaggcgcgcgaagccgagctcgacgcgcatgaagacatcgagcgcgtacacgtggcccacaccatcgagacgctggtggaacaatcccccatcattcagcaggcattggctgccgaccagctgatgatcgtcggcgcccgttaccagctcgacaccggcaaggtcgaggtgctgagtttctgaccatcagtcagaccccgttcaccgggggtaatgcggtcgtggtacatctgtgtgcagagagatcgaagaacacggaagtctgaaccaatgccacctgcccttactattcactacggatccgccacctatacccccaatcctgcacgtgccacgaccatcgggcgtgcgccggattgcgatctggtgattcacaacccgtacgtatctcaccatcatgctcgcgtcacctttaccgacgatggttggctcttggaagacacgggtagtgcaaacggactgtccatcaacggcattcacaccacttccgtactgctgctgaacagcaccaaagtgacgctggcacaaggtgccaccatcgtctgcatcgtcggaaccagcgggccgtccacgccggcacagcccccgcgacgccctgcggcaaacgtggcccagcctgcgctaccgccggcaccatcagcgcaaccggcacaacccacgcaactcgcgccgcaacaggcacgcccagtagtgcaacccacaccaccagcaccgcaaccggcacaaccggtacaaccgcaaccaacgccagccccgctggcctcgcaccgcgtatccccggccctcgcgcacctgcaacagcaaccccgcccaacagcagtggcaccgacagcagtatcgccagtgccggtatcacccgcatcaccatctccgtctccctgcgcatccccttccccatcgaatgccgccggcaccgttctggcaggcagcacgcaagcggtaaggctcgaatcccaactcaccaccaaccgcgtgcacgggtccttcagccccgagcacgacaccacaggcgtcatcggccgcgatacctcctgcctgattcgcatcaacgattatctggtctcccgcaaacactgctcgctggaaaccaccagcagcggcatcctgctcactgacctgaactccgccaacggcacttacgtcaacggccgccgcgtcgcgaagatctggctgcgggaagacgacgtcgtcaccgtcggcaacaccgacctgatcgtgcatgaaggcgtgctgtgcgaccgcacgccgtttgtcagcaacgacgcggttatcgccgaaaacatcggactgaccgtgggcaaaggcacccggctgcttgacggcatcaacgccgtattcgccaagggcacgctcaccgccgtaatcggaccttccggcgccggcaaatcaacattcacctccatcgtcgccgggctcaacagccccacggacgggcgcgtgctgtttgatggatacgacgtgcatcagaacatcgaactgttgcgcagccgtatcggattcgtgccgcaggacgacgtggtgcaccgcaagctctctgtggacgcggcgctcgaatacgccgccaagctgcgcctgcccggctcaaccaaggccgagcgcgccgaaatcatcgacaacgtgctcaatgagctggaactcacgtctcgccgtaagaatcgcattgacagactgtccggcggccaacgcaagcgcgtgtccaccgctatcgagctactcaccgaacccgaactgctgattctcgacgaaccgacctcgggcctcgacccggcgctggatcttacggtgatgaccatgttgcgccaactggcggatgccggccgcgtggttatcgtggtcacccattcactgtcgtatatcaacaagttgtgcgataacgtgctcatgctcgctcccggcggccatccggcattcttcggcaccgtgcaggagatgagccaggcgttcaacggcaaggaatgggccgacatcttcaacgatgtcgccgaatctccggaacgggtgtattcgattactgattcacgccagcgcaccatgcaggccgagtccaccatcacgcggcacaccgagcatgagaaaccggcaaagccattccgcatcaaacagaccatcactctggtgattcgtcagctgcatttgatcatcgccgaccccggattgctgatcttcctgctgttgctgccattgctcctaggactgctgtcgctggttgtgcccggttctcatggcttgggtgagcccgatttcaaagacgccgccaccgagccgaaccagctgcttgtgctcgtcatactgggtgcctgttttatgggatcggctttgtccgtgcgagacatcgtctccgagcgagcgatttacggccgcgagcgcgcggtgggcttgtcgcccacgtcatacaccgcctcgaaactcatcgtgatgggtttgcagaccttgttgcaggcggcgattctgaccactgcggtcagcctcggcaagcccggcccggaccatggtgtggtcactgattccggcatacccgaactggtgttggcgatttggctgactgcgtggacttccgcattgttgggcgaagtcggctcggcgttggtgaagtcgggagaacagacgatgccattgctggtggtgctggtcatggcccagttggtgttctccggcggcatgattccggtcaccggccgcgacagcctcgagctggtcagcatgatcttccccggacgttggggcttctccgccgccgcctcggatatcgggctcaacgatctgctgtatggccccaccaaggtgccgatgttcaaaaaggatgatctgtgggagcacaccacggatcagttctggttcaacattggcattctggggattatggtagtcgtcttcaccattgtgctgcgtatttgcgtcagcaatgccgtggccaagatgcgtcggcgctcatagaactggatcgaaactagcccgcaaccggcttacttcattcattaggtcaattatgcgttcatttggtcactgtactccaacactgaccattgaaatgccgccattccaacgcctcaccatgccggcaacccaccaaatgaacgcataattgacctaatgaatgaacccaacccgatatttggtgctacaacgactgcaaatactgccccaaatgcggcaccgcaaattccagctgcccatgacctgccgggcggatgagtttgtccttgaatcgtcgaaggcgagcagcgcatcggaaacaccggtcgacacgtcgtccgcggtaatgacatttgaacctcgacgttgtgtggattgccacatgtagtagccaacaagctgcaccatgtacgggtatccttcagactggcgagcggcttcaagcgcatcttccccactgatggtcttgccggaatccgcaactgtttccaggaacgcattcttgacgtctggaagcggcacgttatccaattcgcggcgtagcgcacggcgcaggaatgtggttacctcgttatccagcaaatcgttgatcatatatggcaagccagcaaacacgatggcaacgcccttcttatcctcatcaggcgtatcactttcatcggcatccgtaatgacgtgctgcacggctgtagcaatagccaccaaatcatcatgcgaggccgcttgcgtctcatcgatggtgatgagaatgcccttccccttgccgagtttcttactgcccagccagcacaccccaatttgacgtgccgctcccctagagttgaagccatgtcacttggtttgaatatcctcctgatttttgtatttctcgttatcggttccgtgttctccggcaccgagttggcattggtctctctgcgcggctcgcagatcgagcaaatggagcaggaggacgctcgcggcgccaaagtcgccaaaatcgcacgtgacccgaacaccttcctctccaccgtgcaaatcggcgtgacgctctccggcttcctgtccgcctcgttcggtgcctcctccatcgccccctacctgattccggtggtcgaaagctggggcgtgcaccccggcatcgccggcggcctggtgaacatcatcctgaccctcatcatctcctactgctccatcgtgatctccgagatggtgcccaagcgcatcgccatgcagcgcaccgagcagatcgcgcgcgccgtggtgcccgccatcgacgccttcgccgccgtctgccgcccgatcatctggctcatcggcaagaacacgaacggcatcgtccgcctgctcggcttcgacccgcagcagaccgagtccgaggtgtccgacgacgagctgcgcgtgctggtcagctccaacaccaacctctccaaggacgaacgcacgattctggacgatgtgttcgatgcgtccgaaaccatcgtcgccgaggtgatgcgcccgcgtgccgacgtggtcttcatcgagggcgaccagcccttggccgaggccgccgcgttcgtacgcgaccagccgtactcccgttacccggtgaccggcaaggatttcgacgacgtgatcggcttcgtgcatgtgcgcgatctgctggacgtgcgcgatccgaacgccaagatcgtgcgcgatgtggtgcgcgaaggcatctccctgcccggcacctccaagctgctgccgagcctggaactgctgcgtaagcgcggcatccatctggccgtggtcatcgacgagtacgg

SEQ ID NO: 94 - DNA, 29534 bp, Unknown
  R206_24m  MAG No. k141_14144
cacgccaagccggcgggcgagagaacgcctcccagccccgccccggatcaggtcggcgacgacccgcatgaaaccgtcatcgtaatgacgcctgcgatccctacacatgagaaaccgcacctccgatcatcgaatctgaatcacttcagtccaacaatcggggtgcggttcactgacgggtctctttcataagtgcagggcttcatgattggttcgcaccatggtttgcgaatcactcgcatatcacggtgcatggcattcgcatattattcacgcaaaccatcaatggcgctttggaaatcctccagacctgcaaagttctggtacacactcgcgaatcgaaggtacgccaccacatccaagtcacgcaacggtttcaggatggctttgcccacttcatctgaggtgacttcggcaagacctcgggagcgaagatcctcttcgactttctgtcccagcagcttcagatcctcttctctgaccggccgcccctggcaggctttacgtacgccggaaatcactttgtctctgctgaatggctccacgccacccgaacgtttagtgaccagcagcatactggtttccaccgtggtaaaacgcttgttgcatttcgggcatacgcgacgccgacggatggaatgaccgtcatcgctaatgcgcgtatcaataactttggtgtcggggttctggcaaaaagggcaatgcatgctctccagaataacgtgtacgggcggaaaaaccatgccgctcgggtttcatttactcaaccggaacaataatgcgctgcccggcctgcaatgttccggactcgagattgttcagcgtaatcagctcacccactgtttccgatacatcatggccagcaggtgtaatagccgaagcatatgaccagagcgtatcccccggccgcacgatatagctggtcacctgcgtggcacccgtatctgattgggcccgctgagcggtaagcgcgccgaaaccacaccaggccagcgccaaggcgatcatcactgcgataatccgcccacgcacattccggcgggacgttccagcatgctgcatagctacacgtgcgctacgggcaggggccatcaccattgaaccagtcatcacgaccacctctctcgaacagatgttctatcgaacagctgttcttataatggcacaaatgttcgacacggtcaagtcgaaactcgaacagatgtttgatttcacacgaacaacacgttatgctggtgacataacgaaaggagccctgacgtgagcaccattcccctctcccccaagcagaagctggacgagtccaccctgaccgaccgccagcgcaaagtgttggacgccattcgcacgcatatcgacgaacaaggctttgctccctctttccgggagatcggaaatgccgccgggctcaaaagtccgtcttcggtcaagcatcagctacaagttttggaagacaagggcttcattcgcatgaacgcgaacaagggtcgcgccatcgaggtgatggcaggatccgccccgaatgccgaaaagccatcacaagccagcgaagaggcaaccagcgccagcaatgtggcggagatataccgattccccgccgaagccattgccgaatcacatgacgtaccgctcgttggccgtattgccgccggcgtgccgattaccgccgaacagcatgtggacgacgtcatgcgtctgcctgaacggctgaccggctccggcaccctgttcatgctggaagtccacggtgattccatggtggatgccgctatctgcgatggcgactatgtggtggtgcgcgaacagaattccgccgtcaacggagatatcgtcgccgctctgttggatgacgaggccacggtgaagaccttccgcaaggaaaacggccatgtctggctgatgccgcacaaccccgcatactcgcccatcgacggcacacatgccacgattatgggcaaggtggtcaccgtactgcgcaaattatagcctgttcgccaccagctgatcagcgtgcgctgaatcgcgctggtcgtgctatagtcgcacactgcttacgaaaccccggcctcgcgccggggtttcgtcgtattcagaccatatcgcaaatggtattgagaagcggtttcaactcgatagagcgaaggagtacatatggcccatacccatacacccgcaccatccacatccgtaaaccctgccgcgcaccagcgcaggctgattgccacgttgaccgtcactggttcggtcttcctcatcgaagtggtgtcggccatcttaaccggctcactggccctgctggtggatgccggtcatatgctcaccgacatgtccgtgctggtggcatccacaatcaccgccatactgatgcgccgcaagcccaacaacactcgtacttggggctgggccaggcttgaggtgctcaccgctgccgcgggcgccgtagtattgcttatcgtcggcatctatgcgttggtagaggccggcatgcgtctgttcggcggctccagagcggaaatcgacgatatcggcttgctgctgttcgtaggcattctgggtcttgtcgcaaatatcatctcgatcttcatccttgcctcgcagcgcgaagacaacatgaacatgaaggccgcgttcctcgaggtaatgaacgacgcacttggctcggtgtctgtggtggcctctgccctggtaatgatctccaccggatggaatggcttcgacgccgtggccggtgccgtcatcgcactgatgatgattccgcgcgccatcaagctgctgcacaacgcggtcaaggtgctgctggaggaaacaccggatggtcttgatctcgataaggtacgcgagcatctggaagacgtgccgcatgtgcttgccgtgcatgacctccatgccagcacggtgtccaccgacatgccgattcttatggcccacgtggtagtcgacaaagacctcaccatggaagatgccgccacaatcctcacccaactgcaggattgcctgcgcgagcacttcccggtctcggtcccccacaccaccttccagcttgagcccgagggctatagctccccctcctccaacgaattccacgaataaaaaatgctccctctggaagcattcagcagggtataaaaaatcgctgtacgtgtgcgatttttcgtgccgcacaaggtgaaggcctacaaaggtagttcgaaccttgtgcggtgtgaaaggcgctccgtacagcgattttttatcagaagccgaactgggcggcggtttccttcagcgtctcggcggagcgcttcagagcggcgagctccttgtcggagaccggggtgttgatggtgttgttgacgccctgacggttgaggagggtcggcacggacatgcagatgtcggagatgccgtggaagtccttgagcatggagctcacgggcaggatgcggttggtgtcgtgcaggacggcttcgatgatgtcgacgccggacatgccgatggcgtagttggtggcacccttaccgttgatgatcttgtaagcggcgttcttgacttcctggtggatctcctcgcgcttggcggcgtcgagcggatcgtggccgggcagcggggtccagtcgcacatggggacaccaccgatggtggcggactcccacagcgggacttcggagtcgccgtgctcgccggcgatgtaggcgtgcacgttcttgacgttgacgccggtctgctgggcaatcaggaagcgcagacgagcggagtccaggttggtgccggaaccgaagacctggttctcgggcagaccggtgagcttctgagccacgtgggtagcgatgtcgaccgggttggtgatgagcatgtagatggcgttcggagccaccttgaccaagttcggcatgatggccttgaggatgttgacggtagcgccaacgagctcaagacgagactgacccggcttctgacgcggaccagcggtgatgacgaccatgtcggcgtcgcggcagatctcaggatcgtcggaaccgtcgatggacacggtcgggtagaagctggagccgtgctgcatgtcgagcacttcggcttccacgcgctccttggcgatgtcttcaagcacgatctcgcgagcgacgccacgctgggcagcggcgaaggcgagggtggagccaacggcaccggcaccaataacagcaagcttcgtgggcttaacggtagtttccgccatgatggatgaacctctcttcaaaggcggtctgctgatgaatggcaggccttgtaactaacggttttcactctataaacccgctaagacgttttgctaccagcacaccaccctgtctgataacggtatggtaatgtttccaacggttgttagcgctcacaaacaaactgtgatgtttatcacgttagtcaatggactgttcgaccacctgagcggcaagatgggcgtcaacgtccgcttcaagctgtatgccatcatcgcggtactccaccttgtctaccttgccgtattcgcgtacacgagagatcagggagccagcggtatacggcagcagagcgttgacatgcacatgcgggaccggcagcagactttcgaccgcggtacgcagctcgtccaatccctcaccggtataggcggagacgatgaacgcatccggctgcagtgcggcgagtcgttcacgtgtcgcctcgtccgcctgatcggccttgttgaatacgagaatacgcggaatcgaggccgtgccttcgatgtccgccaacacgtcattgaccgcgtcgacctgagagaacgggtcagggtgggagccatcgaccacgtgcaggatcacgtcggcctcggccacctcttccagggtggatttgaacgcctcgatcagctgggtgggcaggcggcgcacgaagccgactgtgtccacgtaggcgtaagcgcgtccgtcgcgggttttggcgcggcgcacggccgtgtccaatgtggcgaacagcgcgttttccaccagttcggccgaaccggtcagacggttggtcaacgaggatttgccggcgttcgtgtagccgaccacggccactgtgggcaggccgaagcgacggcgtgaaccgcgcttgacctcacgtgccggagccatctcacgaatctgacggcgcagtctggcgatacgcgtgcgaattacacgacggtccatttcgattttggtctcgcccggacctcgcgatccgatgcccgcatccgcgcctgccgcgcgaccgccggcctgacgggacagcgaaccaccccaaccacgcagtcggggcagcatgtattcgagctgcgccaactcaacctgcgccttaccttcacgcgaggtggcgtgctgggcgaagatgtccagaatcaccgcggtgcgatccaccaccttgactttggctgcgtcctccaatgcacggcgctgtgacggcggcaggtcgtcgtccacgataatcgtatcggcttcctcacgcgccacgatgtcggcaatctccttggctttgccggaaccaacgtacgtggctgcatccggcttggagcgatgctgcagcaaaccatcgcataccaccgcaccggcggtttcggcgagcgccgccaactccctcaacgattcctcggccttggcttgcgtggtgacggcggacgaccagacgccgacgagcaccacacgttccagacgcaccttgcggtattcgacttcggtgacgtcctgcagctcgccgagaccagcgacatgcttgagctcgttgcgggcctcgcgctcctcccattcctggttggcgtcctcgtgccagccggtcgcgcgctgactgtcgtcgagcagcacttcggactgcccggccagcacaccttcaggggtaacgtcgttgttgccgcggtcgatgtcggtgtactgggtgttgtcggtcaagtgcgcctcgtttggttggaatggttcacgattcttctatggtcctttattatcatcacatgaggtgacatgctggcatagatcggcacgtaccggcataggccggctgatacaggtcggcatacgagagcggcgaatcccgcagaaatggagcgaccatggcagaacagtatttctctgcggaacccgcgtcgaaggacgtgcgccgcacattgaacgtaacgttgcgcggccatgaggcgaccgctcaggtgtcgaacggcgtgttctccggctcgcgcgtggacctcggtacatcggtattgctgaagcatgcgcccgagccgccgcttaccggcgatttcctggatttgggctgcggctggggccctatcgccctgacattggcgtttgagtcgcccgaagcgaacgtgtgggcggtggatgtcaacgagcgcgcgctggacctgacccatgccaacgcacaggcgaacggccgcacgaacattcatgcggctcaggtggacgagtccagcactcccctgcccgccgagaaccagccggcgttctgcgagacggtgccgggcgacctcacgtttgatgcgatttggtcgaatccaccgatccgtgtcggcaaggaagcgctgcatacattgcttatggcttggctgccgaagctcaaggtgggcggcgccgcctatctcgtagtgcagaagaatctcggctccgattcgctgatcccctggctggacgatgcgctcggcgaggggttcactgcgagcaaatacgcgagctccaagggcttccgtatcattgaagtccgtcatgaaatatgagtatcctgcagaacttcccgtatctgccgcgcgtgatgagatagccagcgcggtcaaacgttcccaagtcgttattgtgtccggccagaccggttcgggcaaaaccacacagctgccgaagatcctgcttgagcttggccgtggcgcgcacggcaagcagatcgtgcacacccagcctcgccgtatcgccgcgcgcacggtggccgaacgtatcgcctcggagatgggcgtgaagctcggtgacgaggtcggctatcaggtgcgtttcaccgacgaaagctcgcccagcacgcgattgagagtcgtgaccgacggtattctgctcgcccagatccagcgcgatccgaaactcacccaatacgatacgatcatcatcgacgaggcgcatgagcgcagtcttaacatcgactttctgctcggctatctgacggcactgctgcctcagcgccgcgatctgaagctcatcatcacctccgcgaccatcgattcggtcaagttccaggagcatttcgagcacgccttgcatgagaaggtgccggtaatcgaggtttccggccgcaccttccccgtgcaggtggtctatgagccgcttggcaccgcgcccgcgttgatgcgcgaagtgccgggattcgcggtgggcgcccgccccagcgacgccgattacgacgagctggccagcgccatcgcggaatccgattccgaccggccccgcggccggtccggcgactcctatgccgatgacggcatcaccgatatgcccacggccgtggctcgagcctgcgccgaactggtgatccactcctcccatgagcgcggtccccgcgatattctggtcttcgcttccggcgagcgcgacatccacgagttcgaggccgcactgcggcatcattacggtccgcgcgccgacgacatgcgccgaccggacgccatcgagatcatgccgctgttcgcgcgattgtccgccgccgaccagcacaaggtgttcgaatcgcatttgcatcagcgcatcgtcatcgccaccaatgtggctgagacctcgctgaccgtgcccggtatccgctacgtggtggaccccggttccgcccgtatctcccggtattcgaagaccgcaaaggtccagcgtctgccgatcgagccgatcagccaggccagtgccgaccagaggtccggccgatgcggccgcgtggccgacggcatcgcgatccgcctgtattcgcgtgaggattacgagacccgaccgcgcttcaccgagccggaaatcctgcgtacctcgctgggtgccgtggtgcttcacatgctgtcggtgggcgtggcccgcacggccgaggacgtcacgaacttcgggttcatcgatccgccggatatgaaggccgtgtcggacggtttcaatgagctcaccgagctcaaggccatcggccgaaagcgcggcgaggtgacgctcacccataccggccgtcagctggcgcgcatccccatcgacgtgcgtctgggacgtatggttatcgaggccgcgaaaaccggttcgccgaatcttctggcccaggtgctcgtggtcgtggcgttcctgagcttgcaggacccacgtgaacgcccggacgacaagcgtgaggatgccgaccgtatccacaaccgatatgcggatgagacctccgacttcctgacggccctgaacatctgggatcgcgtgttccaagcggacggcgacccgagcaacaacgcgctgcgccgtatctgcaaaaccgagtatctcagctggctgaggatacgccagtggaaagatctcgtctcccagctacgccagatgtgcaaggagctgaagttcaaggtcggcgacccgttgcccgcctcccgcccaggcttggagattcgccagctgccgttgaatcagcaggccgcgcattcgctgtgctgctcgtgggatgcggatggcatccacaagtcgatgctcgccggattgctgtcgatgatgggcatgcaggtggtgcgtgagcccaaggcctccgatttcgcggggctgaccggtgcggcgcgcgcccgtgcgatgaaacgcgcccagaagcagtcgaagaacgattatcagggcgcgcgcggcacccgtttcgccctgttccccgcctccgccgtggccaagaagaccccgtcatgggtgatgagcaccgaactggtggagacctctcgcctgtgggcccgctattcggcggccatcgacccggcgtgggccgaaccgttggccggccaattgacccgcaccacgtatgcggagccgcactggtcgggttcgcgtggctcggctgtggccaccgcgcgcgtgctgctgtatggtctgccgatcgtacaggaccgtgccgtgcagtggggacgcatcaatccgcttgaggcgcgcgacttcctgattcgccagggtctggtcgagggcgatattcagcagcgcttcagttacgacgactttgtgggcaaaaaccgtgacattctcgaggatgccgccgatgacgcgagccgcacccgccagctggcggacaccgtgtccgacgaggatctgttcgacttctacaacgcggtcattcccaacgatgtgaccagcgtggccgatctggcgaaatggtggaagtccgagcatgaccgtcagccgaatctgcttgatttcgacccggccaaggtggagcgtctggcatccagcgattcggtgagtctggacgattaccccgaccattggcatacgaccggatcggacggccaacccatcgacctgcgtttgagctacgtatacgatccggccgacccggccgatggcgtcaccgtgcatgtgccgttgaaggcgctctcgcgtatcacgcccgaccagttcacatggaatgtgccgggcctgttggatgagctgattctgtcgatgatcaaggcgctgcccaagcagctgcgcgtccagttcgtgccggctccggatgccgcgcgtgcgattcgtgactggatcgacgagcattacccggatctgccgggctcgggctcgcagcagaagccgaatctgccgccggtggatgaggatggcacgaccgttggctggcctgatttggcacatgtgttcaccaaggcggccatcgccaccaagggtgcgcagattcatcccgaagtgttggggccggaactggtcgagcgtctttccccgtatctcagggtcacgttctcggtggagcagcaactgccggccggcaagcaccctcgtggacgccggcatgcgcgcggccccgtcaaggtgctgggtgtgtccaaggatctgaaggcgctgcaacgcaagttcgccgcgcaggcggaggcgtcggcccgtcaaatggtcaagaagcaggccgatcaggctggagaacagggcaagctggtcagtcaggcgaacctgttgcataaggcgggtgccaccaccgagtcccgggccacgatgctctggcgtggcgcattggatgcgctgcggttgccggccgaacgcatttcgtcgcgctggctgggtaccgaggcgttgatgctggcttctgctccgtacaagttcaccaaggatctggtcgaagacctgcagctggccacggtcaaacggctgatgccgaatgtcgacaggctctcggacgatgaggcgttggccaatgcggtgctcgatgtgcgcgaagtgtacgaggacaccgtctatcaggtggcgcatgacgtgatcgccgtgctcaaggcttatgccgaagtcgacaaggccactggcggcaaggctgatctgccgatgctttcggtgctgcagtcggtgcgcgagcacatcgccacgctggtgttccccggattcgtcggcgccgctcccccggacgcgctggcgaacatctcccgatacctgcaggccgatctcatgcgcctggccaaggcgaagaccgacaagaaccgcgacgtgcggtgggcgtgggaggccgacgaggcccgcacgctggtcgacaaggcgatggccaaggccaaggcggagccggccggcccccgccacgagacgctgatgaagcaggcgaccgccgcccgctggatgctcgaggaattctacgtgtccctgtgggcgcaggagcttggcaccgccaagccggtgagcctgcagcgcatcaagaaggcactggcgtagcgatggcgacgacgcaacggcgcaagccggccaatccgcgcggcagggcgaacgtgattgtcgcggggcggggcgtgtcaggaggcaatcgcaaacgtcgcccgggcaaacgcccgcgcaatcgcaggtatccgctcagcccggcgcgctggtggaagcgggccgggttggcgcagcgcgtcgcggctgtgctggtcaccgtggtggcggccgcatgcgtggtcgcgctggtcgtgggcactgtgcgggtcgtccagtggcgtcgcgacgtgcaggaggccgaggcccgccagctgcagctgacgcagcaatacgacttcaatcccggcgacatcatctcggacggccagttcttcaacgccaatgcgatgagcgaggccgaggtccagtcgttcctcgacaagcagggcgcggcgtgcagcggttcccggtgcctgaaaaccatgaccttcgacaccgaggaccaggcggcgaacgagtattgcgcggcgtacgagggcgcgagaaaggagaccgcggccgcgatcatcgacaagtcggcgcgcgcgtgcggcatcagccagaaggtgctgctcaccgtgatgcagaaggagcagcacctggtcacggccgtcgatccgacggacttccagtacaaggccgccatggggctgagctgcccggacaacgcgaactgcgatccggcctatgccggcttcttcagacaggtgtacggggcggcgcaccgctaccaatactacgtggcgcatgaaagcgcctacggctatcacgccaacgcgctgaactacatccagtaccacccggatgccgggtgcggcggcaccaacgtgtacatcgagaacaaggcgaccgcgctgctctacatctacacgccctaccagccgaacgacgcctcgctggcggccgggttcggcgagggcgactcatgctccagctacggcaaccgcaacttcgccctcatatacaccaactggttcggtgccgcgcgccgataggggcgggaacggcaaaaaaccgaaaccacggtaaggctaggtgtcatccgcgccgtcgccgccccgccgcacggccggagaaccggccggatgacgggcggcacggctcacaggtcgatcttcggggaggcgtcgagcagggtacgcgtgtactcggccttgggatggttgagcacgcggccggtctccccgctctccacgacgcgcccgtggcgcagcaccgtgatcacgtcggacatctcctgcacgatgcccaggtcatgggtgatgaacaggcatgcgaaaccgtgctcgcgctgcagccggcgcagcaggtcgagcaccttgcgctgcacggtcacgtccagcgacgacgtcggctcgtcggcgatgagcagcgacgggttgagcgccaaggcgcgcgcgatgccgacgcgctggcgctggccgcccgacagctggtgcgggaaccggccggccacatcggcgggcagctccacctgatcaagcaattcaaggacgcgcttgcgccggtccgtctcgctgagcccgccctgcacgagcatcggctcgccgatgctccatgccacggacttgcgcgggttgagcgccgatccgctgtcctggaacacatagcccatatgcttcagaatctcgcgcttgcgcctgccatgcgccttggcgagatcctccccctcgatgagcaccgtgcccgaggttggcgcgagctggccggagatcaccttggcgatcgtggtcttgccggctcccgattcgcccaccagcgcgcgggtcctgccggccaccagatcgaacgagatgtccttgacggcgaagctgccggccttgtacgacacggccacgtcgttcacctgcgtgatgcgcctgccgccgccgggcgcgtcactttccatgatgcgttcgccgccggccgcatgttcgccgtctgccgcatgctcgtcgatgcgcaggcgcggcacggcgtcgagcagcatccgcgtgtagtcgtcggacgggtggcggaagacctgcgcgacgctcccctgctcgacgatcacgccgttgtgcatcacgtacacgtcctgcgcggcctgccacaccacgcccatgtcgtgggtgatgagcagcacggccagatcgaggtcgaccgccagcgaggagatcagggcgagaatcgccttctgcgtggtcacgtcgagcgcggtggtcggctcgtcggcgatgagtaccttgggtcggttgatgatcgccatggcgatcatcacgcgctgcagctggccgcccgacagctcatgcgggtacgacgaccacacgcgttcggcgtcgtcgagcccgacctcgcgcagctgttcgagcaccttggccttgcgctcggcggcgctgagctgcttctggtggtatttgagcgattccgcgacctgtacgccgagcgtgaacaccggattgaacgcggtggacggttcctggaacaccgtgccgatgtattcgccgcggatgtgttgcagcggcgcgtcggcggccagcagatcgatgccgcggccggcggcatccttgccgtcgccgcccggaccggagtccggcccgtcatccacaagggcgtcgtcgaggtacgcgtggcccttcacgctggccaccgacggatcgagacggggcagcgccatcgccgtcaccgacttgccggagccggattcgccgaccagagcggtgatgcgccccgggaacagcctgaggctgacgccgtgggtcacctcccgctcgtcgaagctgacggccagaccgtccacggtcacgatcgcgcgtggttcactcattggaagctccttggatgcacaagcgttggaatgcgtccggcgcgcgcgccagcggaccatgccgccggcgcgcgccggatgcggatgccggctcagttcgcgctggcgagcgagacctgcgtgtagtccgggtacgccgggaagttgccgatgacgaagttggtcacgttcgatccgtggatgaacgtgttcttcgaatagatcagcggcacgaccggcgcgtcggccatgatcgtcttgtcggcctcggcccagatcttgccggcctcggtctgatcgatggtctcggtggccttcttgatcagctcgtcgaccttcgggttcgcataacgggccaggttgtagttgccgtggccgatctgcgaggagtcgaacagcggggagatgttggcgtagggcgacgggaagtcgggctgccacgagctgatggccagatcgtagtcgcccttgtcgttggtcagcgtatcggaatacacatcgtcgttgagtgtctggatgtccaccttgacgccggcccgcttgaggctcgtctggatcgaggaggcggtttcggcctgagcggaggtggcgatgagcttgagggtcggggcctgctcgcccgactccttgatcagctgcttggccttgtccacgtcgccggtcggatcggccttgtacaggtcgtagtcctcgcggccctcgatgccgggcgtaatgagcgtggtggcgaagttgccggcgatctcgccgccggaagccgtctggtaggccttcttgtcgaccgcgtactgcagcgcttggcgaatcttcgcgttcttcacgtgttgggtgttgatggcgaggtattccagcgcgccgtcgccgctggtggtcagcagcttcttgtagttcgggttggcctgcgcctgcgcgagctgcgcggccggcacgaatccggacaggaacgagttcttgccttcaccggtgccctgcatgatcgactgggcggccacagaggtgtcctgtcccatcttgaacacgatcttgtcggggcccgcggtgcgcaccggatcggtcttcttgtcccagtaggtgttgcgcacgaagacggcctgcttgccggcctcgttcgactcgaccttgtacgggccggaggccaccggcagcttgccgtagccggacgccgggcccttgccgtcgggcacgggggtgaacgcggcgagcgagacgacccacggccagtcgccgaacggcgcgttgaggtggaagatgatggtcttgtcgttcggcgtctcgatggagctgagctcctggccgtcgaacgggccgtggtagtcctgcgcgccctcgagcagcgtcttgtggtagctcaggccgccggtcagcgagtcggcgaaggaacgctccagcccgtacttgacgtccttggaggtgatgggcgtgccgtcggagaacttgagcccgttcttgagcgtgtacgtccacgtcttgccgtcgtcgctcgacttgccggtgtcggtggccagatcgggcacgaccttcgtctcgcccttgtcggtgatcttccacgcggtcaggcggcggaagatgttgccgttcgtggtggtcggcagaccctggctcttggccgggtccagatccatctccgtgctggacagcagcacgttcagcgtgccgcccttgacggtggtgccgctcgccgagccggtggcggcgttgtcgttggacgcgccgcagccggacagcgccagtaccgcggcacaagcccccgccgcgaatacgcgccatgcgttgttcttcatgatggttttcctctctatcggtgccggtccgtggagcagaccggcaagtatcgcgtgttgcggccgcagccgcactacttcgtgccgagcgcgaccctggggtcgagcaggctgtagcagatgtccacgatcaggttggcgacgatgaccagcacggcggcgaacatcgtcgcgccgaccagcacctgcaggtcgaggttcgacacggaatcgagcagcagcgagccgagcccctgcatcgagaacaccttctcggtgagcaccgcgccgccgagcagcccgcctagatcgaggccgaacatggtcatcacgggcagcagcgcgttgcgcagcgcgtgcttgaagacgatcaccgattcgggcacgcccttggagcgggcggtgcggatatagtcctggctcagctcgccgatcatctgcgtgcgggtgaccctggtgtagccggcggcgctgagcacggccagcaccagccacggcagcagcagatgcgtgaaccagccgacagggtcgtcgtggaagttcacgtacccgccgctggggaatatctgcagcaccagcgaaaaggcgatcaccgtcagcaggccgatcaggtatgacggtgccgaaacgcccacgatcgacagcccgagcagcgtgcggtcgatcagcgtatcgcgcttgagggccgcccacacgccggtcgccacgccgatgaccagccacagcacggccgcgccgaccgcgatcgacgcggtgatcgggaagcggtcgaggatcagctggctcaccgattcgttgagacggaacgaatacccgaggcatggcgccgagcagaccacggcgccgccgccgctgccgaaggtgcgcccgacgaagatgcccgccacgtaattgcccatctgctcgtaccacggcttgtcggtgcccatgaaggcggagacccgctgcagctgctcgggcgtgcacggcttgccgcacgacagctgcgccggattggtcggcagcaggaagaagatcaggaacagcgccagcgtgatgagcaggatgacgacgatcgagctcgccacgcgcttgccgatgtattgcaggattctcatgcacgcacccccttgcgcgggtcgatggcgtcgctcaggccatcgccaagcaggttgaagccgaaggtcagcaggaacagggcggcgcccgggaagatcagatacatcgggtcgaccagggcccactgcacggcgtcggagatggaccggccccatgagggcgtcggcgggttcatgccgacgccgaggaacgacaggcccgcctcggcgccgatgcgcccgggaatcgacagcgtgatgttgacgatgagcagcggcatgaggttcggcaggatctgatgccacagcacatgggcaggcgaggcgcccatcaccttggacgcgacggcgaaattgcgcttgctcagcgtcagcgtctgcccccggacaagacgcgcgatgccgggccatccgaagaatccgagcactagcgtcagcagcaccggcctcgggaagccctgcggcaccaccgccgacagcgcgatcgcgaagatcaggaacgggaagccgaagaagacgtccatcgtgcgcgagatcagcgcatcgaccaacccggggaaatagccggccagcagcccgagcgccacgccgatgaccagcgagatgaccgacgagacgacgccgatgcccagcgagatccgtgagccgtacgccacgatggagaacaggtcgacgccgcgcagcggggtgacgccgaaccagtgccgggcactgatgccgccgccgaatccggccggcaccgacccggcacccaaggcctcgggatgctcggcgtacgggtcgttgccggtgatggccgacaacggcccggccagcggcgccagcagcacgaagaacagcacgatggcgccgccgaccactatcgatgagcgagcgccggaacggagaacgcgccgccgtctttccgccttcggcgcggctttcgcagtcgcatccgtcatattgtcatccccattttcacgctgaacatgccgataatcatcaatccgcgcaggtgggcgcccgtgagccgggtccccctgcagccggtgtcctaacattaaggtttcgcagcaggatgacatgctgtggccttatcggttatttggatagcaggttatcaatggacggcaatcggcggataaggcatgccgcggggacacgcgggaaaaacccttcgttcccgcgcgtcacgccacccgtcattccccgaccgggctgacgtacggacgcagcagtgtcgtggtgccggctgccagcaacgcaaaaatcgcgccgaccgggccgagccaggtcaggccaaggaggtcgttgaccaggccgccgaccgcggagccgatggcgatgccgatgttgaacgacatggaattcagggaggcggccagattcaccgaaccgggatgggattggtaggccacatccatatacagcacctgggaagcggaattctgcagatacatgagcatgccaagcgccaccagcagcagtgcgccgccggccggcaccagcgaggcgaaagccagcaggcacaggcagacggcctgcacgcagtagatcggtcgaatgtgggtcagcggctcgacccccctgccccgatcggccagcttgcctccgtacaggttgctccacaggcaggcacagccgtagaccaccaagccgacgctgatatagcgttcgggcacaccgatttcgtcgcgcatgatcggcgagagatacgtgtagaagacgtaggaggcggctgcgccaaagaccacatccgccacgccgagctggatgcggcggtcgaagaacagacggaattgcctcaggaaaccgatcttcgccggatgtgagttgcgtggcagagacactgccatcgatgccatcagcacggcggtgagcaccgaaaccaaggcaaaggtgacacgccagccgaaagtattggccacccaagtgccggccggtacgccgatcacagaggcgatggagaaacccgagaatacccaggcaatgaacttggtgcggtatttgtcggtggtcacgtcgggcgcgaaggtcatggagatggccaccagcgtgccggacaccgaggcgatgagcagtcgggcgatgagcagcaccggatagttcggcgcgaaggcgcacaggatattgccgacgaggaacacgcccatcaacgtcagataggtgagaaagcgcgggaatcgggcggataatgcggatccgagcggcgtgcagggcgcgtacacgaatgcgaagatggccaccagattacccacggtcacttcggagaccttaagtccggatgcgatgtccggcaggatgcccactaccacgaattcgctcatgcccagcatgaagctggcgaagatcaggatggtgaccggcagattgaagaagcggtcggtgcgcgcggtgttcgcaggtgtgttcgtcatgggtgctctcttgagtgctctcgctcgtactacaagctgattcgtcggttacgtcaatcgtttttcgtatcaactcagcgacaacactattcccacctctgcccgctacccaccaccacgacacgctatagaaaaccccgccgatgaccaatcatcgacggggttcggcacatgtgcaacgcttgcgattacagcttcggcagatacttcttcagctcgtaaggcgtgacttgctggttgtactcctcccattcctggtgcttgttgtccaggaagtagccgaaggcgtgttcgccgagcacgtcggccacgaagtcggatttctccatgatcttcagcgcctcgtccagcgagcgcggcagcggctgaatgcccatagcctgacgttcgccgtcggtgagctcccacacgtcatcactggtgggttcgcccagctgcatctgcttatcgatgccatcgagaccggcggccagcagcaccgagtaggcaaggtatgggttggccaccgggtcgagcgcacggaactccatgcgcgcggagttgcccttgcccggcttgtactgcgggatgcgcagcagcgcggaacggttgttgtggccccagcagatgtagcttggtgcctcattgccgccccacaggcgcttgtacgagttgacgtactggtcggtgaccgcgcagatttcggccgcatggtacaggatgccggcggcgaactggcgggcggtcagggacatgttgaactcctgaccggcctcgtagaaggcgttggaatcgccttcgaacaggctcaggtgcgtgtgcatgccggaaccaggcgcgtcggccaggggcttgggcatgaagctggcgtgaatgccacgctccaaggaaatctccttgaccaccgtacggaatgtcatgatgttgtcggccatggtgagcgcgtccgcgtatcgcagatcgatctcgttctggcctggccccgcctcatggtgcgagtattccaccgagatgcccatttgctcgagcatgttcacggtggcgcggcggaagtccatgcctgggctgcgcggcacatggtcgaagtagccgccctcgtcgatcggggtcggggccttggaccagtcgtcctggctttcgaacaggtagaactcgatttccggatgcacgtagaacgtgaagcccttgtccttggccctggcgagcgtacgcttcaacacgtgacgtggatcgccgagcgaaggctcgccgtctggggtcagaatgtcgcagaacatgcgggcggtaccttgcgggccaccgcgccacggcaggatctggaacgtcgcgggatcgggttgaacgatcatgtcgtcttcggacacgcgggtcatgccctcgatggcggaaccgtcgaagccgagaccctcctcaaacgcggcttccagttcggccggagcaatcgccacggacttcagtgttcccaacacgtccgtgaaccacagacgaataaagcgcacgtcgcgttcttcgaccgtgcgcagcgcaaactcctgctgtttatccatagtcgcctatcgttccataaccgtgttacgaggggcgttaacatctcactgtttgtcacctgcgagtcgcgagatttcatcaacatgccccggtccgcatgtcaggcatggttcgggcccatgccggcacggcactatggtagtgactatgagcgaaccggcgattcgatcgcgatcgccaattacatgggtggcaccgacgaattcgatcaggccattgcctcgttcgccgtcagctacgccgaacagaatgatgaagactacaccgtcttcaaaaagctcctcaaatccggcgaccttccttgctgagccgttaagcggacagccctgtgggctgtccgtaggcgaggcctgagtgaagcgatagctgagcaaaggtagcttaacagtctcgctaaggcgagtcctttgcctacttcgcgactgcgagcgcttcctggagcgtgaacgcacgtgcgtataacgacttgccgaggatggcggaatcgacgccgatctcggccagttccttgatggcgcgcaaatcgtccagcttggagataccaccggaggccgtgaccttggcgtcggtgcgttcggcgacttcacgcagcagttggatgttcgggccggacatcatgccgtccttggccacgtcggtgaccacgtaacgcgagcagcccacggagtcaaggaacttcatggtctcaaacaggtcgccgccttcgcgcgtccagccgcgcgccgccagtgtgtgaccgcgcacatccagaccaacagccacacggtcgccgtacttcttgatgaccgaagcggtccaatccgggttctccaaagcggcggtgccgatgttcactcgggcggcaccggcctcaagggccgcgtccaacgaagcgtcatcgcgcacgccgccggacagttcgatgttcacgcggtcgccaagctcatgaacgatttcacgcagctgatcgcgattgttgcccgtaccgaaagcggcatcaaggtcgaccaggtgaatccattcggcaccggcctcaacccaggtacgggcggcctcaaacggcgaaccgtaatcggtttcggaaccggattcgccttggcgcaggcgcacggccttgccatcgcgtacatcgacggcgggcagcagagtcaacgacataagaagagcctttcttcagttacttatacataatttgagctctctcgtcagaggggagcttcatgctttttacagcgtggcgatccagttcttgaggagctgggagccagcgtccccggacttttccgggtggaattgcgtggcggacagcgggccgtgttcgtaggcggccacgaaacgcgaccggccgtacgagcaccagctcacgcgttcgggcgcaccgctcagatcaatgtcgaagcgggacgtatccgccggcttcacttccatcgcggcgtaggagtgcacgaagtaaaaccgttcattctccacgccgttgagcagcaccgaatcgggggcggcctcgatcgtgtcccatcccatgtgaggcaccacgtcggcgtccagcaggttcaccgttccgccgatcagcccgatgcccgcggcatgggccccgtgctccagaccgtgttcgaacatgatctgctcgcccacgcacacgccaagcaccgggcggccggcgcggatgcgatcatagatcacacggtcgccgtcgaccttcttcagtccttccatgcatgcggcgaacgcgcccacgcccggcacgaccagaccgtcggcctccaacgactgccggtagtcggaggtgagggtggtgtcgacgccaagattggcgagcgcacgcaccatggaacgtacattgccgaaaccgtaatcgaaaacaaccgctgtggtcatattctctcctatcccctactggttggttggcgtctattcgatgcgggagccgcgtccgccacgcccacgcttggtatggttggcgagaatctgcatcgcctggtcatggtcgagtccagcggaatccaccacttcgaacccttgggtcttgagttggttcagggttacgatgccgagcatcaggtcctcgacgaagcgcggtgtggaggtgaacagcacgggcggcgcgaaactctgtccggcctctccctgcacgtacatggccacttcgagcttgtcggcacgattgactgcaagaatcacggccatgccggataccacggtggtcaggtccttggctgcggcttccgggccgtcgccgtccagattcttcagcaccgcgacggccccctgattggcaccgacgcatgcggcggagatgtccgacagctggcagaacgcggccaacagttcggcggaggcaagacgggtgacgatcagcgccaccttcgccttgttacccaacagtccagcgagttcgttgtcgaagccgagcgaggggtcgaccacgtcggccatggcctcattcaccgcatcagcgaccgacccggtgacgtcgtcggccataggctggccggaatcagcggaagccttatcagccgtatcatcattcgcgtcggaatcggacttcgctgaagcagcgtccgccgttttatcggcatcactggtatcactggcatcgccggatgccgaatcgtccgcgaattctttctcgaatccggcgagcgcggcctcaagctcctcgtcggagaagtgcgattcgtccggatcgaacttgtcgtcggccatcacagggctcccttggtgctgggcacgccgtctacacgcgggtcgatttccacggcgaagcgcagcgcacgggccagcgccttgaattcggcttcggcgatgtgatgcggatcacggccggcgagcacctgcatgtgcaggcagatgccggcgtggaaggcgatggattccatgacgtggcggaccagagagccggtgaagtggccgccgatcatgcagaattcgtagccttcgggctcgccgctgcacacgcagtacgggcggccggaaatgtcgaccacggccttggccagcgcctcgtcgagcggcacggtggcgtcggcgaagcggcggatgcctttcttgtcgccgagggcccgcttcagagcttcgccgaacacgatggccgtatcttccacggtgtggtgcacgtcgatgtcggtgtcgccgtgggcgtggatggtcaggtcgatcagcgaatgcttgccgagcgcggtcatcatatggttgtagaacggcacggatgtatcgatatcggttttgccggtgccgtcgaggttcagttcgaggtcgatgtgtgattcgctggtttcgcggacgatgtgcgcggttcttgccatcatgtctcctgtgtgattcgtcatattggattgcggcgggactcgaatcgcttcgggtctcgccgcaatcggaaagaaacgtcccttatgctgcttccactatacgaagcgcttcaacaagggcgttacggaaggtttccatctcctcgtcggtacccatgcacacgcgcagccaaccgtccggtccgaccacgcggatgagtacgccgcgcttcaggagctcgtcgaagatggcttcgcgcttgtcgaagtgcccgccgaacagcaggaagttcgagccggattcggccacttcaagcggctggtccttgtaggtctgttccttgagccatgcggcggtggcctcgcgggtttcgcgcagatgctcgacacggctcagctgttcatcggtgtgttcgaaggcggccagtgcggcggcctgggtcacggcggacaggtggtacggcatacgtacgatgcgcacgcagtcgatgatgcccttggatgcggctaggtagccgactcgcgcgccggcgaaggcaaaggccttgctcatggtgcggcttacggccaggttcgggtggtccttgatcaggctcacggcgctcggggtgccgggcttgcggaattccacgtacgcttcatcgatgacgagaatcgggtgcacgccctcacccgcgccggccacttcggcggtttcgcaggcggcgagaatacgctcgatatcctccatcggcaacggggtgccggtcgggttgttcggactggtgagcagcaccatcgagggcttgacctcggcgatggcctcaagcaccttgtcgacgttcaacgtgaagtcggcgttgcggtgggcgagcttccaaccggtgaaggtgtcgcgagcgtactccgggtacatggagtacgtcgggtcggcaccgagtgcggtgcggcccgggccgccgaaagcctggaacagctggagcatgatctcgttggagccgttcgcgccccacagctcgtccacgtccagacgggtaccggattcacgggccaggtaatcggagaatgcctgacgcaattcaatgtgctcacggtccgggtatcggttgagtgtgggggcgatttcacgcacacgcttggcgatggtgtcgcatacggccgggtccggcgcatacgggttctcgttgacgttcaggcacaccggcacgtccagctggggagcgccgtacggctcctcaccgatcaggtcgttgcgcagcggcaggttttcgggaatcgagctcatcgcagaccggctcccctctcctgctcgcgcagggtggccttgtcatacggatccttgacgaagcgggagagcacgcactcgccgtgggcgggcaggtcctcggacaccgcgaaggcgttgatgcgggcggcgagagccttgaggccttcctcgtcgtattcgatgacttcgaccggcttcatgaacgtgtgcacgccgaggcctgcggcgaagcgggcggtgccgccggtgggcagcacgtggttggaaccggacatgtagtcgcccagcggcaccggggagaacgggccgcggaagatggcaccggcgttcttgatgcgcttgacgacagcatcggcatccttggtctgaatctcaaggtgttcggcggcgtaggcgttggccgcgtcgatggactggtcaagaccgtcggtcagcacgatggcagactgggtgccggacagcgacgtgtggacgcgctcggcgtgctcggtacgcggcacgcggtacttgaggttctcctgcaccttgtcggcaatcttggtggagtcggtgaacagcacggaaccggcgagctcatcatgctcggcctggccgatgaggtcggcggccaacaggctcgggttggcggtttcatcggcgatgatgccgatttcagtggggccggcgaccgcgtcgatgcccacgaatgcggagaccagtgacttggcggtggccacgaagatgttgcccgggccggtgatcttgtcaaccggatcgcacaggatgtcgccgtcctgcggctcgctgcccttggcgccgtaggcgaacatggcgatggcctgagcgccgccgaccgcgtacacctcgtcgacgccgaggatggcgcaggtggcgagaatggtcttgttcggcaggccttcctcattgtcgcgggcgggcggggtggcgatggccaacgattcgacgccggcggcctgggccggcacagcgttcatgatgacggagctcgggtagacggccttgcctccgggcacatacaggccgacgcgctggatcggaatccaacgttcggcgacgcgagcgccttcggccagatcggtgtagaagtccttcggcacctggttggccgccacggcgcgggcgcggcgcacggattcctcgatggcggcgcgcacttcggggtcgagcgtggtcagggcattctggatcgcttcggccggcacgcgcaggttcttcggacgaacgtggtcgaacttctcctcgaagtcgcgcagggcagcggcgccgcgctccttgacatcgtccagaatcggacgcaccagatcggtggcttcggaagtacccattgcggcacgcggcatcgcggcgagcagttcggcacgggacagtttctgaccacgcaggtcaatgattcgcatgatgttctcactcataaagccccatcgtaccaatgtgagggtcctaagcgtcgaggaacgcccatgttcacccgtatcgtgagattatcgtgcgtgatgtggattcgtgatgcaggttattgacgcacgccaaatgcccgagcggtctcatcgataatcggcatgtcatgtacggcgacgtgactcacttcgaaccatcgcggaccaatggctaattgctcaaccaaggcttgcactgcgtcgctactgccttgtgcttccagctcaaccgagccatcgcggcaattgcgcacccagccctgtacaccaagtcgacgtgcctgagtcaccgtaaaataacggaatcccacgccttgcaccagtccggtgaccgctatatgtttgcggaccaaattcgctgattgcctcatgatgctcagttcctaatccatcgttcgcagcatcgggtagaggctcaggaatcgccggtatgcgtcggcatatgtgcgtgcggtgtcaggattcggctggtatacagtgcattcgcatactgattgcagcaggtctggtacattgaataccaacgaggccattgccactgctggcagaatatcggcattggcgaacacttcgatgggatgctccaacacatcggccagaatctggcaccacgcattttctctggccccgccgccaatcagggaaatctcggtaggctcagcatcaaagctttccataccttgacgaatggagaaggccacgccctcaagcgcggcacgcatcatgtctgccttggtggtgtctggatcgaggcctacataggccccgcgaatattcgggttcattacggggaaccgctcccctaccagatagggcaggcacatcacaccgttggagccgggtttggatgtttcgataagctgatgtgcttccgcgtaatcaccatcggcgaatacgccggtaacccatttatgcacgtcgccggcgttgaggaatggcaccgcattcacgaatccttcttccacaccagatgccagattcgcagcacctggcttgtcggtgaacggttcgggcgaaacggtggcgatccaacctgaggtgccgatattgatgttgtattggccggggcggctgacaccgctggccagcgtggtggcacccgcatcgccaatgcccgcgtataccgcagttccggcggagaaaccggtgcgttgtgcagcggattccgtcactgtgccaatgttgtcttgcggattgtgcaggtgtggcaacatggtcatgtcgattcctgcggcctcgcacaattcggcatcccattggccattacggatattcatggcaccggctgtggaacaagccgccacatcgcccacgcattcgccggtcaattgggcgatcaagtagtccttggaactgatcaatacatgacgaatgcgcgcgtacgtttccggctcgtgttcacgcagccacatcaacttgggcaacggcaagcagccttcgagccggttgccaacggtgttcaggaaacgttctactccaccctgatatgtcttggcgagttgcttggcctgttcctcggctcggccatccgaatacagaatggcattgcggacgggattgagctcgccgttcaaagcaataacatcctgcatctgaccgctgaaaatgatgccacgaatgcgagtcacattgaattctgactcggattgccgcgcctgctcaatcatgtgcctggaggccgagcagaaagcttgccaccattgatcggggctctgttcccgatagtcgccgttgataataaggttaagctcactactcgcactggctacgatacggccttgcctatcaaccaaggcacccttcaacgccgtggtccctgcatcgaatgcagccacatattcctctgccacgtgctctccccttcaatctgggttgtgattctactggttattatcgtagccgcttactcgttgcattcattaggtcgatttcacgttcattaggtcggtatgccgtaagacggctcttcaggaatggcgtaatgactgggttctgatgccgaagaccctggacccattgacctaatgaatgcaataatgacctaatgaacgagaatcacgccatcattacgcaattctttgcccgcgaaacgcggctcattgcatcgtcttgtttctaaaataggaaattgaatgaacactacgaatagtgaggcattatggcaattcaatcgacaattatgctgaacaacggcactgtcatcccgcaggtgggcttgggcgtattccagacaccggatggtgatactacagtgaacgcggtgcagacggctctggagaatggctaccgccatatcgataccgcaatgatttaccgcaacgaagcctcagtaggtgaaggtattcgccgtgctggtgtgccgcgcagcgatttcttcttgaccaccaagctgtggaatgacgatattcgcgcacgccacggcaaggatgcattccaagaaagcctcgaccgcttgggcgtggattatgtggatctgtatctgattcactggccggcagacggctggcagcaggcctgggatgacttgcaggagatttatgcctctggccgtgccaaggccattggcgtcagtaacttccaaaagcatcatattgatgagctgctgacccacagcgatatggtacctgccgtagaccagattgagtcttccccacaattcaccaatcaagagctcattggccagctgcgtgccaagggcatcgcaaccgaggcttggagtccgctcggcggtaccggcggcaacctgctgagcaacccagtattggccgagatcagtgccaagtacggcaagtcacctgcccaagtggtgattcgctggcacatccagcgcggtatcgtcgtgctgccgaaatccactcatgccgagcgtatcaagcagaacttcgaggtcttcgacttcaacctatcagtcgatgatatgaccgccatctccgccatcaacaccggcaagcgcaacggtgctgatcctgacaatttcaatttctagacctttataggtccagatacgcaaagagggaactctccgtcatttgagggttccctcttctatatgctttcgattcggccacaccctaggtgcgagagcctatgtcttgttggtttcggatatagggaaagccccttggggcgtgtgctccgaggggcttcctgtacgtgtggtgcggcggcgtgctactctcccacaccctgtcgggtgcagtaccatcgccgtgccaggccttagcttccgggttcggaatggga

SEQ ID NO: 95 - DNA, 25645 bp, Unknown
  R206_24m  MAG No. k141_14649
cccgttgtctatttagaagtgcaacatccttgttgttcggttaatgatagcagttcgtcggcgaatgcctcggccggggtgcggtagccgagcacgcgcatgggacggttgtcggtctcgtccacgatggcctgtatctcgtcggccatggacgggtcgatgcgcgtgcgcttgggcaggtagcggcggatcgcgccgttgcggttctcgttgccgccgcgccggcacgacgggtacggggcggtgaagtaggtggccatgccgagccgttcgcgcagttccgcgtggcgggcgaactcggtgccgttgtcgtgcgtgacgccggtcctggcgcggcggcgtccggccttccggtgcgcggggccggcgatgtggcaccggccggtccacggccccgtcttgagacgctccggccggtacggccggtaggattcgttctcgttggacgggaaccatgtgttgcgtttgattccgcggctgaccgtggaggcgtgtctgccgatcaggccggcgatccgccgtatgctcgtcccgttgccgatctctatccggatgatccgccgttcctcttccgacaggtgcgaatacacttgacccaaggtgcgacaccctttcactggttatctggacaatctccaatctaaagggtgtcgcactttcaaatagacaacgggccacattttcatgctttatgcaaaaatgtgaggcatacgcacattccccatcaaacgcacaggtgcaagaatggcagcaattcgccatttcttgaaatcaccatgtgcgtttgacggcgcgtaagcctcaccttgttctcagcaggaccgaatttctgtgagctccctatagcgctcccctacgcaatatgtccgcaaacgaccacaccacatgggcgatacgcgccaattcggcgtagcggccgatggacagccactgcacacggtaccgttcgaaccacaactccagatcggcggcaagacgggcgcggcgcgaggcatccagcgcacggccggtcacatccttggtgtcacaggcgtcctcgccgccagccagtaccagcagttcctcgcccagtctattgaacagccgctgcccatccagcatcacccacagcagttccgggttcaatcctcctcgtgccgagccatcgagcaccgcaacaaccgcactgccgcaatcgatcaacgcccggtcgcaatcccggcgtcgttcgagtcgggcatggttccgcaggagcagccggcggcgcgcatcggcgcatcccagcgtacggtcaaacacgagctctcccccgcacgaccgttccacatacgatgccacatccgtattcagcatgccggtgccggaaccgtattccagctccagcacctgcacggcaaggtcccaggggaatgacaccccatcggagtcgatgcggacgaggcaatccatgatgcgaccggactcgtcgccatacaccagaacggagatccgacggttcatctcatgcgcatcgatctcaatcggattccacgcgttctgagcgccataacacaggcccggcacgctcagacgcggatcgttgacgtggccgtaatcgccccaatcggtgaccaccatgccttccgcgccatacttgacacccgccaatgccatgtgatacgtgttcagccaggcacccgcataatcggggaagaaccggctccaagcccgcaccgcggggcacacgaactggcgacggccctgcgcggcgatggtctggatgttgctctcgtcgatctgcggctcgtacatccagttgagcatcgtgatgtcgccgggcagcagatccatcgtgcgcgggctttcgagcgcgatgtccgcccacaacatcggctgccgaccatggcgggcgagcgtgtcgcacaaatccctgacgaaaccggcatacagttcatcgcggccggcttccggcgcgtcctgcgcggacctgccacgtcccaagtcgaacgtctcatcgccgccgatattgaaggacttcgaacggaacagcggcgcgtattcctcaatcaggcgcgaggcgaaatcatgggccttgggatcggcggcgttcagcgtgtgatgctccatgcgttcgatgaagctgaacgggcggtcggcgtcttcggggaactcacccagcccgcgatgctcacgggtgcgcagattcatgtacatgtgcccgaacgtggccaacgacggcaccaactcgatgccgcgacgcgcgcagtactcgtccagatacgtgatgtcggcggccgtgagcggatcggtgccacgccacgcctcgctgagctcgacgaacgcgaaggcatgctcgacatacagctggaactgattgtatttatataaggccagctggtcgacgaaccaggtgaggaactccatcgtcggcactcgtccgcgtgtcacgtcgagactgtaggcgcgcaccgcgaacgcgggcttgtcttggatatgcaggcagggaatggcacgcgaggtctgcccgatgatctgccgcagcgtctgcagaccgtaccgcagcccgctttcgccgccgccacgcacggcgatggtatctgaggcgaacacatccagcgtgtattcgtcatgcgccaatcgtgaatccaggcccagggatatgacggtgccgttcatcgctgccggcgcacccgcacgcgcatctcgcgcatcttcggcggcattggcgctggcgtcgtcttcacctgtggctgcacggacacggcgcgtacggacggtgacgccgcagtaacgctcgagctcgctggacagctgctcaatcggcagcgtttcccaagtctcatcggcaccttcggtggcggcatattcgggaattcgtttctcgatcgtcaccagggacccgatcatagccgtgccatgcgtgtattccaatgtcaccggagcgggaatcagggtgagacacagcgttgcggcatcgactgtatattcgaatgtgggcacagctgttcctttcatactgtttttattatcgttcgtccgctaatggcagacgacacgtggtcgcgccgccatcagcggacgaatcgttggtgaggtacggcggcatacgctatttcacggcaccggtcgtcacgcccttcatgatgttacgctggatgagcatgaagaacaccaccaccggcagcgagaagatcaccgaagcggccatctgcccgccgaaatcggtgcccatggtgggtgtcgagaaggacgacagccataccggcagcgtgtacttcgactggtccttcatgaacgtataggcgatcatgtagtcgttccaggcgttgatgaacgcgaacaccgaggtcgagacgatgccgggcgcagccagcgggaaggtgatcttccacaggatctgccagtcgttcgcgccttccacggccgcggattcgaagatgtccttcgggatgttcaggaagaacccacgcatgttccagatcgcgaacggcagcaccatggcgatgtacgccaagatcagaccgctgtatttgttgagcagcccgagctggttgtagatgatgaactgcgggatgatgccgccggaggtcatctggatggccagtacgaacaccatgatcggcttgcggccgcggaagcggtacagggtcagggccgcgcacgcgaagaacgcgacgatgatcgacaggacgatcgagatggcggtcacgaccacgctgttcttgaggttggtcaggaacgaggtctgggtcacggcaacgatgaagttgtcgaacgagaggtgcgtgggccagaacacgggggtcgtggtcatgatctcatcgcgaggctttacggcggtgataatcatccagtagaccgggaagaaccatacgacgcagaacagcagggcgaggatagtggtgccggcgcggcgcgcgatcttgccggggttggttcggcggcggggcgatgcggactgcgctgcggcctgcgatacggcctgtgcaggacttgcactcattgacgtactcataggtcctctcctgacttgagcaggtaacggatgtacacggaggtcagcgcgagcagcacgatggtcacgagcacggaggcggccgaaccggtgccgatttcgaagctgacgaacgccttcttataggtgaagatgccgatggtggcggtcgtgtcctgtgggccgccctgcgagatgagccagatctggttgaacacgttgaagtcccagataatcgagagcatggtgatgaccatgatgctcggggagatcagcggcacgacgatctgccagtagcagcgcagcttgctgcagccatccagctgggcggcctcgatgcaggactggtcgacctgggtggtggccgcgtacagcgtgatggcgatgtatggcacggcctgccagaccacgagcagccagatctccagaaatgcgagccaggtgttgtcgatccaagaggtgttggtcatgtcgccgaagacgtgcagctgggtgagcagccagttgatgacgccgtaaccgggctggaacagccacttccagaccaccgaggatgcgacgttcggcatggcccacgcgaagatgagcacgaagatgaccaggtagcgcatcacaccgccgagtttggtcatcagctgggcgactcccatgccggccagcacgctgccggccacgagggctgcggtgaagccgaaggtgcgtagcagggccgcatagaaggccgggtcggtgagtacggattggtattgcttgaggccgacgaagtcgaattcgccggtgaacagcgtgcgctggctgaaatccgtgaaggacgtgaagatcatgaatcccagcgggatgaccaccagtgcgatgatgacgatgccggcgggcgtcagcagaaacgccggggcgcgattgccgcgtttcttagccggccgtgaggccggggcctcgccgtgcgcgagttgcgttgagcttgtcatggtccaacccatcacttggcatacagctcgttggcgtgttcgtcgaacttcttggcggaggcctcggccttgctggtgtcggtggcgatgtccttgaacagggtcagcgagccgtcgctttcgatggtggtccactgcggggaggcgggcgtggccttggtgcgcttggcggcctcgaagaagccggtcagggcggtcgggaagtcgtcggaggccatggccttgtccagtccttcgacgttgttgggcaggtagccgtccttggcgaacacgtagtcgttctggatgtcagggctggaggcgatcttgatccacttcagggccagatcctgcttggagctcttctgggccacgccccacacggagccggccatcatcgacggctggttctggccgctcaggccgggcatcgggaaggagccgagttcgtcggcggtgatgtctttgttgtattcctgaatcacgcggatggaggcgctgttgccgattacggcgccgatcttgccttcggccatgagctggctggtgtcggggctatcggtgtcgagcgggcgggaggcttcggatgaccacttgtgctggaattcacgccactgctcaaggccggacaccgattccttggtggacagggagctgacccatttgccgtccttctgcacggcgtagtcgccaccggcatcccacacccactggatggcggtcttccaatcggcacccggcacatagaacggggtgaagtcctcgccttggtgcgcgtccttgagaatctgcaggtcggcttcaagctcggcgtaggtggtcggcggctcgttgatgccggccgcggcccaggtcttcttgttgtagaccactgcgcgggcggcaccgagggccggaatgccgtacagcttgccgtccacggtggcaggctcttccagaccggagagccaggtgacgccctggcgcaactcgtcagcgtggtcggtcaggtccatgaggccgccgctggccgcgaagccggcgacctgcgtattgccgaggtcgagcacgtcgggggggtgctggtggacagagccgtggtgattttggtgctgatgtccttccactgctggttctggatgttgacctcgacgccggtctctttggtgaactggtcgttgatggccttgatggtggcctcgctttgatcgccctgcatgacccagacggtgagcttgccatcgctcgaaccggtgtccgaggatggtgcgcccatcgagcatccggcgagggtaagggccgctgccgtgacgatggccgtggcctggagcaccctgcggatggcggggcgtacgttgtgctgctgcttcatgatgttccttcccgtccagttgtgaaccgttgcggctcgcttgatctggccgtctccattgactggtgatttcttgtaaacgtttacgaaaaggagtataacactcacgtaaaggtttacaaatatcatgtgcgtgtcgtacttcacttaatatcggtaaatctcttttactatttacttcgtacacccttacggcagagaatgtttaccgactttcatacgccggcacggcaatccacaggcaccggacatgggccatgcggaatcatcaggaaaatcgcgcggtacaatcactgtgaacggccctaggacaggaaggagacgggcatggccataccccgtaagccggccaccatcatggacgtcgccgcggcatccggcgtctcctacgccaccgtctcccgttatctcaacggcaatccgcatgtctcggccaaggcagccgagcgcatcgccgccgccgtcaagcaggtgaactacacgccgaacaacgccgcccgatcattggtacgccaacgcacgcaaaccgtggcgttcgtggtgcacgggcagccggattcgctaatcgccgaccccaatatcaacaccatcctgctcaacgccaaccagacgctcggcaatgccgattatcaactcatcacgctgatctccgactcccctgcggccggcgcacgcatcgccagactcgcctccagcggattcgccgacggatggattctcaacacgttccataaagatgacccgctatttcagagattcgccaatatcagcgtgccggtcgccatttccggcgtcggctatggcagcgccatccccttccccaccgtcgatatcgacaatcgactcgcttcacgcaagctcaccgagcatatgttggggcgcgggtatcggcgaatcgcctatatcatcggaccgccgtacttgccatgttccgacgaacgactgctcggattccaggatgcgatggccggcgatttcgacccggcactggtcattcggtccgacggctggacccggcccgatggccgcaacgccgtcgtgcggctgctggactcgctggctgagccgtcgggtagccgacttgccggcgccgacgccgacgccgacgccagcgtgcccgagctcctcgccgagcatcatatcgacgcgctgatatgcggcagtgattgcatcgccgctggagccatgaattatctgctcgaccgcggcgtgcgtgtgcccgacgatattgccattgccggcttcgacgacagcgccgacgccacagccctgcacccgcagctgaccaccgtgcgccagccaatggacgcattcggcgtcagcttggccaccctagtgcttgaccagatcgagggccgaccgttccagcgcacggtgttcctgcccaccgaggtcgtggccagaggctccaccggagagtaggcgcgcagagaacggttctcaataatatctgtgcgcacttctctacgcccgaagcgcacatggaatatgccctaatcactgccatgtcgccatttgcgatgatgtgagattgttatgttcttgttcatttgagcgcacagatactactgagaaccgttctctgcgcaaatagacaatgtggataactccataagctggaaccacattgccctgcctggcttgcattcaagtccaaatcagctttacggtcgcatcatgagctcttttatgcatgaggatattgtcggccgacgccgagcagaacgtgaacgttgcaatgatgctgcgcgccgttcaaaaggtccattgctggtgggatacatcaatgcggccaactactacggcgcgcccatcccccgacattgcacgctatctgttgatgccgtgcacgcctgtgtttccagtgccaacaaacgcagacgaatcaaaggcgtggtcttccatgtgtttaagggaaaactggatatccgcaaaaaggactatgaacatttctggattgcctcgccggtcatgatgtgggctcagatggcccaatactccacattggaggaacttgcggccattggagcctctttgatgagccgcgataaacggcgcagaatggccactcgcaaggatttcgatacttacttggaaatcagtccgcggttcataggtcgtaacaaatgccacgaggcactgccctacatgacagagaacacggattctccgccggaaaacacgctgtttgggatgctgaaggattcgggcttgggatgccccaccgccaactatcgcgtgaatatcggcaactcatacgtcatattggatatggcatatccggactgccgcgtcgcgttcgaatatcagggagcctatcacgccgatccggcacaaatgcgaattgacgcggcaaagcgaaacgcattgcaactgctcggctggatcgccattctcgtcactgcggatgacctgagaacagccgacacgcggcatcgttttatcgagatggcccatgtcgtggtgtcccggcaacgcaatctcgccgattggaaccgctcatgggccattacctcttagcatcgcaccgataatgcgctatgccgctatttaccgcgaggtgcccgccagacatcgggctcgacgtagatcccccattcataccaaggcagcgcggcacggcgtcctcgtccatgtgaatggcctgcaggttaatgcagcctatccacgccggcagtgcgctccactgcctcgaccaccaggtcgcgggtgctgtggtcaagcgattcgcccaccagcagcgagccggacttaaacgccagccgcctacaaaagtgtgaggctgcgcaggctcacactgccaacagccgttcagccaaccctcggaaggtctggccaatgccatccgtgcgcaaggcgccatcgacatccagcaccgcgggacggcctgcttcgccgatctcgcgcacttcgggttccagcggcagctgggccatcagcggcacgtcatagccaagcgccgcgcttaactgttcagacacgcgctgaccgccgccggcaccgaaaatctccagcttctcgcccttgtgctcgtagtagctcatgttctccaccacgccacgcaccttcatcggcacctgcagggccacgagtccggagcgcacggcgatgtcggaggcggagggctgcggggtggtgaccaccacgagttcggcgttgggcagcgcctgggccacggaaatcgccatgtcgccggtgccgggagccaagtcgagcaagaggacgtccggctcgccccaccatacgtcagacaggaactgttccaaggagcgctgcagtcgcggcccgcgccacagaatcgcccggtcggcaccggcgaacatgccgatggagatcagtttcacgccccacgcggtgaccggcataagcataccgttcagattggtaggctgcgtgtgcacgccgaacaggcgcggcagtgagaagccatagatgtccgcgtcgatggcggccgtgtcgaagccgagggccgcaaacgtggcggccaggttcgcggtaaccgaagacttgccgacgccgcccttgcccgaggcgatggcgaagatgcgggtcttgacgcccggcttgctgaaggggttccgcttgcgttcggccttgaggtcggcaaccagatcggccagcttgtcacgactcattgaaccgacttcgatatgaggcagcagctgtacgcccggataggagctgaccgcgccgttgatctggttggtgatggtctcgctcagtgggcatccgggaaccgtcagctcaacgtgcacggtgacgtcgtaagtgccggcgtccgacgatgcgggcgcggcttcgatagcggcaatcatgccgaggtcggtgaccgaacgaccgagctcggggtcgatgaccttgctcaggcgttcgtagatgtcggcttcgatctgacgtgcgtcgctcataaatccgtatcctcctttagggcctgttctaccctagcgtgtgatgcggcggcatgccagagggagtggagtaagtcacactgcgcacgcgctgcggatgtacctctcccattcccgcatccgttttgcggacgactacttccctcagtcgcgcaaggcgacagctcccctcagagaggggagccaagtcagtcgatgctaccggtttctaggagctgggcgaattgggcttcgcccagcatggggatgccgagttcctcggccttggtggccttggagccggcgtttgcgccgatcaccacgtaatcggtcttcttgctcaccgaaccggccgccttgccgccgcgctcgataatcgcctctttggcggagtcgcgcgaatagccttccaacgaaccggtgaccaccacggttttgccggccagcgtctgcggcaacgaactggtctcggcctcgtcgacgcccacgccggcggcctgccaagcacgcaaagtcgcgccgcgccagtcgccgggttcgcgggcggcggcgaaccagttcaccaccgattcggcgatttccgggcccaccccgtcgatggccgtcagatcttcaatcgtggcgttttcgatggctgccagcgagcccatcgccgaggcgatcaggcgtgcggtaggcggaccgagccggcgaatcgacaacgcgaccagcacacgccacaggtcggcgtgacgggccttgtccatttcgtcgaacatcttgcgcgtgttttcgccgggccgaatgatcaccggcacatccgtgacgccggtgcgcgtggtcttgtggtccacgcgcacgataaccgcgtcggccggcacgtcatactcgggataggaggctgcggcaaagcccggcatagtaccaagtggagcctcagccccggtaggtgcgccggtcgtctcgctggcggcacctccctgtgttccggcggattcgattgcggcctccctttgcgcgcgttcggccagctgcttggccgtgagcttcttggccggcgtgggcgcggtccagaaggcgggcacctgatgccacaggccagagccaccgacacgcttacgcacctttttcttcttaccgttcgcatcgaccgtctcatgcacttcgacgattgcggcctcacgccacacacgcacgtcgcgcagatcggcggaggtcaggtcgaacaacccggattcgttggacaacaccggcttctgcgcggctggcaattccagcccctccaccggctcgtacggttcgggctcttcgccgggggcgaccagaacctcggtgatgttcggcgcgtaggtcgccaccgaatcaggccggttctcctccgggttggtcagagcgatggccgactgttcacccagatgctcgatgtcgaacgccttgcgtgaggccagcgaaatcacgcgctcggtcaactgggccgggcagctttccacattcgggcagcggatgtccttgtcaccctccttggcgggtgccagtttcgcgccgcatgaagggcagaactcgggcatgacgaattcgcgcagctggccctcacgccctttgcgccgttcaagcaccgggccgaccagttcgggaatcacatcgccggccttgcgcaccaccacggtgtcgccgatcaggatgcccttgcgtttgacttcaaatccgttgtgcagcgtggtacgagccacggtggagccggccacgtagacaggtttgagcacggcgaccggcgtcacacggccggtacgccccacctgcacggtgatgttgagcagttcggtgttgacctcttcgggcgggtatttgtaggcgatggcccagcgcggcgcgcgcgaggtggcaccgagggcgcgctgcaggcccaggtcatcgaccttgacgacaatgccgtcgagtgcgtgctcgatgtcgccgcgatgctcgccgtagtactcgatcatgtccaggatctcctggaatgaggtcaccgcacgattatgcggggagaccggcacgccccacctggtgtatagatcgtaggcctgcgactggtcggcgaccacatcatgggtgccgcgcggatggtccgccccccaggtgagctgccccagaccatgcgcatagaaactcaggcgacgggtggcggtgatgcgagggtctttttgacgcagcgagccggcggcggcgttgcgcgggttggcgaagggcgctcgtccggcgtcctcctgctcgttgttcagggtgtggaagtcatcccagcgcatgaacacttcgcctcggatttccacgaagtccggaacgtcttccttggggccgccgaggttggcgggaatggagccgatggttcgcacattcagggtgatgtcttcgccggtaacgccgtcgccgcgcgtcaagccctgttcaagcacgccgttgcgatagatgaggttcagggcgaggccgtcgattttgacctcgcagctcatgggcaggggcttggattcgggccaatcgaggtcgcgaatcaccgaatcgtaccaatccttgagctcttcgatggagaagacgtcatcaaggctcatcatgcggctggggtggcgcacggaggcgaagtcgttggagaaggagccgccgacgcgatgggtgggcgactgtggattgtccaatgaggggaacgccgcttcgagtcgttcgaggcaacgcatgcgcgcgtcgtaggcggcgtcggagctgacgggtgagtcgtcgatgtagtaggcgatctgatcggattccacccatgcggccacgcgagcccacaggcgggcggcggcctcagcggtcatcgtgttcacgtcgaaacggtcgaggcgtatcgcgtcgtcgtcagtgggctgcagtgcggctatccattgttcggagccaggggcaaaacgtgcaataccggtatcaggccggacctcggccacatccccatcgtcgaaatcccatgccagttgttcattcgtgctcatggttgtctatcctagcgggctcggctcccctcggccggctataccgtcaactcccctcaggcggctacgcggatagcgagcgcaggaactgggcttggatgatgtcgatgttgtcgccttcaccgtcattcatgcgggccacggccaccgagagcgtgcgggccggcacgaacatgccctcatccacgcacacgcgggcggcgtcacgcacgatgtcggccacttcgatatgcggccagaccggcagatcatgcgtggcaagcacatgggcggccacctccaccgattcaggcaccggtatgcactgcgagtccgcacgggaaaccagttcctgcagttcgctctccagcgaaccaatggccccgggagcgatgtgatcgctcataatgtaggctgcggcggctgtgtcgaaccggtcaagcatccattcggcgtacgcgaaccggtagtaggcgaacgcggcatcgtcgcggtccaaggccacgcgcagagcattcaggcaggcggcgcgtgccgaatcccaatcctcattgcgggccagttggatggcgagcttcagatgtgagagcgggtaggcgggcgcgtacgccaccatacggttgaggtgcgggatggccgcctcggcacccttgatctggctcaacacgtcagccagctccatgtgtgcgtagaacagattgtccgggatgagcaccgtacgctcgtccaatgtggcgaacagtcggttgtagaccacgcgctcggcataggagttgaagtatcgaggtacgccatggcctgccgcatacacctgatccaaatgggccacagccgcttcggccgcttcgatggcctgatcggcttggcccgagaacagcatgtctcgggcgcgcagacgctccttgtcaagatcgtcggcaagcgtgaacgtgaagtccggggtgtccttgccatcgatcaacgcactggtgacctgagaggccaaaccggtcagttcgggatcgcatatcgattcgatgatctgcatggctcgctgggccttttccacggagccgagcgacgtgttcctggcgatatcgtggaattcgttgacgccatgctgcagtaagtccactcgctggatagccagtccggcactattctgtgcgcccagcacgtgagcggtcgccgggctgaattgacggtcggccagttcgggctcctcctgggatccggtgggagagaaccggctgtccgccaagtcgaagtcggcgctgatgggtttcaggccgccttcgccgtccacgtccatcacggcaccgaacatgcggtaggtttcctcgggattgtcaagcccatcggtgtccagtcgcttgaggaaggcatcacgggtgaaggtgacggtgaccatattgcgcacggtgggattgcggcgcagcacgctcatcggatcatcgtccatgccggcggccccatcagcatcgtcagtgccgacgccctcgccgccgataccgcccaggtcgtcgcctgcgccggtatcgtccggcatgccgaacgccatttcgtcgatatcgacgcccttcatcaggtcttcgaactgcgaatcgatggacgcggcgccatcggcgtcagcggattcggccgcggcctgatccgtagcatccgcagacggtccggtaccgttgcctgttcccccggccgtgccgcgttcgtcaccggacgccgcctgcccgaacgtctcctcatgggtgatggggcgggtcgggtcgccatggaaatcaccatctttggggtcggctttggaacccacacgccccaaatcgccactgcgcagatgttcgaaggcgcttagggcctcgctcatcatcgcctcgatggcggaatcctgttcggcaatcgcctcttcaagaccaatggaatcgatgtgcaacgacacctggcgcacggattcgctggtgccgaaactcagcgctgccatcatcaggccgacacgcaggttgtaggcggcgctcatcgacgcgcgttcggcgctgctcagcgcacgccacgtacggcgagtggtgtcataccggctatcgggcatcatcgaggtgccggcagtggtgaagccaatggccacttcacccgaatccaagcgcgaccggaactccacatcaaaccgatacggcaaccgtaaccggcgcaacagtgaggagagggtctgacgatacacccattcgtcgctcctcgccggcgaatacgaaggccgagcggcttgagtgttggtgtcgctcttattggtccgctctacagcgccctcaacactctcagtactttcagcgcccgcagcattcgtcacacccgaatccggcacgttctgctgggtcagcacatctcgaggatcagggaattcactgcgaatctgcccagccgtgcgtgcggcgatatcgaccaggctcagcacggcccgacgctcctgctcgccatcatacgggtcaagcgccataatcgcagggttctcaatgagtttcatgtcgatttgcgcggcctcggcacgggtcaccgtatcttccgtagggttgcgccccaaggaagcgttgcgctccagccaagcgctcaccgcagcgaatcggttgaggttgccttcgatcttcaaggatttcagcgcctgcccgaatgccaaggacttatcccacgtaaagaaatagccgctcgaatacgtcgaggtgtacaggtgcaacggttcggcgccatgcaccgcttccagtcccggcgtggtgtcgagggcgccggcttcgcgcatcagatcggcgaagtgatcctccagaccggaggcccgcatgccgtgggctcgtgccgccaaagtgtcacgcaccgaacggcgaatcgcaccgattggcgcctcacggttgagacggcggaagatattgccggaaccgaatccgatgagcagaccattgatctgcggcaacatatacgtggcgaagaacgcgatggtaatggcatcgcggtattccaaatcatgacgcatcacaggcggcagattggcacgcatctgctcaagcgtgtaccggttgccggccttgagccatgaggcgagccacgtcatgcgtccggtgtcgtcacgccccaccacgccaccggtaatggccttcacgccgtcagcaccatgaccaaggccacgccccaaaccacgcccatgatgcagcgcacttcccaggccatggcctgcacgggagaaaccggaacgtgaacgcggctcgtcgctttcgcccagccgctcaccgtccggcagagtcacttccttttccttgccgaacatgaatcgcgcctgcatatcctgcacgtccatgttggggtcggtgcccacgaatacgcggccatgcgtatcggcgaacgccacctgcgcaaaatgatcgcggtcggggaaaatgccaagcgaaaagccacggcctctggtggagggcagctgcacccatccaagcaccagcccttccggcacgttctccaattcggggaaggtgcgtcgcttgattacaggactcagcgccactgcatggcgagtcagttcgtcgataatgccgcctttacgctcactggtctcccgcaaggcatcgccgaacggattcgtatcgtgcttcttcggcttggacagtcccagatcggccgcgagcgcgttcatcgaatccttcagcccgcccagcagtggcgtgcggttgtgcttcccatggtccgatgtacgttttggcatgattcacattgtctcttgtttgcccgacatcaagcccgaataaagcctatagaataaatgcgtgcattccatagaccacactcgcgcagaccgtccgatgccgtcgaatcatgaacggcacctgcccagccgcccggatacccggcaccggctgcgtttggtgcgcctgctgatcgccttgctggccgccgtcgccgccatcgccgccatggagtgcatcgtgttcaacctgccgttctggcgtacgctcggagcgagcacggatacgaacgccgtgcataacacgctgggttcgggtctcacgcgccggaatgatggcatgttgaccgtcaccgatccgaccaaggcctatcttgaactgaccgcggacggcacgtcggattacctacgcatcgataccgagagcagcaaggtcatcgataaggcccgcgagcaggccgaggccgaatccaaagcgaacgacgataaggaagtcttcaaaccgctggcgaccattcatgtgcgcgcggatgtcgatggcatcaccggcaaggcccagtcgatgaatcccgacgctattcgcagccattatgtcaaggcaccgggtgccggcatcgtgcgtatttggattcaggaagagcgcggcgcgatcgtaccggtcaccgacgcccgcgccaacgtgcgcgtaccgttcgtcatcaattggatgcgcgtgctcgccatggccttggtgttgctgatgattgccgtctggaggccgggatcgcgcctgtggcgtatcacgcttgacccgtccagcactcggcaacgacttgctttcgtggggcttctggcgattcctaccctgcttatcggcgtatccatcatccacgaactgtggtacgcgtcttcgctcgtcttccacgtttccggcgattacacctatgatttcgaccagtatgggcatgtggccgatgcgctggtcgccggccggccctggctcgacttgccggttcccgaacaactggccgccaccgagcacccctatgacgtagccacacgtgcccagctactcgccaatggagccagtccgctctactgggattacgcgtattatgacggtcactggtattcctattttggcgtgttgcccgcagtgctgctgttcgtcccctatcgtctgctggccggtcataatctgccgacatccgccgccgagtatattctcgtgctgctgttcatcatcttcttctccttgctggtgctgcgcgtcatccatcgtgtgatgccgaagacttcggtggcggccgcgtcgttagtagtggtctcatcgttggtgagcgcgcaagtggggtatttgctgtatcgcacgaacttctatcagataccgttcgccgcatcgctgacgttgacgtcgctgggactatggctatggctcggcgcggacacgtcccgccgtccgctgagaccatcggaccgatggcaggcgggcgatgccaagcctctctccctgccacgactggccttgggcgccttgtgcattgcggcgaatttcggatgccgaccgacgttcaccttggccgcattgcttgcgttccccctgttctggccgcagattcgcgcgctgggcaccggtctgcgcacacgccgcatcaagccgttgcaggcgttgcgcgcgccgctggcggtaatcattcccgccattctcgtcgtgacgcctctgatggcgtggaacatggttcggttcgattccccgttcaatttcggcaatgcgtatcagttctccatatccgatatgacccggtataccaccccgtccgcggatatgcccgccaacatctggtattacctgttcctgccgctgcgcttcatggatcgtttcccgtggctggcgggctctcccgccccgatgccgcaatggggttattacgaggtgatggtcggcgcgattttcacggccacgccactgaccttgatggctttggcgctgcccctgctgcgcagattggaaacacacggtatgcggccatggctgatgtcttgcttggccgtagcggcggtgctggtcgtattcgacagccgcgtcggcggtttgggatggcggtattccgccgatttcggctggctgatctcgctggcgtccataccggggctactgtggctggtcaatgggcgcgaaccgagccggtcattggcgggggccaacgacgccgcttcaggcgatggcatcgcccgcgtcactccgtggcgttggctgatgcgctgggtcgtggtgctggccgtattgtgggcgctgggcatagccatactgagctgcttcgtgcagtcgcgcagcgatgcgatgatcgacaacaatccgacgctctggcatcaggttcaggcatggttcacgatgctctagtctcgtatcggcggcgaatcagatcctcataaaacgccacagcctcagccggcgctccgtcaaacacgaccgcgtgctcgtccagcaccagtatgcggtcgatggcgtattcgggccggcggatcatatccgtgtcatgcgtggcgaaaatcacctgcttgttgtagctgaacaacgccttggccacatgcgcggtgccaatctcatccaatcccttgctcggctcatccgccacaatcgcactcggctcaaagctcagcgcggccgcaatagccagcaggtgccgtttctcggagtccaattcgccggccttggccttggagacctgcgccaaatcaaaatgcgcgaacagattaccgatgcgcgcatgacgttctgactcgggcaccttgtgctttttcaacgcttcggaaacagcctcggaaatattcgccgcttggtagaaactgttcggaatctcctcgcggcgaactttgccgaccagattatcgatgcgcttcgcgtccttcttcacagccgggtcaagacgttcctcaccgcccgcaatggtcaccgtgccggcgttggccttcaacgaaccgtccagcagacccagcaatgtggatttgcctgcgccgttcagtccgatcacggccacccgccgctcgctgatggtgatgtccgtgggagcaagtcccacgtgcccatcatcatacgtatgcccggcctgttccaaagtgaacgtcagcgatgccgggtgtggcagttctttcggtctaaacaagaatcccatgccgccattgtacgtggagtacaggtgtggtgccggcaaacaccggcctatcgcagcaaagcggcgacggtattgagcacggcgcggatgccacgctcgaattcgtccggttcgggcagcagggaaacggccaggtatccattggaggtcatgtcgaagaagtagccgggctgtccggtgagttggtgctcgtcaatcagccgcaacaccagttcgttctcatcgatgacggaaggcactcgtaacagcacgttccagccgccttcggcccgtagcacgctgaccagcccgttgggatcggcgtcaagcaactcgtgcaacttggccaggttattgcgcacgcgctcccccacccgtctggtctgtgcgggcgcggcgttcaataatgcgggaatccgttcggcgatgatgtcgcccatcggcagataatcgtcggcgatgacgtccagtcgacgctgggcctcggcaacgtcctcggcaggtccggacacctgaatccacccgactttggcgtgcggcgcggccagcattttggagaatccgtctagggcgaaggtgagcacgccgcgctcccccgcgagccgtgcgtcgccggggaaaggttcgagagagtaatcgaagaacacttcatcggcgataagggcgatgccgtgctcacggcacaatgtcacgatacgtgcacgctcggttggttttacgtacgaaccggtcggattgttcgggttgatgagcaccaatgctctgatgcgttcgccatcgggctcgctgagtagccgctcgagttcggcgatgtcgatgaaccaggagccgtcgaattgcaactggtattcgaccgtatcgacgcattcaagccgtgcaatcgactcaatcagcggatagccgggtttgggtgccagcaccgcgtcgccggcatcgcaaagtaacttaatcagccacgaatacgcctcggacgtggagctcagcaggtacagggcgtccgggtcggcgccctcgatggcggtattcacattggtgaaagcggcatggcgctcgttcctgccctcgccggcggcgggcgaagccaactgagggctgcttgcgtctaccacgtttgccgtattgaggaatgcggccaatgattctcgtgccgcacgcggtccacgcgggtcggccgtatacacgctcggcaccaattcgggtgccaacccgtggcgggtcggattggaatcgttgagtttgctgagtgcaatgccgtttgccttggctgccgcctcggccgccgcaatgggattcggcgcagaaatatccacacgagaagagaaatgcacgctcataccctccacgataaaaccacccctgccgagccaggtatatcgaggcctcatatccaccagcatccagcactacgacaatcgtgcggcacggcagcggagtcgtcagacatactatgacttcaatccacatcgaataacggcctagctacattcattaggtcattttcgcgctcattaggtcactgctagtcgagcctcacaattgttgatgcttgaaacgccgccattccgagcccattgcaattcaggtttggaatgggagtgacctaatgaacacataatcgacctaatgaacgaattactcattaaaaaaggccgcccgaaatacttggacggccttacatatggtcaatacggctcctgcgccagcagaaataactcagctcactgctgcttggtgctggcgtagtaggcggcaccgacgatgccagcctggttacgcagcttggcgggcacaatcggggtcttgatatccacgtacggcaggaacttttcgctctgacggctcacgccgccgccgacggtgaacaggtccgggttgaagtacttttccataaggccgtagtacttggtcagacgcttggcccacttcttgtagcccagttcctcgttctcgcgaatcgcggaggaggcatacttctcggcgtccagatgcttggcgctcaggatgatgtgtccgagttcggtgttcgggatgagcacgccgttgtagatcaaggcggtgccgatgccggtgcccagtgtggtggcgatgaccagaccatcctggcccttggcggcaccgaactggacttcggccaggccggcggcgtcggcgtcgttcaccacgacgaccgggcggccgcaggcttcggagaacacttcagtaacgtccacgccaatccaagactggtcgaggttggccatgaagtcgagcttctggccgggcttgatcggcgcggggaaggcgatgccaacgggtgcggattcaggcacttcgaagtggtcgagctgctgcttgacgattttggccacggcctgaggcgtggagacctcgggagtgagaatcttcaatcgcggctcggcgaaatcgcccttggtcagatcgacaggtgcggccttgatgccggaaccgccaatgtcaacaccgaaagcctgtgcagtttcaatcatcgttgaccttcctttccatacgttttcatcagttcgtagggttgcgcccagtctaacgcgaattgtgctcaacacgaaaccattacacaccaattgtgcaaacgtgtgcatcgccgccggtcactacgtaccctatccgtatcgtttttcaagccccccaatgggcaatgcgcgcgatttcgatactaggaaaattcggcgtctgtggcggcctgactctgtgtcgcgcgcgatgaaccgtcagccgatcaccttctcgtataatccggccgacgataccgccgccgcgcatatcgaccagagtgcgggagacgcgcaccacgcgttcaatgacatgggcatcgccaagctgcacttccagatcggtgccggccaaggccagtgggcctggggcgacggtggcctgttcattcataagtgaccgtaaataagctccctctgatgagggagccactactacggctacttcagcgacggcatgggcttccaggtggggtcgtgcatcagcttgcgcgagtcccaccagcccttggcaatctgcaccaaaccggtcttgaggtgttcgcgatccaccatcaccaggcgaatgacttccttggccgcggtgagcacggtgcccagtccaaacaccagcggacggaagtcgccgtaggtcatgaagtaccgggccatatagccgcggttgcgcatgatgtggtaccggttcatgtcggacgtggagttgagctggcgcacgccggcgatatcccagttgccgatttcgcgcgtacggcgcaaaatcacgtcgggcaccacaatcgggttggtgaccttgctggcgcggtagccatacatcgtgtcatcccagtagatgaagaagcgcgggtccggcagaccgatttccgtgaccacacggcggttgaacaggccgccttcgaagcacagcgtgtccatcactcgatacccggccgggccgaatgcggcgggcgcgatcgggttcggaatgcccagcggcacaatgaagtcgtactgccagtagaacgggccgccatcgtaatcgaatcgggatccctgaatcacctcgtgcttgtcggtccacttggacagcttggcaatggcgtccggcagcacggccacatcgtcatccatcacccagaaccatgcggcgcccagatcatacgccttggccacgccggcggagaaaccgcccgcaccacccaggttctcggtctgcggcgcatagaccacgcgctcttcgttgccggactggtcggccacggtggtgccccactggccggtcaccttgccggcaaacgcagcgaccatgtccgccgtctgatcggactgctcattgtccacgatgacaatgcgccacggtgcctgctcaagcgccagaatcgaatcgaacagtacctcgagcagctgctgacgtttgtaggtggtgacgatcagggcaagcttgtcgatggtgttgttgggtttcttcacttcagccatggctcccattgttgcacttgaccggcacaagacgaatttctgcacagtgaaacgcgggttgcgtacgtccggcgcatggcgtatgaataagcctgtcagtttcagggaaggtgcaattccttactggcggtaacctgtaccccgggtttcataacggggatggcgggaagcccgcgacccgcgcaagcggctgatccggtgagattccggagccaacggtatagtccggatggaagaaacgagggctcattatgagcgtatcttcgcgtatccgcatgcaagttgttcgttctgtggcgcccgaggccgagggttcggccagcgcgtccaccgccagcaccagtgccaaactcggctcgcacaccactggtgtggccgattccggccgctggtccacgcgccgtatcgccatgtatgcactgttcgtggcgctggcgatggtcaccagcttcattgaattcccgattacgccggtcacttggctgaagtacgacccgtccggcatcgtctgcctgatcgccggctttgcgtacggtccggccgccgccgcaatcgtgtctgtgctcggctttgtgccgcacatgttcgccgacccgtggggttcgctgatggctgtgctggtggcgctgttcctgtctgtgccggccgcgttcatctaccgtaagatccgtacgcgcaagggtgccgccatcggcattctggtgggtgcggtgctggccatcgtggtggcgctggtgggcaacctcatcatcacgccgatttacgcgcacatgccctaccaggctgtggccgcgatgattctgccgattctgctgccgttcaacgtggctaagatggcgattcacgccgtgatcaccttcctgatctacaagccggtctccaacctgctgtccaagcagcagtgaccggcctgagacgggcctatgcccgccacgactaacgaccactcaacgaccactcaaagaacaagaacgcagaactccggcccttgccgggattctgcgttttcgcctatcagttacggattgctgtttcatgaccgttgcaccccattccttcgacgccgacgagttccacgattccgccgagcccgctccccccgccgccgtactcaaggacattcgtttcagctatgaccgcggcacttcatgggctttggatggcgtttcgctcacggtccatgccggcgagcgcctatgcttggtcggtccgaatggatcgggcaagtccacgttggcccgtctgattgcgggattgaccgcgccggacggtggcgaagtgacgctactggaacagcgcgtgtacgcagccggcccgaatgccgacgcctatcgcgctgcccgccgcggcatcggtatggtgtttcagaatcccgaggatcagctggtcaccaccgtgttggaggatgacgtggcctttggcccggagaatctcgggctggagcgcgagctcatcggcgagcgtatcgttgattcattgcaggccgtggggttggcgaacttacgccagtccgacccgacccgtatgagcggcgggcagcagcaacgcgcctccatcgccggcatgctggccatgaacccggcaatgctggtattggatgagccgaccgccatgctggacgaatccgcatgcgccgaagttatgcgcattttggatgatttgcaggcgcgcggcaccactattgtgcatgtcacgcatcatccggatgagaccgttcatgccgatcgcatcgtgcacatggaggccgggcgaatcgttggtgtcactgcagccgcc

SEQ ID NO: 96 - DNA, 9407 bp, Unknown
  R206_24m  MAG No. k141_14789
ataaatttatttttggccacatcgctcgtggcgctcgggcggcgcaatatgaatccgcgattcagcagattgtcgattctggtcttgcgttgcgggtgtatcgcgtcgaaaaacctgcggcaccattgccgtcataccgtgatgattccgcgttcaaactgtatctccatgatgttgggctgctggcagcggccctggatctgactcccgcaagcgtgatccttggtgatgacgggctgaccgaattccgtggtgcgttaacggaacagtatgtttgccagcaattagtggccgccggcatcacaccgatgtactggtcgaatgcgaacagtacgggagaagttgattttgtctttgcaggtaatggcgcaatcattccgttggaggccgaagctggtaccgagcgtcataagcgtaacttgaagtggctgtgcgacaaatacgggatttgcggttaccgtacgtcgatgcggaattacaaggagcaggattggctgaccaatgtcccactgtggatagtcgggagctgcttccgcccgtggttggcgagtgattatgagccggatggcggagctgatttaggaccgctaccgaatactgatgatgaaggatgactgaagccgcgagatatggttcggccggttgctgacttgggatatggtccgcgaccggccggcggtcgaatccgtcatgccgcggtgcgcaccaccgtcacgccgtacggctccagcaccagatccctgcccagtaccgtgccgtcaagcaccgactcgcatccggcgaacggcgtatcctgccacgccgtggccgtatccgcatggttgatcacgaacgtcaacgactccccgcgtgacgggtaccgccgcgtaaccacctccaccggctccggcgagacgatgccggtaacgccggcccggcgcaccacgtcgccgaccacggcgtccatgccggcctcgtccagcaccgcaccggcgaaatacgccgtgcccgcgccgaaatcgttcaccgtcaccgccggcgtaccccggtagaacacgtcgccggcgtaggccgccagcgggcgcgccccgccgtcgagcttgatcagcccggcaaccagcgagacccgggacccgtccgcgtcctcgccctcgcccgaaccgaacacgacacgcacgtcgcggccgtccgggatcatgtccatctcctccatgcgcattccgcacacctcacggaacgcgcccgggtatccgccgaggatcacgttgtcatgctcgtcgtgcatgcctgccatcaccgtcgccaggaacgtgccgccggcgcgcacgaacccctcgaccagctcacgaacgcccggcttggccatcatgagcgccggcgcgaccagcacgcgatagcccgccagccgcccggcgtcaatgtcttccggcaccacatccaccgcgatgttgcggtggtggaacggcgcataccagcgccgcacctgatccggatagtcgaagcccttcggcagcaacgagatgttctcggtcgaccaatacgaatcccagtcgaacatcagcgcgaccggcgcctcggtcagaccgcccacgaaccgcgcgccgtgcgccgccagctcgccgccgagcgcacgcacctcgccgtacacgcgctcgtcctcgcgcccgccgtgcgagatcaccgcgccatggtacttctcgaacccgccgcgcgactgcttgagctggaaatactgcacggtatccgcgccatgcgcgaccgcctgatagctttccgcacgcatccgcccgggcgcgcgcagtacgttgcactcctgccagttcgtctggttcggcgtcgactccatgagcatgaacggcctgccgtcgcccacgccgcgcatcagatcgtgcttgaacgcattgtcggaaggcgtggtgtgcgggaacggataatcgtcccagctgatcacgtccatctcgcgcccccaacggaaataatcggcaccctcgtaggtgtccatgaggttcgtggtgattggatgcatcgcgtcgaacgcgcggatcgcgtcgcgctcggtgacgtaggtgcccagcagcgagtcggactggaaccgcttgtagtcgatgctgcaggcggacagagtggcgcgctcgccgtccagtccgtcgctgatcgcgttcggcggtaggatctgggcgaaatcggcgtaggtatggctccagaagttcgcgttccacgcgcggttcaacgcctcgatcgaaccgtacttgcgttcgagccagacgcggaaggcggcggcgcagttgtcgcagtagcagcgaccgccgagctcgttggagatgtgccaggcgatcagatggtcgttggcgccgtagcgttcggcgagcttgccggccagcgcgccggccaggcgcaggaagttcggcgaattcgggcaggcgttgtgccgcacgccgaagcggtggcgacggccttcgtagtcggtgcgcgtggcgtcggggtagcgttgcgcgatccatgcgggtagcgcgccggtggacgtggccaggacgaagccgaagtcgtgcgcgaccagcaggtcgacgatgcggtcgagcatggcgaagtcgtagcggctctcgtccggctggatcagcgcccaggagaacacgttgatggtggcctcgttgatgccggcgcgttcgagtttggcgatgtcgtccgcccaggtggattcgtcccactgctcggggttccagtcgccgccgaagacgaagcggccgcccggtgcggtgatggtcggtgcaggcgatgcaggtgatgcgggtgatgcgggttgggtgtgtgccatggtgtcggtcatgatgcgtactcctttgcgatgacgatgatgcggcctgcggccggtctcggcgttgtggccggcgtgcggcggactcgcgttggggtggttcggcgtcgcgccgtcgggagcggcggtccctgtgtgtggtgacgttgccccttcagcgttaaaccgatttaattcctggtggccattatgtacgtcgaggttgtcttcgtcaaatggatgattgaaggtgtcggcagctgctcggtgagatgccgaaaagcccataaatacctaaggaggacgccatggcggtgacgatgcgtgatgtcgcgaaggcggcgggtgtctctcctgcgtccgtgtcgtttgccctgcgcggcgatcccagaattaaacaagaaacggcacggcacatcatcgacgtggccaatcggatgaactattcggtcaacatcactgccaagagcctgcgttcggggcgaaccggcgtgatcgaggccgccgttttccagcttgaccggccgttctacgcgcagctgctcgccggcgtgtcgaatgcggcgttcgatcgcggcatccaggccgtggtgcagcagatctcgaccggcaaggtcggccatgagaaaagcatcctcgagaaggtcgccaacaagttctgcgacggcgtgatcctgagcgcgggcggcctgagcgacgccgagatcattgagctaagcaggggcaagccggtggtgctgctcgatgaccagtcgtaccaagggccgttcgactcggtgttcacgccgtgcgagaacggcgccgaggccgcggtgacgcacctgttcgagatagggtgcgagcgcgtcgggctggtcggtacggacttcatgccggccgaccaggcgtgccggtcgatgcacgtgggcgaccgacgtctgatcggctgccatcgcgcgttcgagcggcatgagcgcacactgaccaaggccgacacgatccagctgttcgactgggacaccgacgacgcgtaccgcgcggtttcgcggcgcatcgaggagggggacttcccgttcgacgggctgttctgcatgaccgacgcgatcgctttcggcgcgttgcgcgcgttgcgcgagcatggcatcggcgtgccggacgacgtggcggtgatcggcttcgacggcgtgcgcgagggatcgtacagcgcgccgacgctgagcacgatcgcggtggacatcgacaagcttgcccgcgaggccgtcgacatcctgtgcgagcgcatcgaggaggggcgttacggcgcgccggccatgcccaagcatgtcacggtgggttatgaggtgctggtgcgcgagtcgtccaaccgcacgcgctgaccggtcgtccggtggttgttcgcggtggatcgccgatcggtgggacaactcgcggcgttttttgtttaattatttttcgttgtccggtgcgattccgcgcgttccacagcccttgtgtttaaaaggttttgtaacgagttgacgccgtttgaacggagtgctataaatacaactacaagattaaatcggtttaaaaccgggctcttgcacggaaaacaatgtggtttctttcggcatacaacatggcgtatgccaccgacacaaaggagagttgcaatgtcaatgaagatctggggcaaacgaatgctcgctctggcctgcgcgggagcgatgctggtcccgctggccgcctgcggctcggacgccgacgccggcaagatccggctcagctacctgagctgggacaacgagcagacgtccaagccgtacatcgacgagttcgagaaggaaaacccggacatcaagatcgacttcagctacgcgccgccgaccagcgagtacatctccacgctgcagacccgcctcgtcggcaaccaggccccggacgtgttcatcatcacctccgagaatcgcgacgacctcatcgacaacggctacgccaaggacctgaccgacgagtcgttcatgaagaacatctcccaggccaacaaggacttcgtcggccgcgacggcaagacctacggcatgtcgatcacctcgtgggtctccggcatcgcctacaataaggatctgctcaagcaggtcggctacgacgagccgccggcgaactgggatgacttcctcaagctgtgcaagaagctcaagaacgccggcatcgagccgttcctcgagccgaacgccgacgagccgagccgcttcatcgacgccttccagggatccatcctcgagaagaagggcgtcgacccgaccacgctgtccacgcaggacaaccagacgccgggcaccgacgagctcgaggccgtcaaggaatacatccgcctgtacgatgagggtggcgtgacccgtgacacggtcggcatcagcggcgacgacatgaagacgcagttcaccaacggacaggtcgcgatgatcgtcgacggcgcgtgggactttgccaccttcgaacaggccggcatgaactgggacttcgccccgatgcccaagctcggcgacgactacacgcagtacgcgcagggctccgcctccccggcgtgggcgatctacgcgaagctcgacggcgacaagctcaaggccgccgagaagttcctcaccttcctgtcaagcaagtgggcgctgcagaagcatagcgacgccggcgacgctgtcactgtcgacgggttcgacgctacggtgatgacgcagtaccagaaggtctacgatcaggacatcaagaccggcaagtactacctgcacaccaacttctattcgaagccggacattctcaagagcgaactcaaggcgcagaaccagcagctggtgcaggggcagatcacgcccgaccagtatgccaagaacatcgacgccaaggtcgcggccgcgcagtgacccgcaacggatcgcacataatcacacatagataactacaatctccggttcgtcatgaaccgtgcgcatggtaatagggcggcctgtcggctgcggctggtcgcccttcgcatgtccgcaatcggatttcggtcataagccaatgtcaaaggaggatggcatatgagcgcaacaatgcaaggctcggcggtcggcaacctgccgccgttggacgaagacctgtatcgtcggcgtcgtcgtgcgcgtggcctgcatgaggacgtgacgtcgttctggttcctgctgccgatcctggcggtgttcgtggttctgttcctggtgccgttggcacagaccgcgtacttctcgttcaccgacttcaacggttacagcatggacatgaactgggtcggtctggacaattacaagaaggtgtttacggatccgtccaccctgcagggcctgggcttcacgatcctgtacgcgatcgtggtgatggtcggggtgaccgtgatcgccattccgctggcggtcatcctcaaccgcaagttcgtcggccgtgatttcgtgcgctctgtgttcttcttcttctcggtgccgtcgctggccatcatgggcatggtgtggaagtacatcttctccccgatgaagaccggcgtggtcaacagcgtgctcgcggcgttcggtttgggaccggtgccgtggctgtcgaacaactctctggcgaagttctgcgtgatcttcatcgcgatctgggcgcagatcggctggcatgcgaccctttacttggcgttcctgcaggcgatccccgcggacctgtacgagcaggcgaccgtggacggtgcgaacaagtggcagcagttcgcgcatatcaccctgccgcagctgatgccgggcatcgtgacctcgacgttcctgctcatgtcgggcggcctgaaggtgtacgacctgccgttcacgatgaccaagggcggcccgggctattcgacgtacacggtcacgcagtcgatcatccagcagggcatcggccagtcgcagtacggcatcggttccgcgctggcggtcctgttcttcatcgccacgggcgtcgtggtgttccttcagatgggcatttccaacctgatctcgaggaggttcgagtaaatcatgggcaacaaggcttcttccgtcacggccgcgccgaagggcatgaacttcacgacgcgcaagaggatcggttcggcggtcaccagcgtggtgatgatcctgatcgcgctggtatgcgcggttccgctgtggtacatcctgatcaacacgttcaagacgattccggacatgtccgccaacccgctcggcctgccgaaggaatggacgatcaagaactacatcaacgcgttcgagacggtcccggtgttccgctccctgctgaacacgttgatcgtcacgttcttcgcggtcgtgatccaggtgctcgtcggcgccctggccgcatacggcatgatcctgcgcaagtccacgttcaccgccgcggtcggcgcgatcctgatggtcgcgttcgtcgtgccggcgcagacgacgctgatccccctgtaccgcatggaggcgaacgcacacctggtcaacaccttggccggactggtgattatctacctgggcggagcggtgttctgctacttcctgatcgtcgggtacatgcgcagcctgccgttcgaactgatcgaggcggcacgcatcgacggcgccggcccgctgcgcatcttctggtcgatcgtgatgccgctgatccgcccgatcctgacgaccgtggtcgtgttccagacgatgggcacgtggaacgacttcatgaacgcgaatgtgttcctctccagctcggaactgcgcacaatcgtgctgcaggtgtacaacgcggtgggccagttctcgaccgattggccgagcttcatgaccatcaccgtgctcgccctgctgcccgtgttcgtgttcttcatcttctgccagaagtggatcgtctccggcctcgtcgccggttcggtcaagggctgatcggctgatcgactagtcggctggctgatcacggtattaattccggctccccactacgctcatatcatctccttccgcggcgtgtggggagccatgttcttcaccagataggaatttcccatgggtactgttggcactgtgctacaaacatcgccaaaaccgagagccgtgcctcgtgacggccttcctcatcgcgtgaataacgcggtactgaccactaatccgctgcgcaggtattgcgccgacccgaatcttgccattttcgatggccgatatttcctgtactgcaccgatgacggtgtggataattgggacaccaccgcgttcagtgtgtatgtgtccgacgacttggccacatgggagcgatatccggcgctcgacttgcgcgatgtgccgtggtgggatggctcggatggtgcttgggcgccttccgtggtacagcgcgcggacggcaaatacgtgttctacttcgtggccggttcccagatcggcgccgctgtgggcgaatccccgtgcgggccgttcgtgcctgagcccgaaccaatcgtgcgcgaaggtacgttcgattgccacaccattgaccccggcgtatacgtggaggatgatggcacccggtacttcctgtggggcaacggcatagcttgggccgcgccgctcaatgaggactgtctgtcgttcgacgaatcgcgcgctttcagctgggtgccgggcgatttccgtgaagccatctggattcacaagcgcaacggcatctactacgccagctggtcggagaacgacgcccgagagccggaatactgcgtcaagtacgcgatggccgaatcgctgcatgggccctggagcgaaccgcgcgtgctgatcgaacaagacccggcgcgcaagctgtatgccaccggtcaccataacatcgtgaatattcccggcaccgacgaatggattatcgcgtatcaccggttcgcctacaatccggccggtcgctgggctggaggcgatggttgccatcgcgaagtggtattcgcgccgctcgattatgattcggacggctcgctggttcccgttcgcccgcaagttggttcctacgtacgctcgctggcgttctgacctgtgggctgtctgtctctgtctgttcgttgtcttcgccttgcttgcgttttgtacgttttatctgtttcgtgagtttcgtgcgttctgcggatttcacgcgtttcgcgcagtgccgtacgctgatcaccattcagcgtgcggcacttttgcatatctcacgtgttgcgggagatgccgattccgtcgcacaatacgtaaaacgtgaatgaaccgctcactattcttatgttttttgtgactcagagtgtgttttgcatatgtaaaaacgtgaatgctaagatgatatcagtatgtgattgtgtgatgacctgcgtgttttcagtcattctccacaaaagaggaggggaatatgctcaagcgccatgcatatgaccagttgctgaattggaagaaccgtaaaaccaagtagggcttattggtcacgggtgcccggcaggtgggcaagaccacgctgattgggcagttcggtgcagaccattatgagcatgtggctgaggtgaatttcatcgaaatgcctcaggcggtcgaaacggtaagcaaggccaaggacaccgaagacctgatactgcggttatcggtactttccggcacggaaattacgccgggcaagactctgctgtttcttgacgagatacaagcgtgtgaggacatgc

SEQ ID NO: 97 - DNA, 20747 bp, Unknown
  R206_24m  MAG No. k141_16301
gtcgtaggggagggacacgtccacgcgcacgccgtagtagttctgcacgcggcgctcggtgggcaggccgttgtcgtcccagcccatcgggtagaacacgtcgtagccgcgcatgcgcttgtaacgcgcaatcacatcggtatgcgtgtaggagaacacgtgacccacgtgcagcgaaccggagacggtgggcggcggggtgtcgatggagtagacggccttgcggtcgcgggtattgcggaatttgtaggtgccgtcttcatcccagacggcgcgccacttgtcctcaagtccgtccacaccgaccttgtcgggcagcggggtgaggttggcgttgatgatggatttgccttcagtcataaagccaaagtttatgcacgttgcatgacaagccgaactgtacagtaaacagcccagtaggctgttcgcaggcgagatacgaacgatcgaacgatagtgagccaaggactatcgggcgtagcccgtccgtgactgaaggttgcctacttcaccgtcaacccggccagcggcatgcgacgattgatcatcgaggtcgggtagccggagaccttggtggacgccacagtgaagcatttgcgggtatacagccaatcactggccgcatcctcgctgatcagccgggcgtacgccttcattcgtgcctcataatcggcgtcattagtggcggcgcgagcatccgcataggcctgttgcgcttcggtatggtcgtaatggaacatggaatcggggtcggcgaatatgccggcatcatccgtgccgtccatgctcatcacggtcagttcccatttgccgtccttgattcgtttggcataatcctcatcggagagcacttcaaggttcaccgtggggcgcggctgccgctcgatctgctgcttgatggtttcggccaacgaccggtattcttcgggaaccaccagattcaccgtagtcagatattgcgcaccgaagtaggagaacatctgcccagcttggttttcgtcatgcggatacagtccggtcaaatcttcgtatccgggttccagcgggctgatggggccgcccaatgctccggctgcgtcgggttgggcggaggcgatgccggctgcgtcgatttgatagcggaaggctttacgcgcctgttcgtcggagagcagcgaatcgatgccgttgttgtaggccagcagcaccttatccgtagtggccccctccttgacggtcaggccatccttgccgttcaaaccggtggccgtcgaagccgaaaccggtgccgccatatcgagactgccgtcggtcagggccttgctgagcgcatcggcgtcggagtattgcataaattcaacgatattgctggccgctttggtgccatggtaggtatcgctgcgcgccagcttcagggaatggccaggctggaaatcggccacggtgaatggtccggaacctatggccttgcgttgataatcggcactggacgactcggaatcgtagacaatgccgagtttgccggacagcgctcgcagcagcgtcggattgggcttggcaagcgtaatgaccaccgtggtggcgttcggattggcgaccgacgtcagatcgcccaattcgtcgacgtccgccaccttgttggtcacgttctgttgcaacgaccacacggcgtccgaggcgtccaacgtatgaccgttcgagaaggtgacgcccgattgcagtgtcagggtgacggtcagtccgtcatcggaagtcttccagcttgtcgccagtcccggctgaatcttgttgtcttgatcgacggtcactaatgtctcatacacattgtcgacgagcaggcgctcggctgccgcagaggaatcggaccgaatatccaaggattgcggcatatcgtcgatgccaatggtcacatcggcatcgagggatgatcccggctggaaccggttttgcatgaacgtccatcccgcaaccacgagtgcgccgagtgccacggcgactccgagaaaaatcccccacttggaccatgtattgttccgcttgctgtgctgcatggttttcagtctagcggtggattcagcctagaatccgcaattcaccatgatgaggtatgagttagcgcttggacgtgctcttgccggcgggcggcgcatagctagggcaggtgtcggacagcgggcagttggcgcagtcgggggtacgtgcgtggcaggtggcccggccgaacagaatcagtcggtggctgagattcgtccactcttcgggcggaaaacaggcggtgatttccttctcgattttcacgggatcagggtgtgcggaccgccaatccgaccgccaacgcagtcgtccggttacgcgcatcacatgcgtatcgaccgggaatccggggatatcgaacgcgttgccgagcacgacgttcgcggttttgcggccgacccccggcaagctggtcagttcatccatcgtgcgcggcaccacgccgccgaaccgttcgtccagtgccgtggccagtccgatgagatgctgggttttcgaacggtagaaccccagcggatgaatgatgtcttcgacttgggccgggtttgcggccgccaagtcacgggcggtggggtaggtggcgaacagttccggggtgaccgtgttgacacgcttgtcggtggtctgggcgctgagcacggtggcgatcagcaattcgagcggattcgagaaatgcagtgcgcaagcgggtgccggaatcacctggcgcagaatgtcgtattcgtcatgcatgcgcgtgagacgcgcggatttggtttctctcatcgtatggacctaagcggcgtaatgtcgatgattgatggtttgtagcgctgctggtctgtcaggcggcggtgttgagatcgggggtatcgtcatcggtgccgatggcggcagaggatgctttggcggcctgctgtgcggcggcagtttccttatccgtctccggcgggtcgaatcggtagcccacgttgcgcacggtgccgatgaggtgttcgtattcgccgccaagcttggcgcgcagacgacggatatgcacgtcgaccgtacgagtgccaccgtagtagtcgtagccccatacttcctgcagcaactgggcgcgcgtgaacacgcggccggggtgctggaccaagtacttgaggagttcgaactccttgtatgccagatcgatggggcgtccatgcagggaggcggtatagccgttggtgtccacaatgaggtcgccggagcgaatctggccatcttccaccgtggtggtggattcggcgggagaaccggctgctgcggctgcgggagcgttgccgcgctcggagaccaatcgcaatcggccctcgacttcagccggggaagcggtggcgaccaccacatccgcaatgccccactgggagttgaccacggtgaagccgccttcggtcagcaccagcacgattggcgtggacaggccggaagcgtggatgagacggcacaaggttttggcggtcgccagatcatcgcgtgcatccagaaacagaatggtgttctccggcatcttcaccaagctggctgcatccatcggcagcacgcggacgcgatgagaaagcagggcgagtgatggcaaaacggtggcggggtcgctggcgaaagtcatcaacgtaagatccgtcacgctaatccccctttatcctgcaatgtgttacgcaattgcttggtgtggctgtacgagtcgtcagcggcgttatgccgctttcgcgcggtttttcattattctacgcgcttgtagtggacacataggttacaagtttgcggaatatggaacggcagacgtccatcaaccgatgacacggccgagcaccagtgcggttgcggcgatggtcacgcccatcagcattaccggcatcaggccggtaccgatccacggatagcggatatccgggtccggatcggcgtcacgcacccacaacgtggaggccacggccaaggccagtcccaaaacgatgaggatgatcagggcaacggttcccgcaacggtgcccttggcgagcatcgcgcccaaatcaggcaggaagcaccagccggccacggcgagagccgccacacctgaagtcacggcgtgagagagtgcgcggataagatgttcgcgcttctcacgagccatctggcgcccgaaggagaagaccaccagcaccaccagcagcaggcccatggccagtgcccatgaataccaaggaagtaccgagccatccgcagcggtctgatccggcggaaccttgccggtcgggaaaggtacgatgacgaaaatcagagaaatcgcgccaaacaccaaagtgacgatacgatccagcatgctgccgcggaacggccagaacacgacaaatgcggccaacgtcagagcggcgataatcaaagggatgatggggacggtgccaggggagggaatgaccgtggctgcgatgagcagtacataggacgtcagttgggccaacaacatgctcagggctttgttcttccaaccctcctgggtgatctcggtcatgatacgcctctcagataatcgaatttccatcccaatcctacgtcgggcattggaacggtgaaatcaaacaaaatagccctttctggtgaaggggcttatgacactaaatcagaacgcgataacgcccaaatgctccaacagcactttgacgccaagtagaatcagcaccacgccgccggcgatctgcgccggctcctgccagcgggagccgaacgcgcggccaatgtacaggcccgcagcggagaacagtccggtgaccacaccgatgctgaggatggcgaatgccatatgggctttggtgaacatgaaggtcaggctcacgcccacggcgaacgcatcgatgctgcaggccacggccaggggaagcatatgcttccaatcgaactgggcggtctccttggagttttcctcatcttcttcgaaggcttcgtgaaccatgttgccgccgatgaacaccaacagggcgaagatgatccaatgatcgaatcgggttacgtatttgctgaatgtagatgccgcgaaatagccgagaatggggaacagcatctggaatccgccgagccagagggcgcttttcgcggcgtcttgcactcgtacgcgggatacggtcagacctttgccaatggatacggcgaatgcatccatagctacggaaacagaaataagcaggatttgaatgattatcggaatcatggtgcgacagaaggttcatcgccggattaccgtgcgatgggcctcgaccagcgttcctacacgccgcctacgcctagctgaaaaatacaccagcactatatcacgcgatgcacgtcgaatcaaaaaggcgggaggcctccggagaggtctcccgccgacgattcggaatcgaatcacttgccttcgttggcgaggcgttcgcgtgccgcgatgatttccttttcggcggcgtcagcaccggtccagtagtcgcccggcaggacttccttgcccggctccaaggccttgtactgctcgaagaagtgcttgatttcggccttgtggtactcgttgacgtcgtcgatgtccttgatgtcatcgaaacgaacgtcggcgggcacgcacagcaccttgtcgtcgccgccggcctcgtcgaccatgtggtacaggcccacggcgcggcactcgaccacgcagcccgggaacacggagttcggaatcatcacgagagcgtccagcggatcgccgtcctcgcccagggtgccgtcgatgtagccgtagtcatccgggtaacccattgcggtgaacagggtacggtccaggaagacgcgaccggtctcgtgatcgacttcgtacttgttcttggagccgcgcggaatttccacaacgacgttgaaggtttctgccatgtcatttctccttgaaaatcgacagttacgttatcgtctcaccacaataccctgtttgcgcctgcaaaacaggtgcggaactcaagaaaccgtgctgagattatgccgacactatgtctaaacagacgaaatcctcccctcaaggggaggatttctagcggtttacgcacacgataaacccatgcacgtcaacggcatcactgttgcattaccgttgcactaccgcatcactgcacggacaggatgtgagccacatccgcccaaggcgccagagacacgtagttgtcccaaccccactggaattcgcggccggtcagctcgtcgcgcacgttgagcgggcggtcggtgggcagacccagctcgccgagttccaggtgaatcatcgactggtgtgcgttgtgtccatcgaggttcacgaccacaatcagtgtgtccgcttggccggtaccggtcagttcggccggcgtgtggcgtgcgaaagccagaatattcgggtcggacgtaggcagcacggtgaggttgtgatagctcaacgcggccgggtgggcgcgacgaatcttgttgagcgcggtgagcatctcggccacgccgtactgcttggccttgctccaatcgcgaaccttgacctcgtacttctcgttgtcgatctgctcttcgaagccggggcgctgcttgttctcgatgagttcgtaaccgttgtagataccccaggacggcgagcccatggctgccagcaccgcacgcacgcagtggccggctacgccgttgtctcgcacgtaagcggtgagaatatccggcgtggtgggccagaaggtgttgtgctggtagtagccgtcgtcgccattggtgatcggcagatactcttccagttcgtccttggtgttgcgccacgggaagtagcagtgggactgggtgaagcccacgtagctcagggcacgcatcatgcccgggcgggtgaatgcctcagccaggaacaggatctccgggtgcttcttggtcacggcggcaatcacgtcctgccagaaacgcaccggcttggtgtgcgggttatcgatgcggaagatggtgacgcccgcctcgatccacagattcatgatgcgttcgacttctttttcgatgccgggcatgtcggcgttgaagtcgatcgggtagatgtcctgatacttcttcggcgggttctcggcgaaggcgatggagccgtctggcttgtgacggaaccagttcgggtgggccttgacccacgggtgatcgggcgagcactgcagtgcgaaatcaagcgcgatttccagacccagttcatgtgcacgctggcacagggccttgaaatcgtccatggtgccgagcagcggatccacggtgtcgtggccgcccagctcggagccgatgccgaacggcgagcccgggtcatcggggccggcgaccagcgtgttgttgcggcccttgcggttggtcacgccaatcgggaagaccggcggcagatagacgatgtcgaagccttcggcagcggcgcgttcgaggccggccatcgaggtcttcagcgtaccctgaatgatcttgccggtgttcggatcgatggtggcgccttcggaacgtgggaagaactggtaccaagccgcgaagctggacttcgggcgttccaccttgaaacgctggggctggctgggggagatgccatcgcgcagcgggtgagtctcgtgcagggcggcgatggtagggttgtcgccggcggcgaggcgatcctcggcgctcagcgtctgatcggccatggtctcagcggccttctccaaggtcttgcgatcgcgtgcggtcaggccggcgtccggggttgcggcccaacgggccagcagctcggcaccggaattgagcgcgttgtccacgtcgtccatcacacgcaccttgatacgggcgtcatgcagccaggagacgtacgtgtcttcccaaccttcgatggtcacggtccattcgccgagctgacgcttgacggccgcgtagccatcctcccaaggcttcagatcgctgtgttcgccgcacttgaccatcacggtccaacgatcgaggccgggatttacgcaggtcatggcccggcgcatggtttccttgccgcgcgggttgcgcacgatggcggtggcacccaccttggtacggccttcgatgaacacttgggcggtcatctcaaacggttcgccgagttccacacgggcggggaagatgccacgctcctcggtgggagtgatgtccatgacattgatgcggccgaactggccgggctcgtttgcttcgatggacggtgcggggacttcgacagccaggcctttcagcgctgctgcggcgcgtgccgtttcggcgctgactctcttgcgcttggttgcggggctctttcgggcagaagtcgtctttgacttcgtcttcgtggtgttgttatcggtattactagtgcgcgtggtcgcgcgatgttgtactgctgccataaggccctattctagaggcttttgaacatatgttgcacattgtggataacttgcaggtaaacgttcggtcaaccgcatgaggtggataactcggcggaagagttatccacaactcgccggcaaacggcaagctcggaccacataggccgaaaaatcggctgtagcgaatgaaaatctgccatgatcgtggcctacccgcacacagtgcagtatgcggggaacgtaccaggaaaggacgaatgatgataacgacatggcggcaacggggcatggccatcgtagcgatgctgaccggtctgataataatggtgggagtggtgttcggctcggcgaatacggcgtatgctgcgacgttgacgcccgccgacgaaagatatcacgtgatgtttccatacaacgatatggaatattacgtcggtgtcgcggggctggacgcttcgggcaacaagtactactgcatcgaagcggggaaactgagcgactatgtgataggccccaccacggtgcttgcctccgatgagaacgcccggcgtatggcatggatccttgaccggtaccgcgacacggatgccgccacccatgcggcgatcggcatcatcgtgcaggatcacttcgggcgcgatcgggacgagtgggcgagacagatggcggtcattcaaggccggtatcccgagatcgtggcgaaggcggcccggatatgggatcaatcggccggcaagacgcctgcgggcacgacggtggaacgcaccgatgccgaggctttgcgcatcggttccatctcggtgaaagtggtgaaccgcgacggtgacgcgatcgcgggagtgccgttcactgtcaccttgcaggggccggcgcggttcatccaaggcggcaacacgttctcgggggtgtcgacgagcgccggatcctcgatcgcgtgggaggcgaccggcgccggcgaggtgacggcgaacaccacatacgagtatgggcggatgcacgtcatggacagcactcaggacatgctggccttcgattcgatggcttccgccggcggttcgtcgtcgacgttccaggtgcgcaaggatttcgttccgtcggtgtccacgcaggtgtccgataaggtgcttgatgcggcttcgccggtgttcgatgatgtgaccagcggcgtgggggacgagggcagtcattgggtgcccggtctgaagctgcaggcgcgtggatactatttcgacgggctcggcaaggacgatctgggcaaggtcatcgcgccgaacgcacgggagagcgcggacgcttttctcgcccggctggcgtcctcgggttatgagccgagtgcttatggcaaggcgtccttcaccggtgtggggcagcgggttcgtgtgcgggccatggccgagccggacggtgacgccgcctatctgactccgaagaccggcggctttggcacctgggtgtgggtgttccggcggagcgagcaaagcaaacgggcgcaggaataccttaccggcgactgggtgagcccgttcatggaggcttcggaaagcaacgtggggcgcgggaaggtcgaagtcatgtcgacggttaccgaacattcggcggatatcggcgccgaactcagcgacaccatcaccgtatcggggttcccggcggaccacggccagttcatgggtgatgaaacctatggtttcgcggcggatcagccgtatgcgacggtgagcgtatggtggtccggcgatcccgacaacccctccaacgatgaggcgtacaagccatccgggggagaggtccccacggaagacgacaaccaccggttgctggccacctgggagattcccgcgatgaatggcacgttcaaaatcggcgccggggcgttggacgcgcatggcgctcccatgcatctgaccgccgaacggcatgggtggtacgtgttcgtttggcggttcgagggggatgaccgtgtttccccggcgtccagccggtatgacgatgcctgggagcgtgtgcgggtgcttcccccatgcgagtcggagaaaccgtgcgaaccggagaaacccgagacgccaccggcgccggcggagacaatcacgcccaaccctcgcccgtcactgcccgtcacgggtggcgatgtgtcgcttgcctcggttctggccgtgtcagctctggcgataggcgccatactgtccatcgtcgttcggtggcgtcgttgctatgaccgatccaagcactggacgatgcgctggccgatacgttgacccgctgcggcatgatgccgatgatgtcggctggatggtgaaccgcactccgcttctgagcagaaggacgggagctgggcacgaagtcgattgtgacatacgacttgtgcccggcttccgcttcgttgagaaacttcacgcctgtcgcctcccgtggattagacaactgaaggtccgcgatgaaaacgacgagacgtttatgatcgccgacttccctgggcaccgtagctgcctgatcgcctttcatccatatcgccccggtcaggtcgtcacctacaacggcggcggcagcgtcgccaccggcagcaacgccccaccgtcccgtaccgtgaccgtccgtgcagaccctcggccccgtatggggctggacgtgggccgatccggccgcgacgaccatcagcgccgtcgccctgaccatcggcgtcgtcatcggcgccagcgccctcaaggccaaggcatccaaggccgaataacaagaagcccccgaacctgaaccgtatcacgcggcaggttcgggggcttttcgccgtatatgggtcaggccatcgcgggctgtgcctgattggcggtcaggtatgcggccagtgccttgcggatcagagcgctcttgccgatgtgctctcgttcggcctgtgcccgcacctgtgcgtccatgtcgggcgtgaggtatgccttgtagagcacgtcggccttccggcggggctggtcggcgagggggcggccggcgaagatgtcgtcgatgtcatccatcgtgatcgccctttgcgggcggatggtctcgccgatgatggcgggggtgtgctcggtgtattcgtccgagagctcgtcccagtctgtttcgttgctcatgatgtcctccttggtgttttttagtcgtcgaacttgtagagccattcgcggcggcagtccatcgcgtggaacaccttgcgggtgcgctgggataccagcagctccacggggtgttccctgaactcgtccgggtgtccgaggatcgccatgaccctgtcgccggcgtgtctcgactgcacctcgaacacggccaccggatgccggaatatgtagtcgatctgtggctgtgtgagccagtgcttgaaggctgacggctcgcattcgatcatgcttattgtggtaccataatttagtaccacaatcaatttagtaccacaatcaagtcggggaaacggaacatcgtgatcctcctaggcggcgaggcgcgtggcttccacggcggcgcgcagctggtcgtcgggcatggcgatgtaccgttgcgtggtctcgaccgaggcgtggccgctccaccggccggggaacagatagccgttggcggatcggatcagcagggcgaggtcgtcgccctccacgtccctagatcgcccttaagcgccctcgacaatgcggacatctggcatcggcgcgtgccgatcgtgttgggggagtagcccgccgccttgagggggtcgagccatagattgattgattctgcccagagcgggcttggatgttgttttttcacaggacatcatcgccccgatcggatatgcggccccgtagggcacgacggcggataaacgaaaagccgtcacgaataatcgtgacggcctcgcccgcagtagcggggcatggatttgaaccatggacctctgggttatgagcccagcgagctaccgagctgctccaccccgcgtcggcttatctctcagacagctctatctacaataggtgcagattccagaaagtcaacatcggcgtgtcgtgtcattttcccacggttttaaaacgtgaatcggctcacgcagcgaggggtttggggcggagccggagtcggggtgataacgcgccataaatggccgttataggaatgccctgaaccgttatcccgaatattgacataataggaacatgcctatcaagatccccagtggcctgccggccagagatatcctcgattcggagcgcatcttcgctctggagaagcccgaggcggagcgtcagcgcgtccgcccgctcaaactggtgatcctgaacttgatgcctaaaaaaatcgagactgaaacgcagctgctgcgtctgatttccaagtcaccgctgcaggtcgaaatcgacttcatgaagacctccacgcatgaggccacgcacgtttccgccgatcatctcgtcaagttctacgaaaacctcgatgcgctcaaagacaactattacgacggtttcgtggtcaccggcgcgcctgtagagcatatgccgttcgaagatgtggactactgggacgagttcaagacgattctcgactgggcctccacccatgtgttctccaccatgtacctgtgctggggtgcgatgggcgcactgtactaccgctacggcatccacaaggtggattaccccgagaagattttcggcgtattcccgcagtacctgcaggacgaatactgcttcctgaccaatggtttcgacgagattgatctgcagccgcactcccgcctcgccggcgtgaacgaaaacgaggtacgtgccaaccatgaccttcagatcttgacttgggggccacagtccggcccgggcctgatcgccacacgtgacttctccgaagtgttcgcgctcggccattgggagtacggcaaatacacgctggccgaggaatacgagcgcgacatgtccaagggcatgaccaacgtgcccttcccgaagaactacttcccgcatgacgattcgaagctggaaccgttgttcgcctggcgcgcccacgccaacctgctgtggcgcaactggctcaactgggtgtaccagaccacgccgtatgacctgaccgaggtgccgcagctcagggctgagaagaagctcggtactgatcgttcgattcggcatgagccgggcgggccgcgccaggatgatttcgagccgttcgcccacgacggatacggagtgatcagagggtagcgcaaatgccgcacatcctcgtattgtgactaatagcgcacaacgcttgcgcaacatccgaaaaaccttgcgccgccgccgattccagaagacgcgccggtgtagtattgacattgtctagacgcaggcaaataatcactcttcagtcattcggagccgaatgcccagcgcagactccgtgtccgcgcccggcagactccacaccgaggagacgaaagtaacgagcacgtcacatttgcctgcccggtgggtttaaactgacacctgatattgaagaagcaggaggcgtgatatggtcggttcgctcagcgcaggattgctgttggctgacgaggcaggcgctcatctgccctcggttggtgacttccttcccccggagattctgttccagggaactccgtttgctatcaaccgcattattttgattcgtatcgtggcaaccatcgtgctgttggtggtgctcggcgtgaccgcaaagcgcgccaagctcatccccggccgttggcagggcgtggtggaatacggtcttgacttcgtgcgtgacaaggtcgtctatgacgtgatgggcgaggttcgcggcaagcgctacgtgccgatgatcaccaccatcttcttcacgattttcatcttcaacctgtgtggcatcatcccgggtatgaacatggcggccaccgccactgtggtcatgccgctggtgttcgccatctggaccatggtccagtattggatcgccgccgcacgttcgcaaggtcttggccattatctgcgtcacgagctgttcacccccggtgtgccgtggccggtctacatcctgttgaccccgattaacatccttgagttgctggtcatccgtccggcctccctgaccatccgtctgttcgccaacatgatttccggccacctgatggtcgccacctgcctggcattcgcacagtactggatcgtcgatgcagccaacaagctgcaaggcatcccagtcggcgcgatgtggttcgtcagcggtcttgccatgacgtgcttcgaggcgttcgtcgccttcctgcaggcttacgtcttcgccattctttccaccgtgtacatcaacctaagcttcccggaggagtgaggttcaaccccctctttcggaacccggcctcgcctaggtaggcaggaccgaacgaaataagatttataacgtcgccaagtacgttagaaaggaaacacaatggatatcatcaccctcgcagcggtcgccggcaacctgtccgtcatcggttacggtctcggtgcggttggccctggcatcggtctgggcatcctcttcggcaaggccatggaatccaccgctcgtcagcctgagatgtccggcaagattcagaccatcatgttcatcggcctggctctgatcgaggtgctggcactgatcggcttcgttaccgccctgatgttccactgatcgaacgttttctcagtcgaatacagaaggcaaaacgaatccaccagtgaaaggaggacttcataatgacgctcgcagaaggcggaattgatctgttcattcccgagacctatgacattgtgtggtccctgatcattcttgtcatcgttgcggtgttcttctacaagttcttcatgccgaagttcaatgcgatcttcgacgagcgcgccgccaagattcagggcaacatcgccaaggcggagcaggctaagaaggacgccgacgaggccaaggccaagtatgaggcccagctgagcaccgcccgtgtggacgccgccaagattcgcgacgacgcccgcgcagaagcgtcccacatcatcgccgacgctcgttcccgcgccgagtccgatgcggcccagatcaccgcatccgcacagcgctcgatcgaatcccagcaccagcaggccatcgtctcgctcaagggcgaggtcggcgcacttgccaccgccttggccggcaagatcctcggtgccaagctggaagacagcgacgtgcagtcctcgatgatcgattcgatgatcgacgacctgggcgccaagaagtgaccgtgaccatccgtaaccagaaagggaggtgaccatgcgaggagaggcatcacgtattgcagaccgcgagtcgcgtgattcgctggccccgaaactgcgcgacacccgtgaggacgcgtggcggatcggcaacgaactgttcacgatcaccaaggtgctcgatgacagcattcagctggaacgcgcactgaccgacccgtcccgcccggtcgccgacaaggtggccgtcctgaagggactgctcggtgacaacgcgcatcctatgaccatggagatcatgaccgacttggtctcccgccgttggagccgtgcgcgcgacatcgccaacgcggtggaggacttcggcgtggacgccatgatgtactacgctgacgccaccgacgccacgctgcaggtatccatcgagctgtccgagctgcattccgcactgctgaacctgccggtcgtccgctccaagctgtacgactgccaggccaccagcgaggcccgtgtgaagctgttccgcgaggtgttctccggcaagaccctgaacaaggtcaccatgaggctcgccgaacacgccacctgcaacctgcgccgccgccgctacttggagaccatccagtggctgatcaacaagttctcccgccacatgggcgagtcgatggtcaccgtgaccaccgccaccccgctgaagaaggagcagattgagcgactggtcgaggtctactccgccaaggtgggccgccaggtgcacatcaactcggtggtcgatccgaccgtactgggtggcatgcgcattcaggtgggcgacgaagtcacggacaacaccgtggtcgcacagctgcagaacctgcatcgcaaggtgcagacggaggcgactccggcctgaccggccgagccaatccgtccaacaccacacacaagcaaagacttgactgaacaataaccaatagaaggagtgatcatggcagaactgaccatcgatcccgcctcgattcgcaaggccctcgacgactttgtgtcgtcgtacaagccgagcgacacccccacccaggaagtgggctatgtcgccacggccggtgacggcattgcgcacgtgacgggattgcctggttgcatggccaatgagctgctgacgtacgaagacggcacgctcggcctggcgttcaaccttgacgcccgtgagatcggcgtggtggtcctcggcgatttcgcaggaattgaggaaggccaggaagtgcgacgcaccggcgaagtgctctccgtgcccgtcggcgacggctatctcggccgtgtcgtggacccgctgggcaagccgatcgacggcctcggcgagatccagggcattgagggtcgtcgtatcctcgaagcccaggcccccgacgtgatgcaccgccacccggtcgacgagccgctgtccaccggcctcaaggccatcgacgcgatgaccccgatcggccgcggccagcgccagctcatcatcggcgaccgccagaccggtaagaccgccatcgcgatcgataccatcatcaaccagaaggccaactgggaatccggcgacccgaagaagcaggtccgctgcatctacgtggccatcggccagaagggctccaccatcgcctcggtgaagcagagcctggaagacgccggcgccatggagtacaccaccatcgtggcctccccggcagctgattccgctggcttcaagtacattgccccgtacaccggctcggccatcggccagcactggatgtacaacggcaagcacgtgctcatcgtcttcgacgatctgtccaagcaggcagaggcctatcgttcgatttccctgctgctgcgtcgtccgccggggcgtgaggcctacccgggcgatgtgttctacctgcactctcgtctgctcgaacgttgcgccaaggtctccgatgacctgggcggcggttcgatgacgggtctgccgatcgtcgagaccaaggcgaacgatgtgtccgcctacatcccgaccaacgtgatctccatcactgacggccagatcttcctgcagtccgatctgttcaacgccaaccagcgccccgccgtggacgtcggtatctccgtctctcgagtcggtggcgccgcacagaccaaggctctgaagaaggtctccggtacgctgaagatctccctggcacagtaccgttcgctggaatccttcgccatgttcgcctccgatctggatgcggcttccaaggcccagctgacccgtggtgcccacctgaccgagctgttgaagcagccgcagttccacccgtactcgccggaacaggaagtcgtgtccgtatggaccggcacccacggcaagctcgacgacctcgacctgaaggacgtccttccgttcgagcagggactgctggactacatcgaccacaacaccgatatcctcaagaccattcgcgagaccgaggaattcaccgccgacaccgaggctgccctcgataaggccgtggacgagttccgttcgacgttcgtctcttccgccggcaagccgctggtcgagaagaagccggacgttgacaaggccgcgccggttgatcaggaaaagatcgtggcgggagaaaagtaagccatgggctcgcaactcgcattgaaatcacgcatccactccaccgagtcgttggcgaagatcttcaacgctcaggagatgatcgcgtcttcgcatatcgccaaggcccgtgatgtggccctgaacgcgaagccgtacaccgatgcgattttcgatgccgtgcaagcgttggtggcccacacccatatcacgcatccgatcgcggtgaaggacgagaagaacccgcgcgtggctgttctcgccctcacctcggatcgtggtatggccggcccgtacacctcttcgattatccgtgaaacggagtcgctgctgtcccgcctcgatgcggcaggcaagcagccggagctgttcgtgtacgggcgtcgcggttcgacgtactacaagtaccgtaatcgtgacatcgcggcgacgtgggaaggcgacaccgaccagcccggcgtggaaattgctgaaacgatctccaacactttgatggacgcctacatgaagccggctgagaaaggtggagtttccgaactctacatcgtctacaccgagttcatcaacatggtggtgcaaaaggtgcgcgtgctgcgcatgctgccggtcgaaatcgtgaaaaacgagaccaaggtgcccgatcctgatgaagaggcaccggctactgcggatgtcgctccgctgtacactttcgagcccagcctcgaaaaggtactggacgcgattctgccgaagtacattcagtcccgcatccacgagtgcctgctgaccgcggccgcgtcggaaaccgcaagccgccagaacgccatgcacacggcaaccgacaacgcacgaaacctgatcgacgaccttacgcgcaagctcaacgcttcccgccaggcctcgatcacccaggaacttaccgaaatcatcggcagcgctgacgcgctgaccaagaaggaagagtaggaacgcatatggctgacaaccagaccactgcggccgagcctaccaacggtcgcgtcacccgcgtccagggctcggttatcgacgttgaattcccggtgggtcatctgcccgacatctacaacgccctgaaagtaacgatcgtcaacaccggcgccaaggaagaaggcgaggcgaaggagaccgagatcaccctcgaggtcgaacagcacctcggtgattccacggtccgttgcgtcgctctgaagcccaccgacggcctggtccgtggtgcctccgtctccgacaccggcgccccgatctccgtgccggtcggcgacgtgaccaagggccacgtcttcgacgtgtccggtaacatcctcaacaagaagccggatgagaccatcaccgtcaccgagcgctggcctatccaccgcaacccgccggccttcgatcagctggagtccaagacccagatgttcgagacgggcatcaaggtcatcgacctgctgaccccgtacgtgcagggcggcaagatcggtctgttcggtggtgcaggtgtgggcaagaccgtgctgattcaggaaatgattcagcgcgtggctcagaaccacggtggcgtgtccgtgttcgcgggcgtcggcgagcgtacccgtgagggtaacgatctgatcggcgaaatggccgaggccggcgtgcttgagaagaccgcactggtcttcggccagatggatgagcagccgggtacccgtctgcgtgtcccgctgaccgcactgaccatggcagagtacttccgtgacgtgcagaaccaggacgtgctgctgttcatcgacaacatcttccgcttcacccaggccggttccgaggtgtccaccctgctgggtcgtatgccttccgccgtgggttaccagccgaacctggccgatgagatgggttccctccaggagcgcatcacctcgacccgtggtcactcgatcacctcgctgcaggccatctacgtgccggccgatgattacaccgacccggccccggccacgaccttcgcccacttggatgcaaccaccgagctgtctcgtgacattgcctccaagggtatctacccggctgtggacccgctgagctccacctcgcgaatcctcgatccgcgttacgtgggccaggctcactacgactgcgccaatcgcgtcaaggcgattctgcagcgtaacaaggagctgcaggacatcatcgccttgatcggtatcgacgagctcggcgaagaggacaagaccaccgtgaaccgcgctcgtaagatcgagcagttcctcggccagaacttctacgttgccgagaagttcaccggtcgccccggctcctacgtgccggccgacgagaccatcgaagccttcacccgcatctgcgacggcgtgtacgacgacgtcccggagcaggcgttctccggtatcggcggcatcgatgatctcgaagagaagtggcacaacatgcagaaggaactgggtgcgtgatggctgcggaaaaaaccacgatgaaggtcaacatcgtcgccgctgaccaccctgtgtggcacggcgaggcgacgagcgtgaccattcccgcctctgagggcggcatgggcatcctgcccgaccatgagcctgtgctcacggtgatcaagcagggtacgctcaccgtggttgagcccgatggcgatcgccacatgttcgaggtgaccgacggattcatctccttcgactcgaacaaactcac

SEQ ID NO: 98 - DNA, 88879 bp, Unknown
  R206_24m  MAG No. k141_17476
ataccgcccaagctagggtgtttgcgacggtgcaaccctatgctatagtggcatccagaattgaagttgaatcatgcaccacttccggagaggaggtagggcgcatgagcggtgatgttgttgccccctctctgggggtacttcattgaagacctcggtcatagcgaccgaggtcttttcgtattcgcgggaccaggcctgaaagcattcggcccgcttccctgaaggaaacgggccgaatgcttggactcgggtttcaacccggaaggcttcagtccagcgacttcaccacaacgacctcggtgggcacgttgcccgcggtggccttggagtaggggcacagctcctgcgtacgctcgacgagcttggcggcagcctcatcgtcaagatcgggcagaactacctcaatcttgcccttcaggccgaaggactcgccttcaggaccgagcgagatgctggcgcgcacctgactcttggccagcttggtggccgccacgcgctgctccttggcggcaagcgccaacgctccttggaagcaggcgccccagccgatggcgaacagctgctcggggttcgtgccctgacccttgccgcccatggcgaccggcgtgtccaggtcgaactccagttccggctcatggctcacggcgtggccgttgcggccgcccgtaacctgcgccgtagcggtgtagacgatttgcgatggttcgttaccttgatatgtgctcatgctttcatctcagcacgtgttcacgcccgccacaaggactgtcccaccgtagacgatgtgacatcatccacactgtgacttcgcgcacagagtcccgacaccgtcctcacctcgtttatcggcaccatgcgtgtataaccacatatggcattatcggcgaatatcggccggcagaccagttgcacaaggagaacatcatccacatggcagacaccgccaacaccaacgcctggttgccggcgctcaaagcggcgtttccgctgaccataccgatttgcctgggattcctgtttctcggcgcctcatacggcattctcatgggcaccaagggcttctcgtttgtatggccgatgtgcatgagcgcgttcatcttcgccggttcgatggaattcgtcacggtgaatctgctgctctccgcgttcaacccactcgccggctttctgctggccctgatggtcaacgcccgtcacctgttttatggactatccatgctcggcaaattcaaggggctcggctggaagcgtccgtacctgattttcggcatgtgcgacgagacctttgccatcaactccaccgcgaaaatccccgccggtatcgaccgaagctggttctacttctgggtcacgctgtgcaaccagctgtattgggtgaccggcgccacactgggcgggctgattggcgcgcatctgccgttcaataccgacggtcttgatttcgtactgaccgcgctgtttctggtgatcttcctcgatcagtggctcgccggcaagcatcgcgagcgactgtccgccgtcatcggtgtgctgacgtcgctggcctgcctgctgatattcggggccaatgatttcatgattccctcaatgatcgccatgctgatactgttcgtcgcgttgcgcccgcatctggatgtgttgcggccggccgccgacgccccggaagccacggcagaccgtgccatgagccacgcagcggaccagcagaaggaaggacagacgcgatgacgatgaccatctggcaaggcgcgctcaccatcgtgacggtggcgctggggacgatgtgcacccgttttctgccgttcctggtatttcccgaatccaagcagccgccgcgcgtcatcgaatatttcggccgagtcctgccctatgcgatgaccggtctgctggtggtatacgcactgcgcaacaccccgattctgaccggttcacacggccttccggaactcatcgcctgcaccgtcatcgtgctgctgcacgtctggaaacgcagtatgctgctttcaatcgccggcggcatgatcgtatacatgctactggtgcagctggtgttctgaggttgggctcggcttctccttcgttgatctctccctccggtcgccttcggcgaccacctccctctgtgagggaggtgctgaacgcagcgaagcggaggtagagacccgcggtcgtaagactgcgaaacacacagcatcggccacaggccgattcctacagctgcttcgccacccaatcgacgatgtacggagcgacttcctcaatctggtcgatggcgacctcgaactcgtgcttgccgccgtaccacggatccaccaaatcaatctgatcctcgcggccgggcttcggcttgggcagattcgggtcgaagctgcggtacatgtgcacttcggcgcgcttgccggccggcagcatgcgcagcagggcgcgcatgtgggaggcggtcatcggcaggaacaggtcggtacggtcgatttcctcacgtgagatgcggtgtgcgaagtggtcacgcggaatctcatcaccatagccacgttcgcgtaacacgcgcacggcacgcgggtcgatcggatggctccactcctcgtcggacacaccgctggattccacgttcacctggtcgccgagaccgcgctcattaaagaagtgacgcagaatgatctcgcccataggcgaacggcagatattgccggtgcagacggtcattacggtgtagggctgggtattgctcatagctttgaatcaatcctcaatcgggcttcaccgggccgcacacggcccgaatgtgtttttggggtcgaatgaatatgaatccggctcatgccgccataaaggacacaagccggattcgcatgcttacttggttttgaccaagatacggaaacgataggaatcgatgccggactcctccttggcgggcgtacgccactcacccacttcggcttcccgccacatcccggcctcgaccagcgacgccatatcgggcgcatagctgtcggcatccacagtgacggccagatcagtcacataggctttgtccgcgaacggcaacgcctcggcgaacagctgggcgccgccgaggatccaaatctccgaacggtccagaccgtcgtccggaatcgcctcctgacgggccatatcgagcgcgtcgtcaagactggtgaccacagtggctcccggcgcacggtacatcggatcgtgggaaacgacgatgttgtcgcggttgggcagcggccggtacttgaccccaagcgattcccaagtcttacgacccataatcaccgggtgggagacggtcagctccttgaaatgcttcatatcctcggcacagtgccaaggcatgccgccattgaggccgatggcgccggcgcgaccttccttgtcgcgggcttcgccccagataagattcaccgagaaggtcttgggataatcgtcaccccagtcttcttcagtggcagacagcccggcagatccgggctcgggttcgtgatagccgctacggctactgtcatgctccatttcgcttactcctcctggattgcggaactgggccttagtgtagtggacagcgaagactcggggcccgtcgcctccacagtcttcgctgtccacgaacaacgctcagaccgcaacaggtgccttaatagtggggtgatgctggtagccgacgaccttgaagtcctcatactggtagtcgaacagggaatcggccttacgaatctcgatggtcgggtacgggtaaggcttgcggcccagctgctcaaggaactggtcgacgtggttgtcgtagacgtggcagtcgccgccggtccagacgaattcgcccggcttgagcccggtctgctgcgccatcatcatggtgagcagcgagtaggaagcgatgttgaacggcacgccgaggaacatgtcgcaggaacgctggtacagctggcagcttagcttgccgtcggccacgtagaactggaagagcgcgtggcagggcggcaacgccatcttctccacctcggccggattccacgcggagacgatcatgcggcgcgaatccggatgatgcttgatgaggtcgagcacattggagatctggtcgatggtgcgattcgggtcctcgggggtcggtgcgggccaggaacgccactgcgcgccatagaccgggcctaggtcgccgttctcgtccgcccactcatcccaaatatgcacgttgtgctccagcagccagttgatattggaggaacccttcaaaaaccacagcagctcgtaggccaggcccttgaagaacacggtcttggtggtcagcagcgggaagtacttcgacaggtcgaagcgcatctgctggccgaacagggaaatcgtgccggtgccggtgcgatcggacttcagcgtgccttcggtcaggatcttgcgcaccaggtcctcatagggcatcggaatgtccgtttcgggacgtgcggggatacgggagcgaatatctgcgagttgttcttcggtcaaagccatgtgcaccagtgtagcttaaggggcataatagagaagtccgatgatgcgggagagcggccaggtgccgcgctcccccgctggcatggcgatgggccagatcgccggcggctgaaaataaaggagcagctatgggtaagcgactgtgggttgaacgcaacaaggacggttcgtgggatgcgttcagcgacgatggcgcgcacattaagttcggcaaggatcgtggccagttcacgccgggcgatctgatgaaggtcgcgctggccggttgcgccgcgctgtccagccagttcgccatcgaacatacgctgggtgagggcaagggtgccaagattgtggtggatggcacgtacgaccctgagaacgacgcctacaccggtttcgaggagcaggtggtgattgatgcttctgacgccagcctgtccgaggaggatgccaacaagctcaaggaacgcgtcacccgccatatcgacaagggctgcacggtcaagcacacctatgtacaggagaccccggtgcgcatgaacgtcaccgtcaagcactgacgtactaataaaccgacgtactaataaattgagctccctctgatgagggagctcattgtatacccggactttactgcctgtcgggatcgatggtcttttcgatctgctgggcgacttcaggctcggctgcggacaccggaatctcctcgacgccggcaatctcctccagcgacttggtaggcacttcggcgggcgagctcggcacggtgtcgagacgcgattccgcagcctcaacatacttgcgtggcaccacgtacaccgggccggccgcatgctgcagcagtccctggctggtggagcccagcagcagaccggtgaagccgccgcgaccacgggagccgacaacaacaacatcgtgatcgtagctggccttggtcagtgcgctgacggccgggccggaaacgatctgcttgttgattttcagatcaggatgcgattcctgcaacggcttgatacgcacctcaagatcgtccttgtaggactccatgatggcatcctcgccatccacgcccttcaggttcggcacagcggaaatcacgtccagttccgcaccccagcacgtggcgaagtcggcggcaatgtccagcgccttcagaccccacttggattcgtcggagcctacggccaccttggtaatcgtgttgttcaggtgcatcaggttgccgtcatcatcggtgtacggcaccactacaatcgggcagtaggcgtatgccggcagcgacgaggacgtggtgcccagcagacgctcggccagaccgcccttgccacggttaccaatgacgatcagattgtagttacgcgacaattcgacgaacaccgatgccgggtctccggtaacaatcagtgtggcggcttcgacgccctgctcgtctgcgatggccttggccttggccagaatctcctgagcatcggaatgcgcggcgttatcgtcccccatcgccgtgtaagttgcatcgaacgaaacggcggcatagctcggcagggaatatgcgcagacaatctgcagcgtcagccccgcgtgctttgcataattcgcggcccaccatgttgccttgtaactggcatgcgacccgtcaacgccgacgagaatggccttgtcgttaatcatgacgacctccttgaagttattgtggcacgaataccgcgtacctccaacaataccccgcgacactcggtttggccggtatcctccgctcaaaaagaaatccgcgtatacgaaaaaggcacatcccaaaggacgtgccttaatacgaattcgcttaccgcataattcttgttacatcacgcggcgaatggaatatccagctccaccgaacacggaaacgttgcttattgccgttccctgcaccgggttcatagcattcatcacctgtccgttaccgatgtaaatggccgcatgagtaccattcgcaagaatgtcacccggcttggcatccgccaagcttgcgaccggagtacccacagtggcttgagcaccagaggttcgcggcagggaaatgccaaactgggagaagacgtactgtacaaaaccggagcaatcccatcctgccggagtgttgccgccggcaacatacggatagccttggaacttcagtgagaagctggcaagctcagcgccagtgccagtcattttacccaagtcaacctgtggaatcgacgcacgctgttcagagcggctggctgcagcagcagcagcggactgggctgccgcagcttcatcagcggctttctgagccgccgccgcagcagcagcctccttctcggcctgagactcggtctgtggcacatcaagagtctcgatgccaccccatttagagttctcgtcaaccgaagtggaggtggattcggcgaacaaattcttcttcaccgaactcgccttcgggaaagaacgtgaggacaccatagcactcgtctgcgcggaatcggcagaggcaaacggggctacgcatgcaaacatggcacccgtggcgataaccgccactgatgtggaaataatattcttaacgttcgtcatcagcgccttaccttagcacacatgggtcgatttcataacaggaatgtcttttcgaagatgatgtcgcgggtgtatcactcggcaggagaacgcaacgggcctcggataccgattggcatccgaggcctgcaatatatcaatcaataagactgcatcacgggatacgtaccacgatggtgagtttttcggtcatggcgctagcgagagccacgctgtagccgttccagccaccatggaccgcctgaccgttgccgacatacagcgccacatgatcgtagtgcgcgccgccattccatccaccggtgttggcataaatcagaatatcgcccggctgcagggacccgtctgtaactacgtggccaccgggaacattgacgtactcttcaggccaaccgtggaagttaataccacgggccgccaacgcttgactgaccaatgcggtgcagtccatgctctgtccgatcaaagaatacgcacggtcgatagaggcaccggcaccagcggaaaccgaaccactggcatcggaataagtaacagaagagcgagactcattacggctcgcggcgttggcctgcttctgggtcgcctgagcctcggcctccgtctgcttcttggcctcctcttcggcagccttcttggccgctgcggcatccttttccgcctgagattccgtctgcggcacgtcgaggttctcaatgccgccccaatcagcattgtcctcaacattcgtggcagtggcttcagtcgtcagatctttgcgcacctgggtgtacgaggggaaggacttggtggaagtcacagtaacaccctcagctgcagtcgctgtaggaacaaacataaacgagcaagcacaggagacaatcgcggcaacaatggaagaagctacagttttggtcttcatagaaccatcaccttacacggtgcgcattaactcgtacaggatggaagaaataaaacaccccggagctattgggatatatcggcgtgtcggcacaggtcagttcggactaatacgcggtcgcaacacttgaaatgtcatttcgcgcgaacgattgccgatagggcgacgtcacatccgaacagtaatcaccgaatgtaagccaatgaaatgaatcagtagtggacgtactggaacttaccggcttcggcggcgctgaacgtacgggtcgaaatcacacccaatcccttggcattggattcggagatctcaatggagccgtcggcattgatcttttccagaacggcaacatggccgtatgtgccatcggcattggcctggccaggagcgaacaccacagcatcaccgacatggcgaggagtgttgtccacccaatagcccagagcggaagctgacgccgcccactcgccaccattgccgaagttgccgctggaaggcagtcccagttcggcacgacgctggtacgcgtaccacgtgcactgaccccacggatagttgttggagttggtgccaacggcatggttcgggttgaagccagccggcacagcatcgccatcggcatccatgagagccgacaccacaggattgttcgcattattgcgattcatcagcttggcgtccaaggtgctgtctgaattgctcagcccccaaccgccttcattggtggactgtgcggtaacggaggacgaactcagatcagtacgtgcttcggaacgagaagccgcagtcacatcgctgatgcgcttaatctgcgtggtcgtcgtggccggatcagccacgaacgagttcgtggcatctttattgttggaaaatgcgagagcacctgcggccgtgccgaccagagcggccagtgaggccgaggcaagaatatggctacggcgttcagcggcacgagcggcctcacgaatggaacgacgagtctggggagcgatttcattgatcttctcggcaatggccggatcaagccccaaaacaacggcgtcgctgccagcggattgcaccgcgcgcacggcacgaacggaatgagaacccttgccggaggcaaacaatgccttcgctaagctgaacttctggcgcgagaccgtggtcgctttatgcgaagcatgcttcatactacgttaactccttggatgggttcggcggggccctttcaacgaccccgtatgaccggcacaattgagtactgtacaacgaacagaggtcaatcctcaatgcgaccccccaccatccgggcatgtcaaacgatttacgtaaccgtgcggcagggtgaaaaactgccttgtttccgcccgttcacgaacctcactatccggttatcggaagaatcactaactcatgtcattccgacacaccgtagccatgatgtgctgcgtacattctgcactgcattccgcattgccgctactaccgcccggcaccccggaattccgcagtagccccgcagcaatcccgcacaccgagcattatccgtgatattccccaacactggtctacccttgaaaccatgactatcacactgagtattcccgagtcgctgaagcccgaagatggtcgcttcggctccggtcccagcaaaatccgccccgaacagatcgccgcgctcgatgccggcgccaccaccctgcttggcacatcacatcgccaggcaccagtcaagcaactggtcgcttcgattcgtgaaggtctgcgcgagttcttccacctgcctgaagggtatgaggtggcgcttggcaacggtggcgccagcgcgttctgggagattgcctgcgcttcgctgatcacccgtcgcgccgcattcggcacgtatggctcgttcagtgccaagttcgccgcgtccgccgcgaacgcacccttccttgaagacccggtgctgttccccggcgagccgggcacttaccgtctgcctgagctcaccaagggcgtggacacatattgctgggctcacaacgagacctccactggcgtggccgccccgattcgccgcgtgcccggcagtcgtgaagccggtgccctgaccgtcatcgacggcaccagcgcagccggcgctttgcccgtggacatcagccagaccgacgtctactacttctcaccgcagaaggccttcggtgccgatggcggtctgtgggtcgccatcctctcccccgaagccatcgatcgtgcggcatgcgtcgaatcaagcgctcatctggaaggcgcacatcgctgggtgccgccgttcctctcgctgaccacggcactgaacaactcccgcaaggatcagaccctgaatacgcccgccgtggccaccctgatcatgatggaaaaccagattcgctggctcaacagcaacggcggcctcgcctgggccaccacgcgttgcgccaagtccgcatccatcctgtactcgtgggccgagcgctccgaatacgccgctccgttcgtcgtcgatgcggacgcccgctcgaacgccgtggtcaccattgatctggacgagcgcgtccaggcctcccagatactgtccatcctgcgagagaacggcatcgtggacgccgccggctaccgcaagctgggccgcaaccagctgcgcgttggcgtgttcccctcggtggaaccggctgatgtcatggccttcaccaagtgcgtcgactatgtggtcgagcacctgtgatggcggtctatgcctcgcatggccgaccatatatgccatgcacattgatcggtctcaactgataccgattgaataaatcgtagggagaggtgtttgacgcccctccctactcttactacagtgcatgagtatgaagttcgcgcctctcattgaccctgccgtccgcaaacccgcgcccaagcccgtacgggtggacctgcgtaaggtgtttgccatcggtaccggtctatggattgtggcgttgattgtcgtgctgattctgctggccgtgggctacagcgtaatgccgttggtgattatgtgcgtggccggtgtcattattggcttgctactgctgatttgggaatacttcgaccgctgggactaccgccgcctcggacagtaataaagttcactgcgccaacggcaacgtcaggctgaacgtactgccttgcccgggcgcgctccatacggtcacatcgccatgatgggttagcgccacatgcttgacgatggccaagccaaggcccacgccatccgccgtgcgattgctctgttccgcaccccggtagaaccgctcgaagatgcgcgcctggtccttcttcgcgatgcccgcgccctggtcgatcacgcgaatcaccgcacggtcgccatccttgtctttggatgcggacacactgaccacaccattttccttggaatagccgatggcgttttcgatgagcttggtcacggcgctgtcgatctgatccgcctcaccattgatgactagatcatcgtcgcccttgatgttcagctgcacgccagctgcggccgcctgcggctccagtcgcgccaccgtggcctcgagctgttccataacgttcagtcggttggcggaagacggcgtaatcggctcctgtgcgcgtatgagcagcagcaaatcggacaccatatggttgagcttgctgcagctggaacgcacctggcgagcatcggcagccacctgctgttcgtccagattgccggactccagcgaatcggcgagtttggccagagcttcagtggggcccaacaattgctcggatacattggtaataaacgagtcacgcacttgagcgaaacgaatcacgtcactgacatcggtaatcaacacgatgacgaactgctcgttgatacgccctacagtcaccttcagccagttggggcggtggacggactgcgtggcgacgtgatcgcccttgttctggtctgcgacgtaccgctccggagtatcggtggtcaagtcgaactggcgcttgccaccagacttgcgcgcctcgtgaatggcatccagcacctgctgctgggcgatggcgtcatctgacaccacacccaggcggtaggcggcgggattgcagcggaccacctcgtcgtgctcgtcgaccaccacggacgcacccggcagcatggacagcagcgtggcggtgtcgtcggacagatcgtcattgtcgtcatcatcggccagcggcgattccacggacactcgatgtgtcgcaaatcccacgatgagcgtgatgattcctaccacaaataaaacagccgcgacaataagagcaatcgcggcgacgagcggcatctgtgtcatgcccccattctttcacaccacacgccgggattgcggtttgccggcgcgccggtaacatgaatttcaggtgaacaacccaatgaacagtagaacaacttgaggttgccattacctacgttgaagtggggaacaagtactggaataatacactggtacaggttgcaataagcaagcatgaaaggctagagaaatgcgcgttattttcaacgaggagctgaagcaggttgctgacgacctcgaccgtatggcgcagaacgtgcgcaaggcgatcaaaggcgctggggaagccctgctgaatcaggacgttgaagccgcacagactgtgattgacggcgacatcgagattgatgccctggagtcctctgtgatcgaccagtgcgtcaagctgctcgccaagcagaacccggtggccaccgatctgcgtgtggtcgtttccaccatgcgtctggcttccacgttcgagcgtatgggcgatcttgcccgccacgtggccgaggccgctcgccgcacctacccggccgccgcgattcccgaatccgctcagccggtgttcgccgagatgatcgactttctggacaacaccgctgaccagctggtggccatgctctccgatcgcgatgccaagaccgccgaggccatcatcctggccgacgacaagctggacaacctgcaccaccagaccttcgatctggcgctgtccgatgacatcacccgtcagcagaccgtggatatcgtgctgctgggccgcttcttggagcgtctcggcgatcatgccgtgtccgccgcccgccgtgtggtgtacatcgtctccggcttcgaccccaccaaggagccgacccgcgacgagggcaccgacatcgactgattggggcttgtcctcacattgggcgaataactgaacacttgtcctcctatggtttgaggaggatgcccgaaagcggcgatccggctacggctggacgccgttttttgttgcttctgggcggtacaccggcgtatccatggggcggcaaaacacccatagggcggtaacttgcccatggggcggtttgaaagatatgtgaaaccgcggaattaagccattctggcataccgccccatgagagttttaccgccccatgagggttttaccgccccatggggtaatcaccgccccatggggatttggcaggcatagcaaaggggagccacacattatgtgcgactccccttacagcttgtaccgtgttagcggcttaggctcacttctggccttgagcggcgacagcggcggcaccggcagcagcagcctccgggtccaggtactcgccacgcggcttgatcggcttgaagttctcgtccagctcataaagcagcgggatggcggtcgggatgttgaccttggcgatctcttcctcagacaggttgtccagcatcttgacgatggcgcggagggagttgccgtgagcggcaatcagcacggttttgccggccttgagctccggctcgatggcggactcgaagtacggcttcacacgctcaacaacgttggccaggcactcggcttccggaaccggatcgccggcgtagcgcgggtcgttgttctgggcgtactggtcgttcgggtcgatctcgggcggcggggtggcgtaagaacggcgccacagcatgaacttctcgtcgccgtactcttcgcggatctcggtcttgttcttgccctgcagagcgccgtagtgacgctcgttgagacgccagtcacgctgaaccggaatccacagacgatctgcggcatccagagcgatgttggcggtgttgatggcgcgacgcagcagggaggtgaacacgatgtccggaaggacgttcttctccttgagcagctcgccgccgcgcttggcttcggcttcaccctgctcggtcagcggtacgtcgacccagccggtgaactggttggttttattccatgcgctctgtccatgacggagcagtactagtttataagtcatacggttcagtctacagccgcgtgcgcccaaacacgagtattcgtcttattatttcgctctcatagcgccacggcaaccgccagcaccaccgcaaacagcaaggtctggaagctggcggcgggcagagccgggcggaattgacgtttattcacgctggagaccatgcgcacaggtattccggtgcccgagagcaacagcaccgcaccccacggccaccataatgtaccgcacatcagcagggcgatgatccatgcgatgacgcagcacacaatcagcaacgtacgcgcgccggactcccccagccgtacggccagcgtgtgtttgccatgctcacgatcctcgtcgatgtcacggatattgttcaccatcatgatcaggcaggagaacaggccagccgccacagcacccaatagtccgccgacgtccaccgtgccgcacagcgcgtattcggtgcccaataccgcagccaagccgaagaacaggaacacgccgacttctcccagcccgacatatccatacggatgcttgccaccggtgtagaaccagccggccagcaaggaggccgcgcccacggccagcaaccaccatgcttgggcgagcacgaccgccacaacaccgcatatgcaggcgatggcggcgcaaatcatcgccgcgaacagtacatgcttggctggtaccagtccggatgcggtcagtcgctggggtttgcctgatttcgattcgtccgtgtcacgcccggcgtcagtgccgcggatgccgtcggaatagtcgttcgcatagttgacggcgatttgcaggaacagcgcgactagcaggcacaggatggtcaccggccagaatcggtccatcagcagggtctgctgttcacgggccgtggcgcaggaggccggttctggatatattgcgatgcaggtgcccgaccgctcgatatgcacgtacgccatcaccgccccaaccatcaccgacgcgatggaagtgaccaaggtcttgggacgcgcgccccgaacccacaagccgatagacataagcaatccctttcatatataactctggctcccctctctgaggggagccagagtatgcctaatcagccaacgagcggcttgaccagcgggaaggtgatggtctcgcgaatcgtggcaccggtcaaggcgataagcagtcgatcaatgcccatacccataccgccggccggaggcatgcccacgccgagagcctcgaggaagtcctcatcgatgtcacaggcctcttcgtcgccggcgagtgcatccttggcctgggccacgaaacgctcacgctgcacgatcgggtcgttgagctcggagtagccggtagccagctcgaagccgcgcacgtagagatcccacttctccaccacgccgggcttggtgcggtggcccttgaccagcggggaggtttcgaccgggaagtcacgcacgaaggtgggctcgtaaagcttgtcctcgtagaagtgctcccacaggtgttcgacgagcttgccgtggttctccacgtcgtcgcgctccacgccgagcttgtcggcgatggcgcccaaatgctcaacggaggtgccgggatgctcagggccgccgttcggcacgatttcctcgcccaatgcctcggacagcgaatcgtacatgctgatggtcttccattcgccgccgaagtcgtattcggtgccgtcgagcagggtgaccttgtgcgagccgtagacgtccatggcggtcttctgcacgagctccttgaccagctggccgatggaatcataggtgccataggcctggtaggcctcgaccatggtgaattcgggggcgtgcgtggcgtcgacgccctcattgcggaagtcgcggttgatttcgaacacgcgatcgatgccgccgaccaggcagcgcttgaggaacagttccggggcgatgcgaaggtacaggtcaaggtcgaaggcgttcatgtgcgtggtgaacgggcgggcggccgcgccaccgtgcagggtctgcagcatcggggtttcgacctcgaggaagtcgtggtcgtcaaaggtgcggcgcagggaggccacggccttggagcggttgcgcaccatgttgcggatgttctcgtccgcgatcatgccgatgtacggcttgcgggtgcgggtgtcttcgttcaggtccttgtgcagggccggaagcggctgcagggccttggaggcgatagcccactcagtggcgaatacggacagctcgccggtcttggaggcgatgacgcggcccttgaggtacaggtgatcgccaaggtcgacgagctgcttgaactgcttgagcgagtcggcgccaatctccttcttggagatcatgccctgaatcttggtaccgtcaccggcggacagctgcacgaagcacaggccgcccgcgttgcgcaggaatagcacgcggccagcaatgccgaccatgtcttcggtctcttcgccagcctcgagcttgccgtcatacttggcgcggaccgcctcgatggtgtcggtgacgtccaagtgcaccgggtagggggcgatgccggcctcaagcatcatcgcgcgcttggccacgcgcatctgcacctgctcggggtgagccagcgggccgaactccttgttggaggggtccacggcttcgtccagcgtggcaccggacttgatcttctcgcggatggtggcgtcctgctcgagcagcatttccgcacgttcgacggtgctcatctgcgggacggccggggtttcattctcagtgttttcggtattttcgacaacttcagccatgattcatcagtgtacgcaaggccggcgattatgagcccggcagaccgtacggccatctgaacacccgctcacatgacgcaaaaccggctctgcacaaggcttgagagacctgtacacacggcgaatccaccatcacgcaacactcgcgacatgccgatttgcattgtccaccaccacaatgtaatatctacgtctgttgccaaacgggctgtagcgcagcttggtagcgcgcttcgttcgggacgaagaggccgcgggttcaaatcccgccagcccgacaactggaccggattgttgagaaatcagcaatccggtttttcgtttcctaacccaacaatcagaccaagcgatcggacagcggtaaacaacccgccgcgcacagcgacaaaccgcgtcgcggcaaggcccgtatttgttggcggaccaccgtaatatatcgctcgaatcaatcgattgccgcactgtttttgtaagtaatactgaagtaattagaggaaccatgaagaagagtctgcttgcactggcttcgggcgcgttcattctcggtgccgccgagttcgtgatgatgggcattctgccgcaggccgcgtccgccaccggcgtggacatccccaccgcaggccattacatttccgcgtatgcgatcggcgtgtgcttcggcacactgattctggtattcggccgcaaggtgccgccgaagaacctcatcatattgtttatggcgattgccttggtaggcaatctggcttccgtgttttccgtcaatgccgccatgctggtcgtcgcgcgattcgtcgccggcctgccgcacggcgcgttcttcggcacggccacgctcattgccaagactctggcggagaaaggcaaggaagcgcaggccgtatccgtgatggtcaccggacagaccgtggccaatatgctcggcgtaccggcgggcaccttgatggctgagttcctatcctggcgcctcgcattcggtattctggctgcatgggcggcaatgaccatcgtgctagttctggcatggatccccttcgttgcgccgattaaggacgccggcatcgccggtcagttcaaattccttactcgtcgtggaccgtgggtgattctggccgccgtattcaccggcaacgcaggcgtgttctgctggtggagctacgtctccccttggctgcagaagaccggtggctggtcgtctaacctggtaccgctattgatgatgcttgccggcttcggcatggtgataggcggtcttatcggcggtcgcatcacagataaatggcgccacgccggcactgccgcgctgggtcagacgatttcctgcatcggcttgctgatggttttgctactgccgggaaaccagggcactactgctttgctgaccttctggatcgccttcggcctgttcttcatctccgctccgcaacagctgttgatgaccgaagccggccaaggcggcggcgagctcatcgccggcgcagccgtgcaggtggccttcaacttcggcaatgccatcggctcgattgtcggcggcgcgatgctcaccactttctcgatgaactatcgctataccggtctgggcggtatgccgctggctctgcttgccgtagggctgctggccttctactcgtggcgctgcgaaaccgataccgacgccattcaccgcatgcgcgaaatcaaggtggactgagaccaagctcacagcaaactccctgacgcgtttgtttacagtattaatagactgaaatcagacacgattcagggaggtctggcggtatggacgaggaagcactgctcaaacaattcgccgcacaattcgcgcatggtccagacgatgccgacgacaccgatgcggcggccgcagcgcaaggtgccgattctactgcgaaccaggccacggacgatgccgatcaatcgcccgcaacctttgatacccaacaattcctgaacggactggacgcgattttcgatcgccacgcggcagccaccgaagccggtccgtacttggaacaggcgatggtggacgcggaaaacgccggcgacgaggccggactgctcaccgtactcaacgaaacgatgggcttctatcgctcgcagggccggcacaaggagaatcagtggattgtgcagcgggcgctggaactggccgctcgtatgggcttgaccaccggcacatccgaggcgtgggccaccacgctaatcaattgcgctaccgcgatgcgcgcggcccaacaatacgatcaggccgaggatttgtatcatcaggcgcagagtgtctgccggcattcgctggcacccaccgaccgtaggctcgcagcactgcacaacaatctatcgatgctctacagcgagacgaatcggcccgacaaggcggaactggagttgcgtgaagcgctgcgcattatcgaagcctcgagcgtgaacccggacgcggatatcgacgtggccagctcgcacacgaatctggcgttgaccctgctgaccgaacacaagttggagggcgcgcattggcatgcagccaaggcactggaaatctatcgcaccggccatctggaacattccgcgcattatgcctccgcactggcgggcttcgcgcaggtgtgctttgccgagagacggcatgcggatgcagttactggataccggcatgcgctggccgtgatcgagaaatgttacggcaaggacaccgattactggcgtatcaccgccgacaatctgcggcaggccgaggaagaggcggcgaaggccggggtgacggttgacaatgcgggtgttgccggcgatgcaggcgcgctgccccagtccggatcacggctgccggacagcccggcacagggcaagaccggtgcgggcgtcgaggcacaggtcggctccgcgtcatcggccgtggacgcggatacgccgggcgcattggcgcaggcgttacccgagaccggtgcgaacgcggcgttttccccatccaccgtttcggtgtcgaccggttctgcgggcgcggccgaggccgtttccgcatgcccggtgtccggactgaagctggcccgcgcgttctggacacaggtgggcaagccgatgattacggcacagtatccgcaatacgtgggccgcattgccgccggactggtggggcatggttcagaatgctatggctttgacgacgcctattctcaagaccatgattttggcccacgcttctgtctatggcttaccgatgatgattatgaggcaatcggcgagcagctcgaggccgattatgaagcactgccacgcgggttcacgatggacgcgcaaggccgtgtgacatttatcgatacaccgttctcccccaccacgccccgcgcacaaggtgccaaccgccgtgacggcgtgttccgcatcggtgacttctttgagtcgatcaccgggtatcgcactgcgcccgcgcagaccgcgccgcacgagtggctgatgctggctgaatcgactctggccgcagccaccaatggcgaagtattcgcagaccccactgggcagttctccaaaacacgccaagggttcaaggatatgcccgacgacgtgcggcttgccttgatttccaagcgactcggcatgatcgcccaggccggtcaatataatctgccgcgttcgttgaagcgcggcgacggcgcggcctcatggctgtccatccacgagttcgtgcaggccaccgcctcgttggtgttcctggttaacgtgccgatggtggtgggctatatgccgtattacaagtggcagttcgcagcattgcgcaagctgtctggctcgatgttcgcgctgttgccgaacgtgggcgaacagttggaaaccgtgatgcgattgagttcggcagcctgctatggaggggccggattcggcgaaggcggcaagggcgcggctacagcaatcgagaaaatcaacgatatcgtggagcagattgcggtggatatcgtcagggaactcaaacgcgaacacctgaccacgtccggcgagaccttcctcgaatggcagcgcccgtatgtcgaggaccacatcgtctccgatgatccggtgcttaaaagtttgtagattcaagctccctctgatgatccggcgctttagagctccctcatcagagggagctgtcagcctgcggctgtactgagggagggacctcagtacagccgccgcttctctccctctgtcacggcttcgccgtgccatctccctcatcagagggagatattagtgaaaggaacgtcgatgaccaacgaactgactgatgatgaactgcgcgaggctattgtgcgccatgaatgggatcagttccagcgcaccaacaatgagggtggacgcgcggcatgccaaggcaactggccggtgttccaccagatgcggctggcccagttcctcacatgggagcggccattactcaccagctatgccgctgatcttgacgcggccgaccacgtgggccgcaacctcgtgaccgaaaaatacggctgcatgatggcctccaccgcgccggaagatttcacgaagaacatagagccgtatattccgcgtccctctgaagagcgcgtggcccgtcaggaacaggtcatcgcccagcaggtcgcctgggccaaggatttccgcgagcgctaccccaagctcggcgaggcgatgcgcgtactcaccaccgccgaagacacaccatctgccacctcattcgaaacctatctgcgcggcgagcttggtacgtattccgaacggaccttccagctctacgaggtgatgattagcgagcgcgccgcagccagcccgcaacgcaatatcactgaggaaaccttgttgcacacggtccagctcggcggtttcgacactttggatgaggctgaagccgctcagcgctgacgacagtgcctccacgccgtcacgccccatccaccttcccgaatttgtgacgctcacggcgactcagtggcacatattcgggaaggagccggtaacgaccgtgaatatcacagactgaacaacccccagaaagacaatatcgtcaatgtgacaagtgcagccagtgtcaccatcacgcaaatgacacgacgcacgccgataatactggcgcgataccgccacatacgttccagttcccacgcgaacagcacgaccaacagcacggtcagcacctgcaatgccctccacccaagggaaaacaactgcggttgaggcataaccaatacagccgatacgcctacggcgctcatatagccatacaacagcacggtaatcaccatcaccgctgtgccgataccggcagataagccggcaatgccgtgcaacgtacgctgttgggcggctcccagcccactcggcgtcgcatgcatggcccgcacagtcgccacactacgtcgcccggccagcaacgtctgtagccaagaaaacacagtcaagccaatacctaatatcgccgccatcacgatcagcacgggccctgccaccatcagaccggccagcacgccgagcgagccgacgataccggatctggtacgttgcggcgcggcgaagcgctggtgaggtgtcgcaccggcgacttggggcgttgcccatccatcggctttggttccggcggtcacaccgttcacccaattttccagcgcttgcgtatagccttcggccaatggcaggttcggggtgaataagccctcaccagcccgcatctgatggttgccggcgaaatagcgtacggtgacgttctcgttgccggacttgttggccgtggcgatgatccgctgcgccccctgttcgatgggcatggccgtatcgtaggtgccgtagttcaccagcaccggcatggtgagggatttcagataccggtcggcatcaaagtcggcataggccagatcgaatggcgcgtagtccagcgacatcaatttggccatgtctttgaccacgggcttgggcgcgccggcctcatgcgtataggcgctgacagccatggccatttgctcacgtccattgaacaccggtgcggatgtaagtatggcaaaggcaatgtcttgccgtttcgaggttagaatcgtggcgatccaggtgccttcggattcggcgtagatgccggttttggcggggtccacgccgcttatgccacgcagcacgtcgagcgaacgcccgtattcgcgagcaaaacgcgggtagtcgcgatgcagcacggtgtagttgtcgttgcgcttggccggcaccaaggtcacgatgccggcagaggccatggcgttggcgatatcgccgaaatcctcggcaccgctggtaccggacccgtgaatgaacagacaagccgggcgtggcccgggagcgtcgaccggttcacgtagtacggcgggtagcgtgacgccgtcgccggtcttgatggatagtcgggtttcacgcgtacgatatcgcccctcgtggggaatgttcgcatgggcaggggtgatggtggtgtcggcagaagcgatagcgatgtgcttggtgtagggccgtgtgttccattgcggcatcatcgcccagccaagtgtggcgaataccagcgtcatcgccatcgcggtggcgatgacgctcgctacccgccgcgccgaaatccgtttcatagttactatgcctccccccatcagcatagaacggtcggctcttatcggtcggctcccgtcataatgttgcttctactgggaccgtaatgcaatggttgtaacgctattttctcttcttgacggcaccgactatggcccatacaacggccactattaccagaataagtcccactacggcgcagataatagccgtcagcaattgcggattcggcgagaacagcgaaatcatccgatccggagatatgcacccgaaaaccagcgcgatcacgccgataatcacgcctaatagtccgaataccacagtaggcgcgctgatgctctgtttctggatgttcttggcactcttgacatccttagcattctggacgttcttggcgctccccccaggctggcatggtttgccggcggtctgagactgctcataggaaggttgcgctgaagatgctgcgtacatcggtacatcatcggcagatggaatcggcccaccatccccctccacggcatcggcaactgcttccagggcaatccgatctgtggatggttcgatgggcgatggagaggcagctgttgcctgcgtatccacatccgagaccggcgcatccgcatgatcgtcggggacgggtagcacagccgttttgtcatcatccgctgcggatggcagcaccgtggtatcggttcggtcatcgacggtcaccatggttgtggtctcggtggtctcgtcggtttcggaaggtatggccgtggtcggtgtcgcatcctcgatggaggcgaattccttggtttcatcagtcatgattccatctcctggttgtaacggcttgatcattccgattgcccggttgtgttcttgcttgtgctgttgccgtcgtatatatcggcaagcggctggaacgtggagcctttccaatcggaggcgtacatcacgttgacacgtgcttccactgcatagggaatattgatttttaattctgggccgttgtccggcatggcggatcccttatccaaccattcgtaatcaggcccattcatgggattggtggcgctttcagctccgaagaaaacaaagcttagacccatgtagttgttgtataccatctcgtatttgccgccgacgtcactcgaagtgaagtaggagtcggcggtgccgaaggcgtaagtgcaggaatccggcagaacgatatgcacttgcgcctgtgttgcggctatggtgatggtaccgaccggacaattactgatggaggttttgccatccagcatcttcaccgtgtgcggtccatgtgtcttgtcccaatcggaccaatcaatgattgcctgatcggtgttgtagttttcaccgttgaacgccacaccttgctgcaatgtttcgaacgtggcatcgctggcatcggcaacgaagatgccatccttttgcacatcgttcatgccgtcgctgtttctcgcattgacagattggctcagtgaaacaacagtattgatgccgctggcaccaagatcacggtagtacacgccatacgtgcctgaaacgatggtcatgcagagcgcgcatccaccggcaaccagtccgagaggaatcagaccaccggtacgccgccctctgaatccgagaatgatgaccaccagccccatcactatgcatactgcggcaatccagatggtgctcagacgcataatgccgataatgcccatgtcgtttacccaaatcagtcccatcagaccggcaaaggagaggaaggtaaggcccagtatgctcaagaccacgattgggcccgccggcttgcggcgcttggactcggtgggggcatagaccgtcgcattcatacggtcgggggcaaacggcccgttgggtactgtgccgggcatcgcgctgggcactgtgcccggcatcacgccgggcaccgactgatagaaaggccgtgaaacaggctgtgaaacactaggcgcggttcgtgaaacagattgtgaaacaggttgcggagctgaatacaaaggagatagagggaccggttgcgcggctggatatgaggcaggctgtggagctggatacgacacaggctgtgaaaccggtcgcggcgcagatgccccgaatccgtacccttcctgctggcgaatgccgcttttggccaacaaccatagcgctaaggcggcgagcgcaatacaaacccaccccgcacctggaatcacgattgccacggctaggaacaggaagcatccaaggcaattccagtcccattggccggcaatgaggtcctcggccaagatgtgcccatcgcgtacatccggcatcagaaaccagccgagtgcgtacagagctgcgccaaaaccgaagaacaatgtacatacaatcaccaacgcacgtactaatgtggggctccagccaagccgtaaagcgatgccgctgcatacgccaccgatccaccggtcgtcgccgcgaaccagtccactggatcgcacccaagtgaagaagcgtcgcgatgtcttgtttttttgcggaccaggctgcggctgtggctgatacggattcgcgtttggattgctcatgattccattacaccgcccgaccactgccacaacgctcggggaacaccctgattgttccctgaacaccgggtaaaaccccggccgcaacgccctgagcgcggcacaataggagtatgacgtcatctcccgaaccattgctgcccgcgcgcatgccgctgatgcgcccccggcagggccgctggctcaccggcgtgtgcaagggcatcgccctgcacttgggcatcggcgtgacatgggttcggattgcgttcatcgctctgaccttcctctacggcgcaggcatcatcgcttatgtattcctgtgggtgttcatgcccgccggagacccggtggcggctgcggctcgcacagtgcccgttgatcaggcgccgcttgcgcgaggcaatcagccacttgccgctcatgacgacgaatcggcagccgcaccggaatcattgtccgaggccatccaacgtgctccgaaaccggccgtcgtggcattggccggtttcgcgttgatggccaccggactgctgctcaccagcaccggtgcggatgcccagattgtgcttccgctgctggtagggttgggcggcatcgcactggcatggatgaatcttagtccgcgaggcacgcagctgttgtctatgttgggcggcatcgcactgattttcatgggatgggcattgtatgtgcataatgtcagcattcccgggtggggcacctctcctcgacgcattgttgccagcggattcatgatgatcgtcggtatcgtggtggcggtgatgccgtgggcgaacgcgatgctgcaacgactcacccacgagcaggcattgaaggagcgcgaagaggagcgcgcggacatgaccgcccatctgcatgatggcgtgctgcaaacgttggcgctgattcagctgcactccgaggaaccgaccaccgtattcgccctggcgcgtagccaagagcgcgagctgcgcgaatggctgtatcaggaacgttccacatcggatcgttcggtgggagccggattgaagcagatcgccgccgaagtggaggacgagcacggcaagccgattgaggtggtcaccgtgggcgacgcgcggccgagcgcccagaccgatgcgctgctggacgccacccgtcaggcgttggtcaatgcggtcacgcatggcggcgagccggtgtctttgtattgcgaggccagcgatacgatggttgaagtgttcgtgcgcgaccatggcgaaggcttcgatatggacgccattccgcccgaccgcctgggcatccgcgaatcgattatcggccgcatcaaacggcgcggcggtacagtggagatagtgtccagggccggctggggcaccgaggtcagaatgcatatgccgatcgcgctgaaagcggcgcagggagaacatcgatgagcgagaacgagacagccaagattcgtgtggccgtggtcgatgaccatgagatgttccgtgcgggcgtaatcgccacattgcgcgattccttcgatatcgtcggccaagcggcgggacgtgcccggttcggtggcgatgatcgcacagaccaagccgcaggtggtgttgctggatgtgcatgtgcccggcggtgaaggtggcggcggtgccgagatcctcgccaaatcgcggccctactcccccaccaccgtgtttctggcattgtcggtttcggatgcgccgcaggatgtgggggcggtgattcgcgccggcgcccagggctatgtgaccaagacgattaccggcgctgatttgatttcatccatcaagcaggtgcatgagggctatgccgtgttctcgccaaaactggccggttttgtgctttcggcctttcagggtgtgccggcggcggggtctgatggcggcgctgatggtgcggcacgggctcatgatgaggagctggaccggctgtccgcccgcgagcaggaggtcatgcggctgatcgcgcgtggttacacgtataaagaggtggcggccgaactgttcatttcgatcaagacggtcgaaacgcacgtgagctcggtgctgcgaaagcttcagctttcgaatcgcaccgagctcacccgctgggccgccgataggcgcattgtgtgataaacgacagatgagctcccccatcagagggagctcatctgctcatatcactcggcgtcgcggaaaccgttggggttcttggtctgccagttgagggaggaggcggccatgtcgtcgatggtcagctcggccttccagccaagctccttctccgccttggaagcgtcggcgtagcaggcggcgatgtcaccggggcgacgcggcttgatcgtgtacggaatcggatgaccggcggccttctcgtaagccttgatgacctcaagcacggagtagccgtggccggtacccaggttgtagacgaacacgccttccttgtcgatgtggtcaatgacggccacgtgacccttggccaggtcgaccacgtggatgtagtcacgcacaccagtgccgtcgggcgtgtcgtagtcgtcgccgtagacctggacttccttgagctcgccgaccgcgaccttggccacgtacggggtgaggttcgccggaatacccttcggatcttcgcccagcaggccggactcgtgtgcgccgaccgggttgaagtagcgcagcagcacgatggtccaggacggatcggccacatgtacgtcgcgcagaatctgctcctggaacagcttggaggtgccgtacgggttggtggtgccgccggtcggcgtctcctcggtaatcggcagttccttcggcgtgccgtacacggtggcggaggaggagaagatgatcttcttgacgttgtgcttcttcatcaccttgagcagcacaagcgtggagtacaggttgttgtcgtagtattcgatcggcttggccacggactcgcccacggccttgagaccggcgaagtgaatgacccaatcgatgttgttctcggtgaagacgcgttccataagcgcctcatcgcgcacgtcaccgtcgtaacgcttgaccggcttgccggtgatctgctcgacgcgctcaagcgccacgggagacgagttgccgtagttatctacggaaataacgtcgtagcccttgtcgagcagttcgatgtcggtgtgggtggcgatgaatccagcaccgcccgtaaccagaacagtagtcatatctcctcctttggaaggacttgccttcggttttccttcagtattgagcttacttcacttgacctgtttcacctagcggcaaaaccaagactttcgaggaatgtttgcgtggtggctttctgcttgaagacggccgtgttgccgaggatgcggtagcagacgctgccgagctcgtcacgtacggcttggtggatggcctcgcggtcgcggtttccggccaatgtttcagcgagttcgccccattcgagactgaattcgctgacttcatcgggcaaatcgcggccttcggcgagcgcctcctcgacgatgccgagctggtcgacgagccgtccgggcaggatgaacaggccttgggcttcgatcagtccaatcggctcctgcttgaccggccagtattcggggtgtgcatggaaaataccttccgggtactcgtcgctgatcgcattgttgcggaagatgagactcatctcatagccacgttcggtgatgatcgcgctgggcgagagggcggattggcggttgccgtccgcgtcatggctggcgatgccgttcgccgcgtcgtcataaccgacccatgcctcgcggatgatgtcggatacgtcgatgatgctctggcggtttttcgacaccacacgcacggcggtaccgggccagtcgaggatttcgaccacggcgtccggatagtcggcgagcgtgaaggcggcccaagtggcggccttgtgcatcggcagcagttcgccgccgccctggtagtggtcgtgggcgagcaccgagccgccgatgcgaggcagcgcggcgttgcatccgaggaagtatccggggaagcggtccacgaagtcgagcagatggccgaaggtgtcgcggtccacatgcatcggcgtgtggtcggtgttcacgcagatgccgtgctggtcgaagtagccgtagggcgagaactgccagaaccatgactcaccgccgagcgtgaccggcagggtgcgcagcgtgcgcttgtcacgtccggcgaagccctcgttctcatggcagatcgtgcacttcgggtagccgccggacacggcgttgccggccgccgccttcttcatgttcttgaattcgggtttggcgaggttgatggtcaccgtcagcccgtgcgagtcgaagcgcgggttccggtcgagctgggcacgcttgacataattgttggccacacagtagtcgtagaaccattgcatggcggccatgccgccgtccctgtgctcgatgagcaggaaccggtcgtcgagatcggcggggttggcggagaggatgcccatgatggtgtcggcgtaggccgggccttcctccggatcgaagaggccggcggttgtggcggcggcgcggaaggcggcgagcagggggtcgggggtcttttcgccatagggggcctggcttcggctgccgacaatgtcttggactgcgtctgacactgacgccgccgacgttgtggttttgggtccggggtaggaatccaggtggaagagggcgaagatttggttgcgggtccagtctgcgttgcgtggatcgaggtcgagatgatccaaggcgtaatcgactagggcgtcgatgctggcgtatacctcggtcagctgatcgctcattgctcggcccccatcatgctggttcgggtatggttcgactgacggctcacttggcagcctccatgatgtcggctacgatggcgtgggtttcactggccttctgctccatctcctgcacgagtttgatctgggtgcgggtgcgcaccagattgtgctcggggtacttggtggcaaagtagatatcgccttccaagtagtcggcgagaaagcgcatgccgcattccatggtgagcaggttgccgctgaacggcagcagttcggcctcgcgcgcggtgatgctgccacgtagttcgcccacgaatccttccgtgtaggcacggaacagctcggtgctgaaatgcaccttgctgaggtccttttcgtcttccagagcagtggacgcaccaaagcgtatggaatcgccgaagtcgaacagcatggagccgggcatgatggtgtcgagatcgatgaccgcacgcgccttgccggtggtggcgtccatgaggatgttgttgagcttggtgtcgttgtgggtcacgcgcaacggaatcgaaccgtccctgagcccatccatcacgacggcatactggtcggcgtggctcagatagaagtcgatttccggctggcatgcggcggcgcggccgagcttgtccgcggcgagggcggccttgaagtcctcgaaacgatgcggggtgtcgtggaagcgggcgatggtttcggtcagctggctggcgtcgaattcggacaggaagttctggaagtcgccgaatgcgctgccggcctcgcggaacacgtccgggttcggcacgaggttgtacgacacggtgtgttcgatgaacttgtagacgcgccatgcgccgccatcgatctcggcccaggtggcgccggaggtggtgggcacaatgtccagcgtctctttgccctgagccttgagagtggaggtgaccagttcgacattgcgcatcagattcaccgtatcggggaagatgctggtgttcatctgttggaggatgtagcgggggccgtccgtggtcaccagataggtggtgttgatatggccgtctccgtaaggttcgatgccggtcacggcaccttccagcgcaaaatgcgaggcgatgccgaataaaacttcattgctttcggtcatgatgggtccgttctccaaaacgcgggaatcaggcttcacgccatgcgatgccgctgtcgggcaggtcgaagtcctcggtggtgccatcggccagagtcaccgtggtccgctgcggctgatcggtgttgttgattacgcagtacaacccttgctcggggaagtgcgccacctcgcactccgggttggacgagctccaagccgcatacttgtcttcgttgtgggaggcgtagaacagcacgcgttccagcagtcgggcgttggccgccgaatagggcagaccggagatgtacacaccgcggccttcgccataatcattggtcgcgagctgcacctgccctccgtccgcgcgcagcagggtcacgttttcattgaccggatacgtgttgagcacgggttcgccgaagtcgatgccgcccaacggcttgatggactggccaccgccgcaaccgctcagcgggatgcggtagccggcctgttcccaagcctcgcgggccgccgggtcgaccggcacatcggcggtgatgaagtggtccggcaccaccggtgggaagtacttgtccacggagagggtctgatagcgctcctcgtccacgccaatcacgtcggccagctggaagaaccggcccgcttggaagcgcggtgccgagctcggctcgcccacgcccacgaacgcgccgccaccacgcacccaggcgcgcacggtttccacgagcttcgggttggtccacacgtcgccgccggtgaatgcggtgtcgaccgggccgccgttgatgattacgtcgatatcactatcgatgccatgcgcgagtacgtcgtcgaagctgatgaaccgcacgttcacgcgcatgccggacagggattccagaatgccgtagtaggagtaggtctgcttgttgggcagggcgtgtgccacggtgaacgccatccaggaacgcatcttgccccaggaattcagaatcgccacgttgagctcgccttcggcggccaccccaccggtgcggtcgtggatgtcgcggaattcgtcggcgatatgggtcaccgtgtccacgaacttcgggaacttggcggccaaggagaggtagccaccgtagcccatacggccgatcggcgaacgcaggatcgcgcggcgggccttacgccagttgtcgaggccttcgatgctcgggtcgttgccctcgtagaacgtgtcggggaagaagtacggcaggaagcgtccttccgtgtatttgacgcccggaatgtccgcgatcatgcgggtggtggtgccgtctccgatggagccgacgaccgcatccaaacccagcttttcgaacccgtccttatacggttcggtaccgatccactggtcgccaaggaacatcatggcttccttgcctgccgcgtgcgacatgtcggcaagccgcttgacgttctcgcgcacgaatccggagaggaagtcaatccagtcgcgttgcgacttgcggggcacgcgccacgcggagttgtaggcaccgccatccacgaaatcctccggacgcagacggtaaccgtactccttctcgaaatcgtccaatgcgcgcgggctcacggtgcaggcgcaaccgaaccagtcgaccaccttttcgcgacgcttggcatcgaacaggagcgtgaactggtagaagaacgtggtgaaacgcaccacatccacctgcgggctgtccttcagccactgctcgaacgtatcgaacacgaacttgcgggtggccggatggtagatgtcgaacggaatctcgtgttccttgtctccccaatcattggtcaggtggttgtacatctcgaccgggtcccagatgatgtaggccaggaaactcaccgtgtattcgtgcatcggcacggcagcggtcacgtgcacggtgtcctcgcccgggtcgagcgtccagccggacgggtccacgacctcgcccgtggtgcggtccacgacttcccagtacttatgagggtcggcgtcacggttaggcttgagctgttcctcgaagaaaccgtccatcagcggcacatccaccgcgttggactcggccaggatacgggcggtcagcaggtagacctgcggggtctcgtccatgtgcagggtgatccactcgttgtgggcgcgggtcgggaagtaggcgctgtagattttcttgccaagagcgagcactgcctcgtccagatgcgtgccgtcggagttgcggatggcgtccgcaccccacaattcggcgagttccttggtcttttcggcaaaattctcttcactgggcagcgtgaagcggccggtgctggtcatgagtgctcctttgtggggttggtcatcaaaaaactacaaagcgacgaattcgtcgcatacaaaatgaccggcgtcatcgcgggccctgggaccctgactgcgtagatccttgacgcttacggtgacgccggacgattggaatcgtgtcactgaatatgggagggacgttgcccggcaccggaaggagtgacacgacatgccgggcagcggattggttagcccttgacggcaccggcggcgaggccggactgccagtagcgctggaggccgaggaacagcacgatcacgggcagcacgccgagcaacgcacccatcatcagggcgccgcgatcggtgaacgtggccagcgagaccatgccgtacagaccgagggtcacgggcttcaaggtgtcggaagacaccatcatcaacggcagcaggaagttgttccacgtggccacgaacaggaacaggaaaatcgtcaccatggccggggccaggagcctcagcacgatggtgaagaagatcctcgcctcgctcgcgccgtcgatgcgggcggcttcaagcagttcgtccggcaccgaactctgtgcgtacgtgcggcccaagaagaagccgaacggcgaaacgcagcacgggatgatgatcgagagcatagtgttggtcaggtgcaacgtgtggaagatcgagtacatcgggatggtcagcagggcggacggcatgagcatgcaggccataatgatgccgatggccgcgttcttgccgcggaagttgaattttgcggtggcgtagccagccatcacagacacgatggtgccgatcaatgccgagacgcccgagtagatcagggagttcagcacccagcgccagaagttgccacgagtccagccaagcagcttggaatagttagtggcgatggcattgggcagctggtcaagcggcacagcaaaccacatgccgttgctaccggtcatctgggccggcgtcttggtggacgcgatgatggcccagtaaatcgggaacaggaagtagatcaacaccagtaccagcagcaccacggtgagggtcttcacggccgcggacggtcgcatggagcgaggcaaatcgtgttgcgcagcctgacgctgcttttcgagcttgcgctcggcctttttgcgggcgcgttcttcaacggttgcggagctcattactcgttcaccttcctttcggccaaggtgtacagcacggcaagcacacctgcgatcagagccatgacaatggcgatggccgaggccggaccgtcaccagacggggtaatggtgccctgagaagtgttcatggccatcatcatcggtgtatacgacttggaaatacccggatcagccgtagacatgatctgcggttcgttgaacagctgaatggtgccgacgatggaaagcagcatggccagcagggccgcgccacgcacgttcggcagcttgatcttcgtggcaatctgccaaccattggcgccgtcgatacgggcggcctcatagaggtcatgcgggatggcctgcagtgcggcaaggaaaatcagcatgttgtagccggtgaaggtccatgtggtgatgttggccatcgagccgagcacgatgttcttgttgaagaagtccacattgacgccgatggcggcaagtcccttgacgatcggcgagatttggccgttgtacaggtagacccagataatcgaggccacgacgccggggatggcgtagggcaggaagtagcccagacggaaaccggtgacatgcttgaccacgaacgagtcgatgacgatggccaacgccagtgcggcgatgatcatgatcggcacctgaatcagggtgtagagcagcaccctgccgacgccggaccagaagttgccggaagtaatagcatactggaagttctggaatcctacgaatttattgaccagctcgccaccgccgtatgcgccaccgccctcggtgacctgacggaagaagctggaatagatggcccagatgatgggcaagatgaacacgaaagtgaacaggacggcgaacggtgccatgaacgcccagccggtgcggttctcgcgcttctgagcgccggaccgcttcggcttggcggcggcacgcctaggtgctttgcccttcgcctgagtagtggatgcagtcataatacaaaacctgtcttcgcaaagaacagtaaaacaaatgacaagggccacagcgcccctgcagcaatacccccaaacaatacggaaggccggagtatgtgccccggcctttcgctatggtgatgcgaggcatcggaggtcttggacggccggccatttcaagccggcccgttgacaagacctagtgaggtcactccttgacggacagaccgaggttcttcagcgtatccaccgaggtcttctgagcggtgtcgaacacatccgaaaccttggcagaaccatcggcagccttggcggcggtctgtttcattgcagcgccgactgcggagaagccaggcatgtaggtgaagtcacccatgttgtcgttcgcggtcttgaactcagccatgacatcctgtccgctgaagtagtcggaccacttctgcggggtcttggcatccgcggtggtggcggccacgacaaggccctgggagacaaggtcatcaacctgggtgttgaaccagtcaaggaactccatggcttcggccgggtgcttggaacccttgagcacggccacaccggaaccaccatcggcgccggtcttggtgccattgccgaaccagtcaccgagctgggtgaccttccactcaccagcaccagtgccaccggcggaatcgatgaacagtggggcttcccaagcggcggccacggtgccgatcagctgaccggactggatggagttatcaaacgatgcatcccaacgcgggttggtgagggcggccttgttgtcgatcagctgctggtagacatcggccacggccttggagcccttagtctgggtgttgacaacccaggagttgccgtcgaccttgtaccacggaccggaagcgccggcctggccggacatcatcatcatggcctcatcaggttggaaggtcatgatgtacttgccttgggcagcggtcttcttggcggtctcaatgagctcgtcagcggtcttcggcacggtgatgccgagcttctcaaattcagcggcgttgtagaagtaagtcagcgggccggtgtcctgcggcagaccgtaggtcttgccgtccacctgcatcagtgcgaacgggccggaagcgaaatcgtccttgtacttggcggcctcatcggtgacatcctgcagaaggcccttggtgaagacctcaggaacctcggagtaaccgacctgagccagatccggcgcattgccagccttgacgtcggtctcgagcttcttgatcatgtcggcggcattgccatcgaacttggtggccttgacctgaatgttcgggtgctccttgttccacttggccacaatgtcgttgaccaaggtcatgccttcggaatcgggcagacgatgcatataggtgatgttgaccacaccgccatcgctgccggacttcgtgtcgccggcagtgtcgctgccgccgcaaccggccaaaccaatacccattgctgctaccgcggcaagagcagccacgatgcgcttgttgtgcgataccatatctctactccttcctagtgaaatcatcacctcagcgtgatgactgattgctaatttaggcctttgctcttttattgtcaacttagctaacaattaccgcgcgtcccgttgaggtgagtggcattaaaccgattcgatgctcgattgtgcgggtttgttcatttcattaactccccttacaaagcaacgtacttttggtccaccggtagacctaatgagatattggatagcggcaacaatccaagacgttagcttgcaatcgtccaccacaaattgcaagcacttgccaacattatcggttttcaggttgccggcgcgatacccgactagggggggcaccgcgccttaatgagacgctacacgagcagtctcagcaactggtagagctgccacaggctacgcacgttgaagtgcgtgccgtcaaccgtggcgttcgcctcgccatcgcccacatggacgatcacggtgcgcccgttcacggtcagactaccgtgcatcgtgatatgattcatcttgcaaccttgttgattaaaggcgcaagccggtaatcaacgcaaaggcccgatgccgcaaacgtcgggccttttcttatcggctcacgccgattggcccgtcatatcaacggggacaccgcatgttacggcattacaaaccaatatatcagcaccccggtggcgatcaagaagacaggttccagaaaaagaaaaagggcctgggcatgttgcccaggcctcggttcgcggacagggcgagattcgaactcgcggagggttgcccctcaacggttttcaagaccgtctctttaggccgctcagacacctgtcctgatgcgcgttcacacgcgcaagtattcattatacagaagggagggatgttgatattcggcagtgcggtcggtcttggattcacctgctggctatcagcgatctctccctcagtcagctacgctgacagctcccccattaaagggagctaaagcacgatgagactcaggcctcccacttagtgggctcgatgacttccttgccgcccatgtaggcgcgcatggcctgtggaatctcgatggagccgtccttgagctggtggttctccatgatggcgaccagccaacgggtggtggccagcgtgccgttgagcgtggagaccggacgggtgccgccatcttccatacgctcgcggatgttcagacggcgagcctggtactcggtgcagttcgaggtggaggtgagctcgcggtagcggccctgggtcgggacccaggcctcgcagtcgaacttgcgggcggcggaggagccgaggtcgccggctgcggtgtcgatgatgcggtagggcacttcgaccttggcgagcatctcctgctccatggccagcaggtgctcgtgctccttgtaggagtcctcctgcttggcgtagacgaacatctccaccttgtcgaactggtggacgcggatgatgccggaagtgtccttgcctgcggcgccggcctcgcggcggtagcaggaggaccaaccgcagtagcgcagcgggccgttgccgaggtcgaggatctcgttctcgtgcatgccggcgagcgccacttcggaagtgccgaccaggtactggtcgtcgggctcgcgcagacggtagatctcgtcggcgtgggagttcaggaagccggtgccgcgcatgacctcggggcgcaccagcgtcggggtgatggccagcgtgaagccgtgctcctcggcctggtccacggccatggtgagcatggcgatctgcatacgggccacctggccacgcaggaagtagaagcgggagccgccgaccttgacgccgcggcgcatgtcgatgccggccacgccggtgccgagggtcaggtggtccttgggctcgaagccttcggccgcgaagtcgcgaatctggccgaccttcttgacgaccacgtagtcgtcctcgccgccttcgggagcttcgggctccacgatgttggagagcttccacatggcggtggtgtattcctcggcggcggaatcggccttggacttgtattcggagaccttctgggacagttccttggtctcggcgatgagcttggccttctcgtccgccggggcggaggcgaccttcttgccgatctccttctgctgggcgcgagcctcttcgaaggccttcagcgcctcacgacgtgcggtgtcggaggagagcacttcgtcgacgagttccacggactcgccgcgcttgcgctgggattccttgacgatatcggtgtgttcacggatgaattgaatatcaagcatgggcaccagactagccgcgtaagcagacaccgacaatggccgaatgcgcgggagtcacgcggaaatcacagggaagcccgggaaagtccgcggacgggtccacccggccaatttcgtcagatgagacgcgattgaaccataatcgcgctccacggggctgttgcgtgcaggaaatgttcacgtacggcgcaccatggccgcaaacgacctccccaccgataacaataggagccatgcctcagcctgccctcaccgtgtttctgatcatcgccgcaatcgccattgtggtggtgctcatcgccgtcatcgtcatcgccctgcgcgcgcagcgccgccgcaagctggctcagacgctggagaagcgccgggacgacgaggtgcagtacgccttcatcgtgaatccgtccaaaccgcaggccgaagcccgccggctgcatatccagaggttctgcgaggccaaggggctcaatcgcatccgcttctacgacacccagcttgacaaggacggcagggtctgcgcgcttgaggcgctggaggacggcgccgacgtggtgatcgcggtcggcggcgacggcacggtgcgcacggtggcgagcgccgtctccggcaccggccatgcgctgggcatcatccccatcggcaccggcaacctgtttgcccgcaatatgggcgttcccgtggacgatatcgacgccgcgctgaccgtggccacctcccacggctcccgcctggtggacatgggccgcctcaccctgctcgaccacccggaggacgaccacggccacgccttcctcatcatcgccggcatcggcttcgatgcggccatgatcgacgacaccaaccccgagctcaaggcgaacatcagctggctcgcctacttcgtgggcggcgtgaagaacctgttcgcgccgaagttccgcggcacgctgacagtcaccagcgccgacggctcgacccacaccatcaagaatctcgatttccgcacggtgatggccggcaactgcggccagattcccatgttctcgctgatgccggcggcatcctatgacgatggtctgctggacttcgaaatcatcgacaccaccggcggcatcctcggctgggccaacctgttcggcgacgtggtgcaccagacgatcatcggcaagcccgaacagaacccgctgtccacgaactcgaccatcgaacaggtccagggtgtcagtgccgaaatcacattggaaaagccggccaaagcgcaggtggacggtgacatgctgccggaaacccgccacatccgtttctcggtggatcaccgcgcgctgatcgtgcgcgtgcccgacgcctccgcgctggaaaagaccgcgcaggccgctgcttcaaatgccacctcgaatttcgccgaaatgaccggtacactcgagccgattcgctgattcgccaatccgctaatccgttactacgatgcgtggccggtgactcgggcgacatgcatcgccaaataagcgatttcgtcgtcgctgatatccgtgtcgaggcgcagttcgagcagggaggcgatggttcgcgcgcatcgcagcgcagcggggtaggactcacgaatcaccttcatcaccggtgccggctcgtccgtcagttgctggtgctggtggatgcgtacgaacaggtagcgcaggtgggtgatgaaccggcccacgttcacggaactgcggtccaacgtgatgccgtagctgtggtcgatgatgtcaagcagttgctggatcacgcccgtcatcgtgtacgtataggacaggtcgccggtggcgaagccggcgttgaccagatgcatggcaagcgcggtggcctcgccgtccggcagcgtgacgtcgagccgtgcattgagcgatgcgagcatcgcacgcccctgcgcgtattcctgcgggtacaggttgctcacctcgccgagcagcgggtaggtgatgtcgatgccgcgccgcacccgctccaccgcattcgccacgtggtccgacagggccatgaccagcgtggtgctgccggtctcgcgctcccccagtccggtctcctgcatggattcgacgaccacgcggatgatttcgggcggaatgtccgccagcatctgcgccagatggtcagggtcgcgcccgtccgatggcacgaaggtgcgcacaactttcgactcgtcgaccgtctgccccggcttggcctggaaccccagtccgcggccggtgagaatcacctcaccgccgtcgccgcctttggcgagcacgacgttgttgttgaacactcgcagtatttccatggcatcctttcgcaacgtcattgttccacatcgatgatcgggctgccggctgatacggttttgcagtcgccgccgttgtcgtcgctgctaccgtcgccgatcaacggcgtgaccacggtcagttcagcggcgttgaccaccgtcaccaccaccacaacgctgtgcccggccgccgcgactttgccgaaatccacggtggccagtggctctcccgccgcgatccgctcgcctttgcccacggccacgacgaatccctcgccatccatattgacggtgtcaatgccgacatgaaccagcacttcgatgccgtcatcggttttaatgccgaaggcatggccggtccgggccacggttttcagcgtgccactgaccggtgccagcacggccatctcgccggccgtctccggcacgacgcctacaccctcccccagcgcgcgggaggcgaacaccggatcgccagtcgcttccagattcatcaaccggccggcgaccggcgacaggatggcgttggagtcaggagtccgatcggaggcaggccgcgatggggaatcttccgcagactccgcatccgacgatgtcgcgccaatccctctcaccgcatcctgcgagcgtacgttctcgcccgccgagaccatctgcgcctccgtggcgcgcggcggcgtacggtacccgaacagcaccgtcagcaccatcgccattacaaacgcaacggcgatggacagcgcgtacacccacattctgtcaaacaccgaaatcgtcagcaacgaggagaaggcgaacgccgtggtcgtgacgccccggaccatctgaccggatggcagcacggacgggaacagccagccaagcaccgcgctggtcacgccgccggccgcgcagccggcgagcagccagcggtagacgcggcggtgatgcagatggatgccgtacaggctcagttccgaaacgccacccagcaatcccgcgagcaacgcccccaccgcggtctgccgcatggccgaatccttgccgcgtacggccagcacgagcacgccagcggtggcaccgaagcaggcaaagttccatacacccatcggaccttggacgaaatcgtagccgagcgcctgaatgttcatcagcatcagggcattcaacggccagtgcagaccgagcggcacgagaaacgggtagagcatcgggatgatgagcgcgaataggaacggcacgtgcgcgttaagccatgctgtggccgctcccagcccaccgccgagccatattcccagaggcccgatgaccagtatggtgagcgcaaaaacgacgaccagtgagaggaatggcacgaacaccagctgtacgctgtcgggaatgacgcgcttcaacccgtggtagaccacggcgagcacggcagccatgagcaacggcacgaagacgttgccgccgtagtcgttgagttgaatcggtatgccgaacgccgacacggtgcaggtttcggcgccgaatacggcgttggccgagcattgaatcgccccggagagggcgctggatacggacgtcccggacattccggacattccggacatcacgccagtaaactgcggggtcatcagcgcggccataatcgcgccgccgagccaggggtcgacgtccagtttcttggccgcattgtaggcgatcataatcggcagaacggtgaacacaccctcccaaatcgccttgagtagtatccagccggcggaggtctcgccgtcaggcacgatgccgagtgcaacgatcacgttgacgatggcgatgaccagcgaggcaccgagcagtacacccagaatcgggcggaacgagtcagacaggtagtcgaaaaacgcggcagcccaagcgcgggcggcactgccccactcgcggacggtacgaggcgtgaagtgacgggatgtattggatgggccgcaactttgttcggcgtcggtggcagtatcgcgcgatggtgcggcatcgtcggaaaggtacggcgcggactgcgcgggttgcgtgggctgtgtggattgcgctgactgcgcgggctgcgctgactgcgcgggctgcgctggctgagtgggctgcattgactgagtgggttgcgttgactgcgacgctgactgcatcactgccgatggcaattgcgctgccggcatcaatcgcgccgtccgcagccgaacgacctgctcgtacaccgaggcgaccgctccgccgatgatgacctgataacgattgccggctcgcgggaatgcaccgaggactccggggatggattcaagaccgtgctggttgacatggccggcatcggccagttcgaagtgcagtcgcgtggcgcaatgggtcaggctggtaatgttcgcggggccgccgacggcatcgacgatgcgcgccgcaatcactgcaggcgttgcgttcgatgcgttcgccacggttcctccttgctgccgtatgccactgtgttccattatcggcgctgggtgccccaaaagcacggcaatgccggcaaagcatcgcgaaacggcaactatgcgctacggtgctctgcgatggtgtcccgccataatgttccgcgatgatgcttcgccacacccgttctccgtatttgccgcggcgcccattccgacatcattccaccatgcagaatcctgcaatcgttgtcaaaaatcatcgttttttgctgcctattcggagtgtcgcgactgcggaagtcgtattctatctttcacacacgttgcgtagcagggttgttactcaaaacgaggcaagacctggagcgacgtggaatttgcgtatcgtaatatgcgaattccacgttgttccaggtcttttttgttttcgggcgactgcagacaatcgaagcctgaccttgcacgcggcagaggggccacgcaacaggcgcggtccgtcaacggcgaaaggacaaggcaatgacgacgacaacggcatcacccgtatcgaaacagacggcatccgcggcgcaggaaaccagcgcaaccggtgcggcggccaccgcaatcgaaaccatcgaaaccggcgtggccggagtggcgggcgcggccacaaacgcggcagccaacgcaatcgaggacctcgaaaccgccgaatcgcacggcttctccacgcgcttcccgctcaacagcgcattcatcttcaccttcggcgcgctcggcggcatgctgttcggtttcgacaccggcatcatctccggcgcctcccctcttatcgaatcggacttcggcctgagcgtctctcagaccggcttcatcacctcctcggtgctgatcggctcgtgcgcaggcgcgctgtcgatcggcgcactgtctgaccggttcggccgcaagaagctgctcatcgtctccgcgctgctgttcctgctcggctcaggcctgtgcgcctcctccaccggattcgcgatgatggtgtgcgcccgcatcatcctgggtctcgccgtcggcgcggcctccgccctgaccccggcgtacttggccgaactggcgccgaaggagcgtcgcggctcactgtccacgctgttccagctcatggtcaccttcggcattctgctggcctacgcctccaacctcggattcctgaaccacaacctcttcggcatccgcgactggcgctggatgctcggttcggcgctggtgccggccgccttgttgctgctcggcggcctgttgctgcccgaatccccgcgttatctggtgaacaagggcgacacccgcaacgccttcaaagtgcttacgctgattcgcaaggacgtggatcagacccaggtgcagattgagctggacgaaatcaaggccgtggccgcacaggacaccaagggtggtgtgcgcgaactgttccgtatcgctcgtccggcgctggtggccgccatcggtatcatgctgttccagcagctcgtgggcatcaactcggtgatctacttcctgccgcaggtgttcatcaagggcttcggcttccctgaaggcgacgcgatctgggtgtcggtgggcatcggcgtggtgaacttcgtgagcaccatcgtggccacgcttatcatggatcgtttcccgcgcaagggcatgctgatcttcggttccatcgtgatgaccgtttcgctcgcggtgctcgccgtgatgaacttcgtgggcgacgtggccgtgctggcagtgccgacgatgattctcatcgctttctatatcctcggctttgcggtctcgtggggcccgatcgcctgggtgcttatcggcgagatcttcccgctgagcgtgcgcggcatcggctcatccttcggctcggcggcgaactggctgggcaacttcatcgtctcccagttcttcctcgtgctgctcgatgcgttcggcaacaatgtgggcggcccgttcgcgattttcggcgtgttctcggccctgtccatcccgttcgtgctgcgcttggtgcccgagaccaagggcaagtcgctggaggaaatcgagaaggaaatgaccaagcactagacaaccggcacacgattcgcacaaaagttgacaactcttaacataagagtacccaaagtggcgaaaaacgtggcagaatagggaacatggtagcaaacaatgcgggtcagcccgccaccccagcagatctgattaatgtcgatgaggttatcggcaagtactatgacctcgtccccgatcccgaagtccccgagcagcgtgtcatcttcggcacctccggtcaccgcggatcgtccctgaagacctcgttcaacgaggcccacatcatcgccatctcccaggccatcgccgaataccgcaagaaggccggcgtcaccggcccgctgtacctcggctccgacacccacgcgctgtccggcccggccaagaagaccgccatcgaggtgctcgtcgccaacggcgtgcacgtgcgcgtcgactcccgtgacgacttcgtgcccaccccggtggtctcccaggccatcctgacccacaaccgtgcagtcgacggcacccagcgcttcgagggcgagggcctcgccgacggcatcgtcgtcacgccgtcccacaacccgcccaccgacggtggctttaagtacgaccccgtcaccggcggcccggccccggccgagaccaccaacgccatcgccgctcgcgccaacgagctgctcggcgacttcaagtccatcaagcgtgtgccctacgaggaggccatcaagtccgagtacgtcgagggcttcgacttccgcgagcactacgtggacgacctggagaacgtcatcgacttcgacgtgatccgcaactccggcgtgcgtctgggcatcgatccgctcggcggcgcttccgtgaactactggccgctcatcaacgagaagtacggcctgaacatcggcgtggtgcgtcctgaggtcgacccgacctggcgcttcatgaccatcgaccacgacggcaagattcgcatggacccgtcttccccgtacgccatgaagggcctggtcgacgagctcaacgccggcgcttgggacaagtacgatctggtcggcggcaccgacccggacgccgaccgtcacggcatcgtctgcccgaactggggcgtgatgaacccgaaccactacatcgccgtgtgcgtggagtacctgttcggcggcaaccgtccgggctggcctgagggcgcagccgtgggcaagacgctggtctcctcttccctgatcgaccgcgtggccgcatcgatcaacgcgaaggtcatcgaagtgccggtgggcttcaagtggttcgtggacccgctgttcagcggcgaagtcgccttcggcggcgaggagagctccggcatgagcttcctgcgcaaggatggccgcgtgtggaccaccgataaggatggtctgatccccgacctgctggccgccgagatcactgccaagaccggcaagaacccggcccagcttcaccaggagcaggtcgagcgcttcggcgagtcttggtacaagcgcgtcgacaccccgaccacactggagcagaaggccaagttcgcggcactgtccggcgacgacgtgaccgcctccaccctggctggcgaagacatcaccgccaagctgaccgaggcaccgggcaaccacgccaagatcggcggtctgaaggtcaccaccaaggacaactggttcgccgcccgcccctccggcaccgagaacatctacaaggtgtacgccgagtccttcgtctcccccgaggctctggacaaggtgctcgacgaggccaccgtcgtggtcgacaaggccctgagcgagtgaaatcgctgcgttagtcgcgttcaccgcaactaataaggctctgcattggattcatgcaatccactgcagagctttttttagcgcatatgcagttcgcgaccactgaaacacgcaggtcaacggttctcctcatgcaccgtgactgcattttctcaacatcactgcagggcaggacggccagatgaccgcgaaacgttcgcctacctatattatgaccgagtttcccatcatcattgtggggtcacagcggccagatgaccgccgaagcgttcggtcggcttgcatcatggtcgagttttaacatcgttgtgggacgccacgacgaatttgcccattccagagctgccatcccacaaaagcgtgggacaacagctaagtcaatcgttttacatttcccccatcccacacactcaaactggaaaccccggaaagacgccattcctgccacacccgtcacagccattacccgaggggccgtgggacgccacgcaaaaatcggcaaaacatgcgtagcgtcccacacccattggcgcaaatccacgcccaatgcaccgacaacacccccaatcgaccactatgacacatttccctccacaatcgaacactagtcattcacgaaatccatcactacgaggcatcgcaatcgaacggcatgcaatatcaagcacacaccacaacaacaggtcgtacaaatattgcctttacatcagtccgtttcggacatcatggtcacagcaggctctgcgccaactcttcaagagacatggctactacatgaaactcgaatacggcaccgcgcgaagcaagcgccctcgccacgttgaaagcgaattcagcacgagcatcctcgttagcgatacttgccgccgtggcgacgaagaccagccatctccgcccgaccagcacaccccttttctcttggtcacggcgccattgagtcttactcgtacgatgatgatcgccatcatattcaacagcgaccttgaactccggccacgctaagtccaacgttatgggagctccagatgcaaaagccgcgtccggcaccacatagttcgcaaccggccgtggaatcccatgcgctaccagagagagtcgttcttctgattctttgggcgaatcagcaccaggtgatatcagaggcaatgctcgaacgcaggacgggcgccctctgaatcgggtaaactgctccacgaacttcaccaaatcctgatagattgcagcagcatcacgatccttggccaatactggctgtttgctcgtagcagcgatgacggcatccccgagcacaatcagggactcaaaagaaacatacggggcaagttgggcccatacgtgaaacaggtccagcgcaaacacgtgttggttcatttccacattggcggctttagccgcatgtttccaaatatgcgtttgcagtggtgcatggcgtgtacggaaccgcttgctcttaacgctggatacagtgtgcagcttggccgagtcgaggtcgcaatcggcgggaatcggtacggattgcagagcgagggaagtggtcatgccgaaaagcagcttcttgcccgcccgtttcgcttcctcagtgcagcgtgcgaccatgtcgcgtctgcgctgggcgaggctttcgctcatggtcggtgtcgctgcagaatcatgtgcaccactgttcggcgatgacgagtcgcgagaagtcgggtatttcgagtcagtagaaaatgaccccgcaaattcgggcggaacaaaaactgcctccgattcttccggaggctgatcgtatatagagcctggcagagctccatagttggtgatgccgtcggtcatcctgttcatgacaccaccatatgggtagtgggtgcggaaacggaagccgatccgaggtatgtggtcctagcttcacttacgcacattcattgtggataaccatgtggacacctcacttatacacatagtcatccacctcttcaaccccgatttgacacactaactgtatctgatatgattacagtatcataactgtacacatcatagttacagtatcgactcggtaaggaggtcgtttcatgaacggcgaccattcactggcagtgcacgcattggtctaccttgaccatcgcgccacacacctgcccagtcagatcctggccgagaacatatgtaccaatgcggcgcgcgtgcgcaaagtaatgcgaccgctcgcctcagccggactcatcgccactaaagagggtgctgaaggcgggtacgctctggcccggcccgccgccgaaatcactttgcgcgcggtagcggaagccaccggcaccacttttgtgaaagtgaactggacaccgggcgacgtacacgaggactgtctggtgtcatcttcaatgggcgcagtgatgaacgacatctatgccgggctcaaccgcacttgcctcgaacaactcgaacacaccaccatccacgacatcaccgaacagatattcagcgagcgcaaaggctaataatcccgcgcgtttcccctagccagcatcagtcgataacgcttcggcagtcaaagaagaaaacagacgccgcacggcacacaacacatcagcacaacgcactcttatcactcgaatacgtaaggaagtaaccatgtccatcagcacacccaatgccatcagcacacccagcacaaccagcacacccaatgccatcagcacacccagcacctcccccactatcaccaccgacgccctgatcattggattcggcaagggcggcaaaaccttggctgccaagctcagtgcagccggccgcaaggtcgtcgtcgccgaggcaagcgccgacatgtacggcggcacctgcatcaatatcggatgcttgccgtccaagtcactgattttgtccgccgaacaggcgcggcgggatggcgcgaacagtactcccgaaacccgcgaagcagcgttcgaggctgctatcaaggagaagcgccgcgtcacttcgatgctgcgcgacaagaactatcacaagctcgccgaccaagacaacatcaccgtaatcaccggccgcgctcacttcaccggccctcatagcgtggaaatcgccaccgctgagggcccggtcgccgtgaccgccagcaagatcttcatcaataccggtgccacgccgcgcattccggatattcccggtatccacactacgcccggcgtctacaccagcactggactgatggatctcgacgatatgccgcagcgactggtgattatcggttcaggattcattggacttgagtttgcctcgatgtttgccgatttcggcacggcggttaccgtgctgcagcacaatgccgagttcctgccgcgcgaggatgcggatgtggcggccgcgattcgcgcacagttggaagcgcagggcgtcaagttcctgttcaacgcggataccaaggccatcgcgcctgctgctgacggcggcgtcaggttgtccgttgcggtgaagggtatgactcgcggcgcatcgcaagcttgcgattccacccccgccggcaccgggaacgctcataccgatatcaccggtgccaccgacgccaccggcgccaccgacactacaacaaccaccagccccactagcaacccgaccgatcacgccacgatgtcacacgttcaaaagaaaccatcagacgatggcgagccgcggttcgccgagccggctgaagcccgattctgcctgaccaccgacgcggtactgatggccaccggacgtacgccgaacgtcgagggactgcatcttgaggcagctggcgtggagctcaccgaacgcggtgccgtgaaagtcgacgagcttctgcgcaccacagcagccgacatttgggctctgggcgatgtgaacggcggcccgcagcacacgtacatttcgctggatgactatcgcgtggtgtggtcgcagctcaatggttccgaccgtccgtacacggtgaaggaccgcaagcatgtgccgtcgagcacattcctcgccacgccttactcgcgcgtgggattgaatgagcgcgaggcgaaggcggccggattggattatgtggtcaagcgattgccggtggccgctgtgccgaaggcccaggtaatgcggcgaccggatggtctgatgaaggcgattgtggaacgcaatactggccgcattctgggtgcgatgctgctttccgtcgagtcgcacgaggtgatcaatatcgtcaagttggcgatggatcttgacgcgccggccagcacgttgcgcgatatggtgttcacgcatccgacgattgccgaggcactgaacgacttgttcgcgtagtttgttcgcatagcacgcccgcgcagcatgacccgcgtagcgcagcccgcaacagactcccctaatgcgcgcgaaggtcctcatcgacgtaaaccgatgaggaccttcgcgctgtcgtcatgatccgtacgtgacagcaatcacgtccgaaccagccgttacttcaagccgagcttacggtccagaatgtcggaggcatccaatcctaagcggcgtcggatgaaccagccaagaccgagcggcaggccgggagccaaggccatgccgcctggaccgagtgccacggttttggctaggtgtgatgttattcacactcttcactacgttgttttgcctcgcactgggcaaccccacttcagcaagagattgcacagcttgcgttagggtggagaacatgactatcacagtatccacagatgggtccgcattagggaatccaaacgggccaatgggctgggcctgggccgatcatgagcagaacgccggcggcaagcccggccataagcacgacgaccatggttatgatgcgggcggcgcgaccaacggcaccaatcagattggtgagctgtgcgcagtgctggaagctttgcgagcgcacccgggccctgagccattgctcatcgaatcggattcgcagtacgccatcaattgctcgaccaagtgggtcaaaggctggaagaagaacggctggaaaaattcgcagaaaaagcctgtgaagaacaaagagcttattcaggcgatcgaccgtgagatctcacaacgccctggcccggtggatttccgatgggtcaaaggtcacgccggcaacgagggcaatgagttggtcgatgaactggcacgcacctatgcgggcgattgccgttcgggtgcgcgcgacggctatctgccgattgaaggctggcagtcgctactgggctccgaatacgcacatggcaccgatgtgcctccagacgtgcagttggtgctggatggcaaggcggatgcggcaagtttgcgcaagccggctgcggcgacggattcgacggatgccacaaggccagataccaagtcttcgtcgcccttagcgacacaatcagcgcaacctgtacaatcagcgcaccccgtacaccccgcaaagccaagcggactgacggtatccggtacgctgaccttctcccccgcgccgaaaacgagcccgtatttcaacgggcagccgatgccgatcaaaggcagcatcgaaatcgaaggctatgtggacggcgacggcaacctgaccatcaccaacgcaccattcgtacgacactaacacccaaacacacgaatatgtaccgcaatcggacacgatgacacaaaatcgctcattcgcgttaggataggagataaggcttcacgccgttgatccatgcggcggaggcaaggatggcaaaggagaaaccatggataaggcacagcaggatgcgctgaagaaggcggccggcatcgaagccgccaagctcgttgaaaacggcatgatcgcaggcctcggcactggttcgaccgtgaagttcctggtggacgagctcggccgccgtcatcaggaggaaggtcttgagttcactggcgtaaccacgtctcgccgcacgcaggtccaggctgaaagctacggcatcaagatcgtggacatcgacgacgtggaccacatcgacgtgaccattgacggcgccgacgaagtcgacaagaacttcaacggtatcaagggcggtggcgctgctctgctgtgggagaagatcgtggccaccaactccaaccagatcgtgtggattgtggacgagtccaaggttgtggacaccatcggcaagttcccgctgccggtcgaggtcattccgttcggcgctggccacgtcatcaagaagttcgaggaccgcggctacaagccggtgcttcgtcttgacgccgatggcaaggaagtgcgcaccgacgagaacaacttcgtggtggacctgcacctggagcgcatcgatcacccgcaggagctggccgaagacctcatcaacacggtcggcgtggtggagcacggcctgttcctcaacatggtcgacaaggtcatcgtcggcgacccgaacggcccgcgcgtgttgaccaacgccaacaagtgatcgtctcacatcactgaacttttccaagcccgcatctgtacatcgcaggtgcgggctttactgttgcccgaacaaggcaaaggagccaaaaagagaaaccccgcgaccataacgatcacggggtttctaatgccttgattgcaggtaagactacttacgctggtggcgggtcttacgcagcagtttgcggtgcttcttcttgctcatccgcttgcggcgcttcttgatgacagaacccatctgaagcctccatttcgattaatcgtaaaagttgcaacttgcaccataatacacgtgttgccagacagaggaaaccagtatgttgtcgatagtccgcatatgccctgaacgcagttggggcatccacatcagcaatgtggatgccccaacgttcataagtttgtgcagcagctgacagccgatactagatactacatcgggaacttctggtagaagcgatcgaccgcttccttggtgccggtagcttggaagaccacggtatcgttctgccagatggcagcggcgttcttgctgttggaggcatcggccttcaccacgtacgcgcccgtgacgttgccggaaaccttgacgttgccggatgccgactcatcgccggtctgcgcagcgaccaacgcatcgtactgggtcttggcattgtccgccgacgaccactgcgcggcgaccagcgtgacatccttggcggcatcaccagtggagtaggtcagagtgtactcctcgagcggcgatgcggaattccacgtcgtggaggcatccgccttggtacgcgcgtaattcagcacgctgtccggcatggccttcaacagctcactggcatcatccggcaaagctgtggcgtcgatggtcggcttgatcggctcggatgattcggttttctgctggctgttttgggtggtagtggaggtgccatcattcttctggatggcccaacccggccacacaaaggccgaaagcactgccaggataatcacaacagctgcggcaaccaccactgcaatcaacttgccatgggattgtgtggtcgaggagttctcactattagtcataccccgattctctcacagccgcgtgacgctagacggccgtaatcttagtcgttgtgcgcaagccgcgtgaaactcttgtgaacggtaaaaatttaccgtccgctggtgtttgggttagggtgagaccatggcgaaatcaagtgtgcagtatgtatgttccgaatgcggttggaacgggccgaagtggtacggccgttgccccgagtgtggtcagtggggcacggtcgaggaatttcacgaggctcggccggcggcaggctctcgcacgaccgctcccggccgaacatcacgcacgcagtcggttacggttgccgacaacgccagatctgcagcccgtccgattaccgaagtgggcacggaaagcgtcgagcggctcggtaccgggttttccgaattcgaccgtgtgctcggcggtggcgtggtgccgggttcagtgacgctgatagcgggcgaaccgggtatcggcaagtcgacattgctgttgcagacggccggcaatatcgcgcgcgttgtggcgggagacagtacattccgaggagccggtcagcggtctgcccaacagtcgggccgggcgcagggcggcacatcaaacacggtgtcagtacagggcaacgcaccgtcggtacatgccaataccgtgctgtacatttccggcgaggaatcacaggcgcaggttcgtttgcgcgcttcccgcatcaacgcggtggagccgaacttgttactggcctccaccaccgatctgtccacagtattggggctgatcgaacagaacaagccggccttggccattgtggattcggcgcagaccatcgtctcgcaggaggtcgatggcatttccggcggttcgactcaggtgcgcgaagtggcaagcgcgctgatagataccgctaagacgcttgacattccggtatttctggttggtcatgtgaccaaggacggttcgattgcaggcccgcgcacattggagcatctggtcgatgtggtctgccaattcgaaggcgacagcgagaccgcgctgagaatgttgcgagcggtgaagaatcgttttggtccgaccgatgaagtcggctgtttcgacatgagcggtgagggtatcgaagaggtcaccgatcccgccggattgttcctgtctggagacggccctgatgcggccaacgcggcacccatggaaggcacctgtgtgacgttcacattggatgggcatcgcagtctgcctatcgaagtacaggctctggtcaccacgtcggtgctgcccacacctcgacgtgcggtcaatggcgtggaccccagccgtatcgccatgctggtcgcggtgctctaccgtcacagcaagctcaacctgctgtccaacgacctgtatatctccactattgccgggggccaggccaaggagcccggttccgatttggcgatagtggcggcactggcgagcgccgccacgtcaaaacccattgcgcgagccacgtgcgccattggcgagatttccctgaccggtcaggtgcgcccggtaccgcgtatggaatatcgccttcgcgaggccgcgcgccttggctttacgacggcagtcattcctccgctgcgcaagccggtgcatgtcgagggacttcggctggtggagtccaacacattgtccgacgccttagatgccttgggagtgcggaaatagccctgagatatgcctcaggcggtaagacacttggtctcttcgacgttgcgcttgagttcgtcaacgagttggtcgggaccatcaaacttgacctgcgggcgcaggaaaccgacgaattcaacgcgaaccttatggtcgtacagatcaatccactcatcggtgatgcaataggactccaccacgcgttcgttgagtcctgttttctcgctgaaggtgggtttggtgccaatggagatggcggcaggccagcggttctcaccatctaccagccaaccggcatagacgccgtcgaccggaatgtagcctgcaatgtcggagccaagattggcggtggggaatccgatggtgcggccgcgctcctcaccgtgtaccacttcgccttcgatggcgtgcggagcacccagaatggcgttggcatcctggattcggccatgagccagcaggtagcgcacattggtggagctccaggcgcgcattgccttggcctggttcttcttgctccatgcgcggcgctcggccttggtggcattggccagcgggtcgacgggctctccccattcgctcggggcttccggcttgaaatcgcgcggaatgcgcacttcacccgggccacggtcatcgaccacatcaagttcgaatacaccggtggcggcggcaagattggcgatatgcttcacatcaccttctcgccccttgcccatggcggcatcctgcccgaggaccagcgtacgcatgcccagcttgccggtgagtctgccaaggaagaaaatgtatgacatgtctgcgaaggccagcgtgtagtgcaccaccaacacatggtccacgccgaactgttccatgcggtgcagtcgatcatccacactggtcaaggcttcggcatccacgttctgcaccgcgggttcctcgccatggtgcgaggcggcccagccgtgcacgaatgcggggcgcgggtcaaacagaatcaccacggaaaaagcatcatgctggtgcgcgagttccaccacacgcttgatcaccgcctgatgtcccaagtgcatgccatcaaatgcgcccaatgtcaccacggccttcttgtcgttactgaacgagggccattcaatcgaaccttcggcgtcaggggtcaggtgcgtgatatccatcagtgtgctgttccttttatccgtgcgatgttattcatgcaatataggcgttgttgtgcgcggcctgtatcaagctgcacttttcaccgcgtctactttacgcgagggggaatacggtgaccggcttggcctgatgagcgttggcacgctcgataatcgccgccacatcatgcgtttgcggcacaatggcggcagtgggctcgctgattgtacgctcgatacggcggccgaagcgcaattcgctggcttcctcaggtgtgatgtcaagcgccggcatcgcgcctcgagcggcctgttccatggtgagggcatggtcaagcagccagttgcggcgctcgtcaccggcaaggccttcaggagtgttcaatacgcacttgttgcgcgtgacggtttgcccttcccgattagtgaacgtcttctgatcggtatgtgcggtgacggtatgggttcgcgtgtcaagcatcgcctcagaggcgataagtccgctggtatcgtccggcaacgcgaatcggccgactcgcgtacggcgcaaacgggtcaggtatccgccgacgccaagttctttgccgagatcgcgggcgagcgcgcggatataggtgcccgatgaacagctgatccgcacgtcaacatcaagtgcgggaatcgctcccgtgttcgcgtcttcccgcaatggttcagcggcctgctcccctgctacgaatccgctgcggatatccagcacggtgaattcgctgatggtgaccgggcggggtttgagttccacatccttgccttcgcgagccaagtcgtaggcacgctggccgttgattttgatggcggagaacgtattggggacttgttcgatatcgccggtgaaattggtggcgatggtgcgtgtgagcaggtcttgccatgaggcagttggtaacgccgttggttcgccgctctggccaccctcagtcagctgcgctgatagcgtttgccagcgggaacgggcttcaccatcgacaagcacctcgccttcggcatcgtcggtagtggtgcgcaggccgaggcgtatggtggcctcgtaggttttgtcatgcgccacgatggcgttgagcagtcgtgtggcgtggccgaaggcgatgaccagcgtgccagtggccatggggtcaagggtgccggcgtgaccgaccttcttgatgtgcaacgcgccgcgcacggcggcgacggcgtcgaagctggtcacgccttgcggcttgtcgatgatgagcagaccgctgggtgttgtatgaagcacactactcctcgtcagagtcgtcttcgaagtcgtcgctgggctcgtcgtcatgcttgtacggatcggcgtcgccggcgtactgggcggtggcgcgagcacgggcgagttcttcatcacgcttcttggccacggcgagtatgtcttcgatctcgtgagcctcgccgggcacttcatcgaacacgaattggagctgcggagtcaggcgcaggccagccttgtggcccaccagagaacgcaggtggcccttggcctgatcgagtgcctgctgggcgcgcttgcgttcgccttcctcgtggccttcgtggccgagctgggtccagtagaccttggcgatctgcaaatcgttggtcacacgaacttcggtgacggtgatgctggcgagtcgcttgtcatgcagttcgcgctcaatggaggaggcgacgacacgctgaatcaaggccgcaatacgtgcggcgcgcgggttggttcctgccataggaatttccttttctagacttgagccccctctgacgaggggctgccgaacgcagtgaggctgggggagagaaaatcatggaactaccatgtctctcccccagtcagtctgcggctgacagccccctcgtcagagggggcttaacaatgactacttgcgctcgacttcccgcatctcgaaggtctcgatgatgtcgccgagttcaatgtcgttgaaggtgccgaggttgataccagcctcgtagccttccttgacggactgaacgtcgtccttgaagcgacgcagcgaggagatctcgaggtcgttgaccgtggccacgccgttgcgcaggatacggcacttcgtaccacgcttgacctcgccgtcctgcaccataacgccggcgatgttgccgaacttggaggagcggaagatctcgcggatctcggagtgagaggtgacgacctcttcgtattccggcttgagcatgcccttgagggatgcctcgatgtcttcgatcgcacggtagatgaccgagtagtacttgatctccacgccctcgcgctcggcgaggtccgcgacctgacggttcggacgcacgttgaaaccgatgataacggccttgtcgaccgtggccaggttgacatcattctgggtgatcgcaccgacgccgcggtggatgacctggatgccgacctcgtcggatacctcgatcttcatcaaggaatcctcgagcgcctcgacagaaccggacgaatcgcccttgatgacaatattgagcatgtcgatctcggactcggcgaacttcttcttgaagtcctcgagggagacgaccttgcgacgcttggccagctgggcggcacgctcggtggcctgacgcttctcggcaatctggcgagcggcacgatcatcggaggcgaccaggaagaggtcaccggcggtgggcacggaggtcaagcccagcacctgaacaggtgtggacggaccggccgcttccatcggctgaccgttctcgtcgagcatggcacgcacgcggccgtacgaagtgccggccacgatggcatcgcccacgtggagcgtaccctgctgaaccagcacagtggccacggcaccacgacccttgtcgagtcgggcttcgacggtggcaccacgggcgtccatgtcggggttggcgcggaggtccagctcagcgtcagccgtgagcagcacggcttcgagcagcttgtcgacgtgcaggttctgcttggcggagatgtcgacgaacatggtgtcgccaccatactcttcagggaccaagccgaactcggtgagctggccgcggaccttctccgggttggcaccgggcacatcgatcttgttgacggccacgacgatcggcaccttggcggcctgagcgtggttgatggcctcaacggtctggggcatcacaccatcgtcggcggcgaccacgaggatcgcgacgtcagtgagctcggcaccacgggcacgcatggcggtgaacgcctcgtggccaggggtatcgaggaaggtgatcttgcgcggttcgccttcaaggttcacggtgacctggtaggcaccgatgcgctgggtaatgccgccggcctcacgtgcgatgacgttggtcttgcggatggtatccagcagtcgtgtcttaccgtggtcgacgtggcccatgacggtaacgaccggcgggcgaggcttgagatcctcgtcatcctgcagttcttcctcgtcaaggttgatgtcgaactgctggagcagttccttgtcttcctcttctgcggagacgagctggatgttccagccgatctcttcgcccagaatctggaaggtctcctcatccaaggactgggtggcggtagccatctgacccaggtggaagagcacggtgaccagcgcggcctggttgacgttgatcttctccgcaagatcggccagggacgcgccctgacgcagacggatggtctggccgttgccgttggggatgcgaacgccgccgatggtcggtgctttcagctcctcatactcatggcgctttgccagacggttcttacgggcctttgaagacttgccgccctgacgtccgaatgcgcctgcggcaccgccgcgaccgccgcgaccgccgccacgtgcgggaccgttgctcggtgcaccgccgccctggaagttattgccgccgccttggcccccacggaagccgccgcgtgcgccgccctgaccggcaccctgggagccgccgccctgacccggacggttgtggccccactggccgggacgcggaccgccctgaccaccttggcccggacgaccgccacggaagccgcggccctgcccctggccttggccgggacggcccggacgaccgccacgaccgttatcagcagtcggacgagccatcggatgcggacgcggaatatcacccggcgtcggggtgtgcataccctgcttgcgggagaacgggttgttgcccgggcgcgggccctgagcgtgcgggcgcggaatcgcatttgaagcggcattgccgccattggcaccggcgccgccctgagcgtgcgggcgcggagccgaagcattgccgcggttgttctgatgctgaaccggctggccattgttcggacggccctggttgttacgacgatcgttgttacggcgatcgttcgggcgactctgacgaccgttctcacggccttcgcgattatcgcgaccattctcacggttgtcgttctgaccgtggcggccgggggtcggcatgccggggcgtgcgccgccctgcggacgcggtgtcggtgcgcccggagtcggagcctgctgatgtgccgaggcgggcgatgcctgacgtgcgggagcggccggagtcggtgcggaagatgaagtggaagccggggccgaaggtgcggccgggcggcgctgctgcacgggcttggcagcaggcttttgtacggaagatgcgggcttggaatcgcccttggcgttgtccttggcgaactctgccttcagacgccgggctaccggcggttcaatcgtagaagaagcggacttgacgaattctcccatgtccttaagcttctcaagcacggttttgctatcgacattcaaaaccttagccagttcgtatacgcgtggtttcgccactaattactcctattctgtgaccacgcgcgtgcatgggcgtggtcagttggtgatgacggcaagcctaccctgtctcatcgtgcgaccatgatcgtgttacctcgtctctggtgtgggcgatttcgcgcacactgcaccagcccacatacgccaatcaagcatactcatagcgctggatagcgtagacgcagcgagccgcgccattgctgacgcggctcgtatcaggaaacaatgcgccctgaagatcattcgccttcgagcccggcggcctattcggcttccggagcagcagcctcggccgcagcctgggcggccttttcagcggcgaccttcttggcatgggcctcggcggattcgatgccgatcttccagccggtcagcttggctgccagtcgtgcgttctggccttccttgccgatggccagggatagctggtcgtcgtggatgaaggcgatggcggtcttgttcttctcgctgatcacctgtacgccggtggccacagccggggacagcgcggctgccacgaacttggccggatcgtcggagtagtcgacgatgtcgatcttctccgggccaaggttctccataacggcacgcacgcgagcgccgccggggccgatcagcgcacccttcgggttcacgccatcggtgttggcctggaccgcgatcttggtgcgggcgccggcctcacgagcgatggccatgatggacacggcaccggagaccagttccggcacttcacgctcgaacagcttgcggaccagctccgggtgggagcgggacaccacgatttccgggcccttgatgccacgggccacgttcaccacgtacacgcggatgcgttcgccgtggcggtaacgttcgccgggcacctgctcacggcgaggcagaatggcttcgacatcgcccatcgcgacatgcacgttggaggggtcggaagcatcctgttggatgatgccggtgatgagcttgcccttctgaccggagaacgcgccgaataccttctcatcttcggcgcggcggaacagctgggtgatgacctggcgtgcagtggcggcggcgagacggccgaagtcacgcggggtgtcgtcgtattcctcgcccagcttgggagcggggtgcgggtcgtcctcggtgggctcgaccgggatttcgtcggcggcccagacggtgaagttgccggaacgttcgtcaagctccacacgcgcgtgcctggcggcgtgcggggtcttgaggtaggcgaggcgcagggcctctgccagcgcatcatccagggttccggggtcgattccttgctcggcggcgagcttgtgtattcctgtcaggtccagttccatcgatccgtacctcctatgaagttatgtggcgcatggcctatgagtggtcacagttagctattagtgtaggtttccatgcagacacgcttctcttcaggacggtttacccggcgcttggcatccgcactatgcgcgagcgcgatgctgtgttcgctttcggcgtgttcgatgccgcgactggccggacgggccgaggcggaagctcaaatgagcccttgcgagaaagcgatgacgttggcggactacgccacccatccggctgaaggcacgccgttattagagcagtatgccaccggcctggccgctcccctgacttggattgacgttgccgggtattgttcgggtcgttttgccgagggaacgttacgtgacgcgcagaccaagcaatggctggcttttctggccgataaattcgggcagtccgcgcctgaggtgacgccggcgcgtcttgatggcgtcacgtccgccaacgttgaccgaccggtattggatgcgatggccgtggccgaggatcgcgccggattcgctatcgaggtcttggccgcacgaggacagaccgctggggctacgttggcgttgagcgatatgcataagaccgccgggcagcagctggtgtcgctggcgaacggcaattttgatgattccggcgcacagtccagttcttccggccagagcgacccccgccaaaaggtctatgccatcgaccaactactggccaaccccaccaccatcgccgacaaggcaagcggccagaccgtaccgaccgccgccgccatcgaaatggactgcgcccgcgcgcagatcaaggccgtgaccgaatcgaaatcttccaccgagagcgatacgctgctcatcctcgccgcactggccgccaagcacgcctacaccgcgttccaacttggctacccagcgactgacgccacattgttcgagtagtttcgcagtaaccgttttcgtgaaccatagtccggtagacgcgatgccgttcaacaattcaacaggtaaaacacctgtattcgtatgcattacgcatcgcaccaagcaactgctggcacgagacctatacgctacaaccgagtggaaccacgctctataagctcgaaatcagtgcaatacgtgcgtattggcccctcgtagccctgaatacgttcaatcaacatatctatgccgcacttcacgtaatcgctcacatgcggatctacggtggtgagtgacggattggagaattgagcttctggcacattgtcgtatccaataagctgcacatcttccggcacatgaagaccattcgcctcaagaccatgcaacacgccaatcgccatagcatcgttcaggcagacaatcgcatccggccgtaccccctgcttcaacatgtgattaacggcacgcacaccactgtcgctcatcattaggccccacgaaaacagcatatccatgtccggacgtagtcctcgttcttcgaaagcaagaatgtacccacgaacacgcatctcctgtgtgccttcagtagcgttcatatagtagtcgtaatcgcggttgccctcgcatgcaccgaacagcgcgatgttccggcaccccgcatcaagcaaacggccggttgcctgccgcacaccttcgacattgggcatggtcactttatcgactctgtcatatgtttcatagtcgctagcaacaaccaacggatacggctgctccagtaacgcgccttcattggcaaggggctggtcaatgaatacgaaccatccatcaggtgccaacatggcggcattatccataaccgatgccagtccagcaccgccttggccatatgtattaacgattacgccatacccacgctgacgcgcatagtcgataacctgatcagatagatagggagcaaaaggctgcgagaaatcaaaaatagatagtcctatcagaccggtcgtgccggttttcagcgaccgggccgacaagttaaccgtatatccgagtttgacaatggcattttcaacacgttctcgcgtggagtcacgcatactgccagtactgttgagcacattggaaacggttttgaacgaaacgcccgcttctttggccacatctttgatggtcacatgcctagacattattcactccttaacaatttgctcattattcacattgtaattacggtttaccttcaataatgccactatgacaacgagcccgacacacatcgaaagaagcgaaggatgtgcgtcgggctcgtcgagagcgaaggcgggccgaaggagaagacccgccaagtcgtcaggatttcacagaaccggccgtaagacctcccacccagtagcgctgaaggaagagaaaggccagcaccatcgggatgatggatatgaacgcaccggacgtgaccaaattccacacctgttcagaagccgcaccagcctgggacttgacctgccactgcgtcagaccaacagtgatggggaataacttgttgttcgtcaacactacctgcggcaggaagaagttattccaagctcccaccgtggacagcagatataccgtggtgatggctggggtcataatcggcagcgacacctggaagaacgtgcgcagctcgccggcaccatccacacgggcggcctcgatcatctcgtcgggcaacgattcctggcagtagatacgcatgaggtacacgcccatggggttgagcagcgagggaagcaacacggcccaaactgtatcaacgatatcgatattcgacatcagcaggaaggtggggatgaccaacgcggtgttcgggatcatcagagctgcgagcaccagattgaagaacatcttcttgccacggaagcggaacttagcgaagccatagccggcgagaacggcaaccgtggttgcgcccagtccaccgaccaacgcatacaggaaggagttgagaatccaacgccagtagatgccaccctgataggtggtcagctgcttgatgttgtcgaataacgcgaacttgtcgtcaaaccacagtgaaccgtgcgcgccaaagaacaagccgttattggtcttggtggaggcaacgataagccaccacaccggaatgaggaagtaaacgatggcaaggcagaacactacaatcgtaaacactctcgaattgccacgaatgtgattggccttagcagctttgcgtgcattcttagccatgtcagtcctccaatcccgattggttcttcgtcagtttcataaagacgacgctaaagataacgacgatgagtcccaaggcgaacgaaaccgtcgccgcatagttgggctggttgtagttgaacgccagtgcctgtgcatacatgttcggcgtgtattccggctgtatggccgtcggtgcctgattgcgcagtaccgtcggttccgtgtagaactgcaaggttccgattagggagaagatggtcaccataaccatcgagctggagcacatcggaatcttgactcgtgtggcgatctgcagttccgtagcaccatcgattcgcgcggactcatacagctcatgcggaaccgattgaagtgccgaatacagaatcaccatgtagtagccggtccactgccaagtaaccacattgaccaacgcgccgaaaattccatcaggagtgaggaagccaggcgtaggcagtccgaacaactcgaaaaacgtggtaaatggacccatgttgttggagtacatgaagccccacatcaacgctccgaccacgcctggaatcgcgtacggcaggaaaatgaccaaacgagtcacggatgcgaagcggtttttgagggagtcgagcagcagagcgaagaacaaggccaggccaagctgaatcggaaccataaccaccgtgtatagaatcacgcgccccatgcccttaaggaacaacgggtcagtgaacaccctctggtaattcgacaaaccggtgaattggacgccgaacacgttggatgtgaacagcgacataacgaatgcatatacgaggggcactacgaggaaaatcacgaaaatcacgcaaaatggagcagtgaacagccatccccagatattgccgcgacgagtgacgataccgtctttactaacggtctttgttgcgtttttacccatgtgtatctccaataatcaggtgaagaagctgcgggccgagccggttggcttcggagccgttggcccagcccgcaactcacctgctgtcagggttattcgacagtgtaaccctgctgcttggcgtagttgttgagcgtctcatcgaggctcttgaggttgctggtggtatccttgccatccttgacgatgctagtgaacgtctttacctgctcgtcgtatgcgtaggtctggaagggcaggaatgagtagcccttgtaaccctcagccgtgggaatggtgatctcgttgagcttctgcccgccgaggaactcctcctccatgttcttgaagctgtcggactgcagcttcttggtccaagccgggaacaggccgccatcggtaacaccgatttcctgagccttgtcggaatcgaacagctctcgtgccaccttgtatgcggcttcggtgtccttggcctgatcggttacggcccaagcggaaccgccttggttcaccatcggggtggagtcatcccacaccggggcattgtagatgcggaactgaccattggtgtcgccggcacccttcagatagccggtctgccacgaagcctgcacccatgtggcgtacttgccgccaagaatgttggtggtccagtcgttcgtgttggcatcagtggtgtctacgaggccctctttgacgaggttctgccagtagccgagcacttccttgactccatcggtgttgaagttcaccgaggccttggtgggatcagacgccgagtagttgtagacgttctgattcttctgcgcgaacagtgcaatgttgaacgcggtgccattcggcgcgaaatcagtcaggtagccgtcgtatccggctgccttgaggtccttgccggcctgctcgaactcagcccaggtggtcggcaccttgacgttgtacttgtcgaagatgtcctggcgcacatacatgacgaatggtccaaggtcgacgggaacaccgtaaaccttgtcttcagaacccagctgaacgctcttccaggcaccttcggtgtaatcgtctttatgatcggtgaaaccgaattggctcaaatcgacgagatgttgctccttgccggccataaactggggcatggcttcatattcaagctgaataacatcaggggcacccttaccggccttaatggcgttctggaatttggtgtattcaccgccgccctggccgccgttattccagcaaacctgaagatcatcgtgggtttcgttgaaatcatccaccacctgttcgatagctggataccaagcccaaacggtaaccttctgcacaccctttttcttaacggtattggtgcaggatgcactgtcattagcggtcttatcgctgttgaccttggcaccattcgcgttggagcttccgccacaagcgcttacggtcaatgccatagcgccagccgcaatggctgccatgacccgggttactttcttcatgagctcctcctttggattctcatttgttctttccttattgttctttagttatgggcgctgcggaaattcgtcgaagcgattaacgaaatcccgcagcacagttatgttgttggcgcgcccgctacgattaagcgaaatgcaacgccgtccagctcacggggggcagcacaacatgcgccataccggtctctccatcgagtgatgcggtgtcgttgtcgtgcagcacgacatggttctgattgtccagagtgttcttggcgagtaggtcatcatcatgcagcgtctgcgccgtgacggttttcgcaaaaaggccttcaggcaatttgatttcgaagtcctgctcagcgtccaaagaacgattgaccacgaatacactgaccgtaccatccgcgccacgtaccgccaccgaattgacgaccggcacctcgccatatttagcggtgtcataggttccagaagcgagtttcggctcaagcaccgtaccgcccttggcatattctgcagtgaccgcaaatgggtagaacgtggtctgacgccatgccggcccattgggctcagtcataatcggcgcaatcacattgaccagctgagcaagactagccgcatgcacgcgatcggcattcttcagcaaggtaatcatcagatcgccaaacaccacagcatccgcgacggagtacagatcctcaagcagacgcggcgcaaccggccagttgccgatgccttccggattcttgctcggctcatcatgctgataccacacgttccactcatcgaaggagatgtagacctcatgcttgctcttcaaacgggccttggtggcatcgatggcagccgccacatcattgatgaatccgtccatatcgacgccggatgcgaggaagctgcccatatcgcgggtgccatcttccttaagggccgggaagtaataagcatggcacgaaatgaagttgacggcttcgtaggtcttctcgagaacggtttcttcccaacgaccgaaggtgtccatctcatgggaagaggaaccgcataccacgagttcaaggtcgggatccatcatgcgcatgcccgccgcgaccgaagcggcaagagtgccgtagtcttcggcgctcttgtgcccaatctgccaaggaccgtccatctcgttgccgaggcaccacatacgtatgtcgaacggtttgtcagcaccgtttgctcggcgctgctcggaaagggccgttccgctaggaatgttggaatactccagcaaatcaagcgcttcctgcaaaccacgggttcccagattggcggcttccatcagttcgttgccgccgcacttgtccagccacttgaccatctcgtgcaggccgaactcgttggtttcagtggaatgccaagccaaatcaagacgacgaggacgctgacccttcgggcctacgccgtcttcccaacgatatccggacataaaattaccgcccggatatcggatggtggtggcacccagttcgcggaccagatcaatcacatcctgacggaaaccatcttcatcggccgtgggatgaccgggctcatagatgccggtataaacgcaacgcccaagatgctccacgaaggagccgaagagacgattgttgaccggcgcgacctcaaatgcgtcatcgacgacgagacgcgccttgttcgcagtgacttcttgtgccataggaaccctttcctgttactgtttctcacagagttagtacaacgttgtcttaaaggcgaaaaaagaaccacaacctttctgaaacaatgttcggtgcatacgaagcggaaaccacctcttatgggagaatcatcgaatcaatcggttgctttgaacacttctttctatttagtacaaccttgtaccgactgctgatacacaaggtacaccagtacgcaaaaccgcgcaaacgcaactagtataacgttggagtaattcgcagattttcgcccaacacgccgtgtgctgtcctcaagtatcgcttgaaaacgaacattgaacagaacagaaacgaacacggcctataggaactcttgtggtgcttataacccgggtttggccttgtgggagtaggcgtgccggggtgttatttttcccggcgggaaaataggggcgtcccggtggtgggctggacgcatgagaacgaagtccagcaaggcgaagaaatgcccggtgtgcggccggccgatgaagaagaacggtcggaccgcgaaggggtgcagcgctggaagtgcgcatcctgctcgctgagctcgacgatgccacaggagaacacggagcgggccgggcagctcgacgcgttccttggatggctgctcggccgcgcgagccagtccgcgtgcgacgcgaacggcgattcgcgggccctgcgcaagcgcaccgcgtggtgccggaacatccggcccgccatcccgccgtgcagggtgaaacatcatacggtgatggcggacggcacgtacatgaaccacggctggtgcctggtcatagccatcgacggcgggaacggcgaggtgccgggcttccagtggtgctcgaacgagagcaaggccgcctatatggcgttgttctcgcgcatccctgctccggacgtgccgataacggacgggctgcgcggcgcggagagcgcctgcaacgtgcagcgctgcctggtgcatgtgctgcgcaacacccgcgtcgacctgacgaacaggcccaagagcgaggccggcggggagctgctcggactcgcccgcaggctcgtcagggtgacgacggccgacgaggacgccgcatggctcaaggagctcaacgactggcacggcaggcacgacgatcacttcaaggagcgcaccaccgccaaacaggatcccatgcacgcgaggggacgcaagtggcggcggacgcacgaacgcctgcgccgcgcccacttccgattggtcagactgaaccgggccggcgtgctgttcgcgttctgcgatccggccgtcctcaagagcggcggcccgctgccgtcgacgaccaaccagctgaagggcggcgtcaacgccgtggtcaagcgcgcgctcgaccaccaccggggattgtcggaggagcatatgagacgctgctgcgaatggacggtgtacatgctcacggagcagcccggccccatggcgctcgtcacacctgaacaccggaggacgaggaaggggaagccggtcgggaatgacgggcccatgcccggcaccatgacggccgtgcaggaaccgaccgacggcgtcgacgcctacgagagcgggttcgggatcagaaaaggatgggtcgggcgatcaacctgaccatgacacgagggaatagacactttttaacccacttttctttacttaacccaaagatggggttccgcaaaaacaaaaaaggttccgagatgacctcggaacccttgcaggcggataaggcgagattcgaactcgcggaggctttcacctcacacgctttcgaggcgtgctccttagaccgctcggacacttatccatgctgccaaaatggcaacttgttcattatgccacattctgccgacctggcaaatcggagtttcgctgagcaagtctcgagtgtatgccgcttgagacatgtcagatcacaatcccggaattcgcccgaagcgctggcattgcgtttacgcgccaagcactccgacaggaattacatacactccatcatcgcgttgatacgcgaactcgccgacccccaccaacaccgccaagaactccggttcacgggttcgcgcactcggatttctcagcagcttatctttcagtctgcatagatttgccgatgcctcagggactttatcctcactggacttaatttcgatgccgccccaccgtccatcggacaattcaataatggcatcacactccagaccggaatcgtcacgataataccgaaccggttctatcccaatatcgaggagagatctcgcatacaccaacagatcacggatgcatagattctcaaacagaaacccaaaagtctgccaatcgccgataagagcagcaggactcatgcccaacattgcggccgcaatggaaggatcggcaaaataccgacgcgccttggtctggagtcgctttggatcccgtgccggcgggacccagccctttatcggatcgatgacgaacatgttctcgaacatggccgtatatccggataccgttctctccgaaatgaaatcgtcaaggttttcttcagtaccgtacatatccttacgtaaggttttgaatgtcacagcttgactgatattgcgcgcaagcgaatccagcagacgacgagccacatcaggatccttgccttgcctgggcacactctcagtcagcgtgagtcgcatgtattcccgaatcagaatctgtgcgtcagatacaggcagagccaccgcctccggccatccacctcggcatacggcatccaacaacatttgtgtacttatctctgattttgcagcggcgaacttatgttcaaacagtccactgagacttaccgcacctgtcgagagtccggactcatataaagtcagaggattcatacggatacgtccgattcgtcccgcaccactatggttcggccgattctcattgagaggagtggatgaaccggtcagaatccactgacctttattcgcggaatcatcgtcgacgcgatgacggacttcatcccatatagctggagcgagttgccactcatccacgatatgaggcctatctcccagcagcatcaatgacggatccgccttagccgcagccaaattgttattgcgatccacataggtaatgctggctgcatgggcccgcgcagaccaagttttcccgcaccacttggtgccggtaatctccaccgcgccaaagatgcgcatatatcgttcgatctgtgcatccacgatacgagggcgataggctttcggcttgatgtcgctcgccagagaatcggccattccgcgcacctcccgttatttcacgtccgccatcgcaataatccgaatttctcaactaccaaaatccgaatgttgcaacgacgaaaatctgaactttctaactacaataatccgaatttctcaactaccaaaatccgaatgttgcaacgacgaaaatccgaatattggtggtggtagaagcggtgacggggccactctgcattgagcggtctctctcagtctcgctacgctcgacagctcgaacgcaatttaaggacagctttccagctgccattttatttgctcactgtcattcgccttcgcctaaaaacgcctccggcgttttcttcacggctcagctcatcagagggggcttggaattttgtttacgccacctgttcgtggacggaggcattgacccattgggtctgctggacgttgtagccggagaagatgccgatgtcgagcatgcagtcgcggtaatcgcggccgtgggcgatggtgatgtagctgtcgtccaccaatcggttatgcgtgggatccagtccgacccatcggccatcctgatacacctcgatccaagcgtgggtcgcgccctctcccccaagcaaaccggcaatgtagcgcgcggtcaatcccacatgccggcacacggacagcattacatgggcataatcctggcatacgcccttgcgctgggccaaggcctgttcggcggtggtgcgaatcgtggtggaaccgggcgtatacacaaacgccttgtagacctcatccatcacttcggcggcctgctgcaccggagtggcgtcggcaggcaacgcagccaagcgttcgcggcatacgtcgatcatcgcctccacgttcgggccgggaatggtgagcgctgaattgaatcggtacagcggtttataggcttccttatggatatgcgcattgtccacgaaggcgatgccggtcaccgaatagctgaatatgtcgtgcggctcggggatgaatccggtcatcaccacggagccaaaggagtcgatggtggtttcgagttcggtttcgggctgaatcttcacttccacgtcaatcacctgttggcgagggccagtggcgggaatacagcgaagctggaacctgtgatcggtgaccggtgcgctgaaggacagcttcatctcatagtcgaacacgagttttttcacaacgtctcctgcacttacacacgagccggcaaccggcacattctcgggataacgacactacagccatggctgaggtatggtccgcgcgctcacagtccacgcatatattccggcaattcgccgatacgcatcggccggcactcgggcgcacggtttttcgccataccaccatagcatttgaacccgtcagggcgaacgtcgggttaggggcgcttggcatccatgttcatggagctcagtgagcccatgtctttgatggccagggcgctgacacggccggaataatcgtcaaggtacttcttcagcaggtcggcgacttcctgatacccgcgagacggcagctgaccgaccagccagctcagcccatcggcgaagcaactaggcaacggcatgccgtcgaggatcatcgagtaggaggcgagcttcctaagcggggcttccatctcctccatcgtcaggccgaagcgcgtgtacaggtcgatgcgctcaagatacttgccgatgaagatgaacgccttcagcgtggggtcgaccggcgaattctcgatgccgccccagaaggcgagcatgtcatcggtaatatcgcgctgcttgtagatgtcctcggcgtcggccgcgtatttggcggcatcggtgatattggtcatcgccaactccacgtactgcaacagacgcgagctcaattccgggcgcagaatcacggcgttgttgaatgcggaggttacggccgaccgcaccgaatcagggttggacccgtcgtacaggaagctgttcacgaacccgtcgaagtcctcgaaatcttcgggcaggtcgagtgcgtgagcgaacggacggaaggcgtccacatcggtgtccatcacacgatcgtagaacgggaagaactggttcagcgtggtgaaggcgcgctcggtgtaccgacccagccaatacaggttgtctgccttggaagcggtgaccagagacaacgagtggcggcgggactggctcagcaggttcgccacctgcacttcagcaccgtattcatgctccacgccggattcgggtgccaacacccacgtatccttgaatccgccaccctgcgacgagttgacgatcatctggccgggcaccgacgagtatcgagtcaagcccgaataccacacgtgcgtgtttttgccggtgaccacaaaggcacgcaaatcgcatttgcgcggcgacatctcaccggtcttcgggtccaccacatcgatatcgcggaactgaatcacctcttgggcgatgaatcgacgaggctcctccttgatccggttggcaagctcctcacgtgcggcagcatccagcgacgaaccgaacaccacgccgtaaccaccggcttcggccacatccttgatgaccagctcgcccatacgattcaggacttccttacggtcggcctcgtacatcggcatatacgtgggcgcgttgttgagaatcggttcctcgccgagatagtacttgatcatctgcggcacgaagtagtagatggccttgtcatcggccgcgccgttgcccggcgcgttgacgatggccacgttgcccgcgcggtaggcggacaggataccgggcacaccgatcaccgaatcaggattgaaggcaaacggatcgaggaattcgtcggacagacggcggtagaccacgcccacacggtggcgtttgccggcgtagtcgaggaagtagaccttgttgtccaccacttcgaggtcttcggggaaggccagtgcggcgccggttttctccgtcagataggcgtgttcgaagaacgcggaattgtagcggccgggggtcagtaccacggcgatgccctcagtggacacaaagtccatggccttgcgcagtaggcgcgggtattcgcgattgtcgcggatgtgcacgtcgcggaacaggcgcggggagatgcggcgctcgatgtcgcgcacgaacagcgggtagctggcgcccgaggggatgcgcaggttgtcttccagcacccaccagcggccatcttcaccctggaccaggtcttcgccggcgatgtgcgcgaagatgccgccgggaggggtcacgccgttgacctgcgggaagtagccggccgaggtgtatacgtattcctccggcacgacgccgtcatggatgatggccttgtcggagtagatgtccttcagataggcgttcagggcgttgacgcgctgcttcaggcccttctccaattcgtcgtattcgtcggattcgataatgcgcggcacgggatcgtacgggaagagccggtcatggtattcgccgttcttgtagatgccgaagcgtacgccgttgcgggacagctcgcggttgatcgcctcgcgacggtttaccagttcatgggccagtctgcgtgctgcggattcgatcatcgtgcctgctccttgctgtggcggcttctgtggcctcaagcggttaggcgtttcgagcgcacgctgacgccgcaagccgtaaccgggtttgatggttacaacctaaggcggccccgtttcagcaaacgcgcgagaatgttacaggcaggtcacttcgccgaccgcactcgtctcgccgaccgcgcgcatctcgccgaccgcactcgttacaatgaatggctatgacacgactgcgcattgacttggcctacgacggcggcggattctatggctgggccaaacagcccaatctgcgtacggtgcaaggcaccattgaagatgcgctgcacaaggtgctgcgggtgccggccgatgatgcggccgaaccgttgcgtctgacggtggctgggcgcaccgacaccggtgtgcacgcctcccaccaagtggcgcatttggatgtatccgatgaggtactgaatcgctgcgtaggtcacatgaccattccggtcaccgaggcgctgactcgcagactcaaggctgtgctgccttcggacatcgtcattcatggcattgccgtggcaccggccggtttcgatgccaggttctccgcattggagcgcacttatgtgtatcgggtcgccgatcgttcgtccgagatcgacccgcgcctgcgtggatgcgtgcttaccgtggatgaatcgctggatctggagcttatgaaccacgcagcctcattgaccatcggcctgcacgattttggttccttcgccactccgaatccgggaggcactacgatccgcgaagtcaagaccgcctattggcggcgggtgccgatcactcccctggtgccggatgcgatggcatcgcatgaagcatatcggactccgtcgctggagtccggactggcggtgttcacgattgtggcggacgcctttgcccgcaatatggtgcgctccttggtcggctcatgcatcaaagttggttcgggacgcaaatctctggaatggtttgccggcaaaatggccgagccagtgcgtgaaggctcaagcggaccgattgcgccgcagggcctgactttggagcatatcgcataccccgtcgatgatcagctggccgcaagagccgaggccattcgagccgtacgtacgttgtagtttctatgaaacaacgcaaaagggctggaacccaaacggattccagccctttcagctagcttggcgaaacgctattcagctcactcggccttctcggcgtcagcggcttcctcagcgggagcctcagcctcagcggcctcagcctcaacggccggagcctcttcttcggcaaccttggcggcggcttcggcttccttcacaacagccttcttggcaaccggctcggtgacgagctcgatcacagcggccggagcggcatcgccaacgcgcggggcgatcttgacgatacgggtgtagccaccttcacgctgctccatctgctcggcaatctgggtgaacagaatgtgcaccacggacttgttgcggatgacgcgcatcacgcgacgacgggagtgcagatcaccgcgcttggcgaaggtgatcaggcgctcggccagcggacgaaggcgcttggccttcggcagcgtggtggtgatgcggccgttctggaacaggctggtcgccatgtttgccagcatgaggcgctcgtgtgcggggctggaagccagacgcgggcccttcttgggtgtaggcattgggtttactccttatatgtccgttcttcaggcaagcaggtgggcatatgcccgaacatccgcttgcctagtgaacgaacgattggtcaaagaggcagatcactcgtcttccggcgagaagaacgtaccaccttcgagattattggtatcgaaggccatcggcgaggacttgaggctcaggcccaaggtctgcagcttctccttgacctcatcgattgacttcataccgaaattgcggatgtcgagcaggtcctgctcggtgtgggagacaagctcaccgatggtgtggatgccctcgcgcttgaggcagttgtaagaacgctgcgtcaggttgaggtcctcgatcggaacggccatctcggggttggtctcctcggccaccggggccggaccgacctcgacgccttcagcctgggcgttgagctcacggcacaggccgaagagctccaccaaggtggaaccggcggaagccaccgcgtcacgcggggagatggcgggcttggtctccacgtccagaatgagcttgtcgaagtccgtgcgctgttccacacgggtggcctcgaccttgtagctcaccttgagtaccggggagtagatggaatcaaccggaatacggccgatctcatcgttgtcctgcttgttcatctgggcaggaacatagccacggccacgctcgacggtgaactcgatctcgagttcgccatcgtcggcgagggtagcgatgtgctgctccgggttggcaatagtgacgccggcaggcggggtgatgtccccagccacggcttcgcccttgccgctcttgcgcagatacatgaccacaggctcgtcatattcgctggtgagcacgatgcccttgatgttcagcaggatctcggtgacgtcttcctggacgcccggcagagtggtgaactcatgcagggcaccggaaatacgcacggaggtcacggcagcacccgggatggagctcagcagcgtgcgacgcagcgagttgccgagcgtgtagccgaagccaggctcgagcggctcgatggtgaagcgggagcgctgcggattcagagattcctcggtaagagtcggacgctgtgcaataagcactgtggttatcctttcagcttgaactcggtggtgcactcaccggtcaggcggttttggatggatttggtattgctgagtgctcagacgcgacgacgcttcggaggacgaacgccgttgtgggcttgcggggtgacgtcggtgatggaaccaacctcgaggcccgcagactgcagggaacggatggcggtctcacgaccggaacccgggcccttgacgaacacgtcgaccttcttgacgccgtgttccatcgccttgcgggcggcggactcggcagccataccagcggcgtacggcgtggacttacgggagcccttgaagccgacatcaccaccggacgcccaggacaccacggcaccggacggatcggtgatcgaaatgatcgtgttgttgaaagtggacttgatgtgagcctggccgaccgggaccgacttgcggtcgcgacgacggggcttacgagcggcttgcttaggcgctgccattgaccctcgtttcctagtaacgaactttgttgttgacgttcgggcgatgggatgaaatcatcccgtggcccgaatcatgccaccgactacttggtggccttcttctttccggcgaccgtgcgcttcgggcccttgcgggtacgagcattggtcttggtgcgctgaccgcgcacaggaagtcccttacggtgacgctggccttggtagcagttgatctgaatcttgcgacgaatatctgcatcgacttcacgacgcaggtcaccctcgatcttgtagttggcttcgaggtagtcacgcagcgtaatcagctgctcgtcggtgagatccttgacgcggatgtccgggctgataccggtcgcggcaagcgtttccttggcacgagtgcgacccacaccgaaaatgtaggtgagggcgatctcgatgcgcttctcattggggatgtcgactccggcaagacgtgccattgcgattccttcttgttgccgtaggtcttgcacccactcgtccggtctcccggcacgggcctacgtacccgtggttcagtgtcgttcccttgcgggaagcactgtgagagagtgccttatttacttagtgccgctggagaatctgctctcagccctgacgctgcttgtggcgcgggttgacgcagatcaccatgacgcggccgtgacggcggatcacgcggcagttttcgcagatcctcttcacgctagggctgaccttcatggttatccttttcttgtgtacctttacttgtaacggtacgtaatgcgtccgcggttcaggtcgtaagggctcatttcgagcacgacacgatcctgcggcagaatacgaatgtagttcttacgcattttgccggaaatcgtggcgagcacgatgtgcttgttctcgagttcaacgcggaacatcgcgttaggcagtgcttccactacctgtccttcgacttcaatcacaccgtcttttgccatgtgcctctagtcctattccgttggatgattactatggcatatccgaagacacaccaactgtcaactatatacgcacatacccctgtacgaacactcggcgtgtcgcacaggggtatggaaacgttgatgtggtatttcggcatcactccggcttgttggccgggctgccgaacctactactcgaggtggctgatgatacggccgctgatctcgtcgatgtcgccgacgccgttgaccacgacgagcaggccacgggattcgtagatgtcgagcagcggagcggtttccttctcgtaggtctccaggcgcttggcgatggcctccggagtgtcgtcagcgcggccctgctcggcggcgcgcttcttcatacgctccagcagcacgtcacgggcggcttcgagggccaccacgtggtcgagcggagtgtcgaggtcggcgagcatctcgtcgagagcggtgacctgggcggcgttacgcgggtagccatcgaggatccagccgttattgcagtcttccttggccagacgatccttgacgatcttgttggtcagggagtcaggaaccagctcgcccttgtcggtgtagctcatcgcctcaagaccgagttcggtcttgttcttgatgttgtagcggaagatgtcgccggtggagatggtggggatgttgaagtgctcggcgagcagagcagcctgggtgcccttgcccacgccctgggggcccatgatgagcagacgcatggtggtctccttttgtgtcggttattaatacggttttggctcccttggttaggggagccattgagttatatgtggaagaaagattgctccgtcgtggaactcctcgcgcggccgcctgcccattgcgggcgaccgctgccaagcgggcgtcagccttctttgtggtccacgttttcgaacaggaagccggtgtactggaactgttcggtctgggccttggcctgacgcagggtgtcgaggcccacgcccgcgataatcaggatcgtggtgccaccgaacggcagcttggcgttgagtccgagagccatgatcagcacggtcgggatcagggccacgaacagcaggtagacggcacccacggtgttgagtcggttcatcacgtaggtcaggtaacggctggtggcgttgccggcgcggatgccgggaatgaagccgccgtactgcttcatgttgtccgcggtctcgtccgggttgaacgtgatcgaggtgtagaagaagcagaagaacacgatcatcagcgcgtacagggcgatgtaccacacggatgtggtgttcgccaggttggcgttgatccacttgacccaggactggtcggacttgccgaactgggcgatcagggtcgggatggcgaggatcgaggaggcgaagatcggcgggatgacgccggacatgttgatcttcagcggcaggtaggtggaggagccgccgtacatcttacggccgatcatgcggcgcgtgtactgcaccgggacgcggcgctggcacagttcgacgaagtcgacgaagatgaggatgaccacgagcacgcccacgacgatgccgaacttggtccagtcgccgttcttgccgttggtgccgtagccgatctcccacagctgcggcaggaagccggagcagatggacatgaagatcaggatggacatgccctggccgatgcccttgtcggtcacgagctcggccatccacatgatcaggccggtgccgccggtcatgatgaggaccatgaccacgaggttccacacggagccgtccgggatgacctggtcgcagcggtagttgaacagggcaccggagcgggcggtgaccaggatggtggtggactgcagcacggccaggccgatggtcaggtaacgcgtgtactgggtgagcttggcctctccggactggccctccttatgcagggcctcgaagcgcgggatgaccacgcgcagcagctgcaccacgatggacgcggtgatgtacggcatgacgcccagcgcgaagatggacagctggagcatagcgccaccggagaagaggttcaccagtccgatgaagttctcctgggaggcgctgccgatagtggccatgcacttgttcaccacgttgtagtccacgccaggggtcggaatgaacgaaccgatgcggtagacgatgatgatgaacaggacgaagagaatcttcttcctcaactctttggtcttcagggcctggattagtgtcctcacctagatttcctcccaatagcgcgccaatcacgcgaaatacgcaaactaacgaatgagcatagtctaaagtgcctacttcggccacttcatgtctcgcgaatgttacctgaattatgctccgtcgtactgaacgggggaagcatactcaaaacgatcattgtgttgagactgcttctctgcgctcagaacaacaattttttagaaaagggaacccccgtccacctattggcgggcgggggttgtacagcctattgcgctccccgtaggactaatcagtcctcggaaacggaaccgccggcggcctcgatcttggacttggcggaagccgaagccttaacacccttgagggtgaaagccacggtggtctcgccgtcgcccagaaccttcaccggagcgttgtcacgaacagcgcccttggcgatcaggtcggccacagcaacctcgccaccctcggggaagagctccacgagacgagcgatgttgatgacctggaactcgaccttgaacgggttcttgaagccacgaagcttcggcaggcgcatgtacagcggcagctggccgccttcaaagcccggacgcacgtggttacgcttcgtctggcccttggcgccacgaccggaggtcttacccttggagccttcaccgcggcccacacgggtgcggtccttcttggcgcccggggcgggcttcaggtcgtgcatctgcaggatttcgttatctgccataatcagtcaacctcctcaacggtgaccaggtgacgcacggcgttcaccagaccacggttggccggggtgtcctcgcggacaacggtcttaccgatcttgttgaggccgagggtcttgacggtggcgcgctgagccggggtacggttcacgatgccgtggtgcagggtaatcttcaggttcttagccatgagtatcactcaccatccttctcttcggcggccttagcggcagcagcctcttcgcgagccttgcgagcctcggcaatgccggcggcacgggcgcgcagcagagcatcgggagcaacctcgtcgagcgccaggccacgacgggcggcgatctcctcgggctcttcgagctgcttgagggcgtcgacggtagcgcgcaccacattaacggcggtggcagagcccatcgacttggtcaggacgtcggtgatgcctgcgcattccatgacggcgcgcacggagccaccggcgattacaccggtacccggggcagccggacgcagcaggacggtgccagcagcgtcgtgaccctgaaccgggtgggtgatggtgccgcggacgcgaggcacagagaacatgtgcttcttggcgtccagctggcccttggcgatggcggccgggacttcacgggacttgccgtagccgacacccacggtgccgttgccgtcgccgaccacaaccagtgcagcgaagctgaaggtacggccacccttgtgggtcttggacacacggttgatggtcaccacgcgatcgagcagctcgtcgccgtggttttcttcacgacggttacgacgctcgccgcgacggccttcaccgcgctggccacgacgacccttgcggtcctcgttgttggattcggtcgccacagtgttctgagtttcttcagccacttgggtttccttcgtttcgttgtcgctcacagtgcaagacctccctcgcgggcgccatcagcaacggctgcgacgcgaccggtgtacttgttgccaccgcggtcgaacacgactgcggtgatgccggcagccttggccttctcggcgatcagctcgccgaccttcttggcggcctcagtcttggtgccttcgaaaccgtcgaagtcggcctgaagggtggaggcggacaccaaggtaatacccttggtatcgtcgaccacctgagcaaccatgtgacggttggagcgggtgaccaccaggcgcggacgctcgggggtaccggagatgcgcttgcggatacgcgcgtgacggcgcttgagagctaccttcttgccttttccgagaatagcaacgctcatatcacttaccagcctttccagccttgcgcaggatgcgttcatcggcatacttgatgcccttgcccttgtagggttccggagcgcgcagcttgcggatgttggcggcaacctggcccacgacctgcttgtcggtgccttcgacaaccacgtggttggcgtcggtcaccttcagggtgatgccttcgggcgggttgacggtgatggtgtgggagtagccgaggaagaactcgatgcccttgcccttggcgacggcgcggtaaccggtgccgacgatctcaagagtcttggagtagccatcgtgaacacccttgaccatgccggccatgatggaacgagccagaccgtgcttggcacgggtcggacgcaggtcatcagcggcggtcaggacgatctcgttgccttcaacggcagcggtgatgccttccggaaccacgtaggagtcagaacccttagcgcccttggcggagaagttctggccttcaatcttgacttcaacgccagcagggatggcgatggggagcttaccaatatgcgatgccatgtttcagctctcctttctcaccacacgaaggcgacaatttcgccgccaatgcctcgatcgaggcattccttctgagtcagcagtcccgaagaagtcgagatgatggcgatacccaggccaccgagcggcatcggcagggagtcggacttcgcgtaacgacgaaggcccggcttggagatgcgcttgatgccctgaatggaacgctcaccgttcggaccgtacttgagggtgacctcaagagtctggccgaccttggcttccttagcggtgaagtccttgatgtagccttcgcgcttcaggatctcggcgatgttcgccttgaacttggagtacggcatatccacggtttcgtgcttggccgcgctcgcattacgcagacgcgtaagcatgtctgcgatcggatctgtcattgtcatttgggcttgttgccctttctcgctatggtttccgccgccctcacgcttcttctagaagcgttcgggccgcggaccttcagcgtcgatgtttaccaactggacttcgtaacgccgggcagttcaccgcggtgagccttctcacgaaggcagatgcggcacaggccgaacttgcggtagacggagtggggacgaccgcagacctggcagcgcgtgtaagcgcg

SEQ ID NO: 99 - DNA, 58594 bp, Unknown
  R206_24m  MAG No. k141_17727
ccgaccacgaaacaggacgcccagccctctacgacaacgctatcgacaccgactacacccactcaatcggcattcaaaaaggccaaatctaacccccgcgacacgccgagccagacacacattttgacccttaacccgaacctgacattcagtcccggtgacatggttgccctaactggagaaagcggatgtggcaaaaccactttgttgaatgtcctaggtcttttggaagagccaagttcaggaacaattacctatgatgggcaaacaattgcctccagaaagggccgacggctcatgcaccgcaacgtcatgggattcatgttccagaattacgccctggtggagcaatggacggtgaacagaaatctgattctggctctgcgcagcgtcggaataccatcggcagatagaagtcggctcatcagacgcgcattgcgggccgtgaatctgacgggctacggcaatagacctatctacacactcagtggaggcgaacaacaacgagtcgcaatcgcgaggcttctcatccgtcaatcgctgcgcgtcatactggcggacgagccaacagcggccctcgatgccgacaaccgcaccatggtcatgcgtcacctgcgtgatttcgccgacaacggggcgatcgtgatctacacgacgcacaacgaggagaccgcggccctcgccgaccgcatcatcgcattatgattccgccagccactgttcgtacagcgcatcgacggcttcgagcattcgacccatcggctgcgtggaatcgatcaccgcgtcggctatgacacggcgttgttccgggctggactggtggcgaatgcgcgcaagcgcatcatctcgcgtcatgccgcgggtcgacaccattctgtcgacccgtacttgttcgggcgcttcgacggtgacgatatggtcgaatcgcatgggcatggcgtccaggacttccgccaacagcggaacatcatgcacgaccacggcatccggattgtccgcgaccgcctgccgctcccgagacagcgcaagatcatagatcaacggatgctcgatatcgtccagtttcctccgcaaccgttccgagtcaggcccggcgaacacgtgctcggcgatccatcgccggttgagccgcccctgatcggtcagcgcgtcggggccgaaacattccgctatacgacgaagaccgacgccgcccggttccaccactcggcgcgcgagctcgtcatagtcgataagcgccgcgccgagctcccgcagtcttgtggacaccgtgcttttgcccgccgcaataccaccggtcaatcctattcgaatcatgctcccccatcatggccatgtttcgaggttcatgcacacaacggcaaaacccggcccgccgaagcgagaccgggttttgactatacgtcaggcgtcagtcgcccgatggcgaactcacttgccgagcagctggtcgcgcagggcggcgagctgatcggagtcggcgagggtaccggtagccggagcggcggaagagtagttggaggtctcctcgaccggcttctcttccttcgggccctggccgtcggcggctgcggattcggcagcgttctccagctccttggccacgaactccttgtgctcctcccacagctcgtgggcggcggcgtactgggactcccactcctcgcgctgcttctcgtaaccagcgatccactcgttggtgttcgggtcgaagccttcggggtacttgtagttgccctgctcgtcgtactcggccggcatgccgtagatggccggatcgaagtcctcggaagccgggtcgacggagtcgttggcctgcttgagggacagggagatgcggcgacgatcgaggtcgacgtcgatcaccttgacgaacacggcctcgcccggcttgaccacggtctccgggttctcgacgtgacggttggcgagctcggagatgtgcaccaggccctcgatgccgtcctcgacggagatgaagacaccgaactggacgatcttggtgaccttgcccttgacgatctggccgggaacgtgggtgcgagcgaagcgctgccacggatcctcctgagtcgccttcagggacagggagatacgctcacggtcgagatcgacgtcgagcacctcgacggtgaccttgtcgccgaccttgacgacctcggacgggtggtcgatgtgcttccaagacagctcggaaacgtggatcaggccgtcaacaccgcccagatcgacgaaagcgccgaagttgacgatggaggacaccacaccctcacgaatctggcccttcttgagctgggacaggaaggtctcgcggacctcggactgggtctcctcgaggtactggcggcgggacaggaccacgttgttgcggttcttgtcgagctcaaggatcttggccttgatcttctggccgatgtacggggagaggtcgcggacgcgacgcatctcgacgagggaggcaggcaggaagccacgcagaccgatgtcgacgatgaggccgcccttgacggcttcgatgacggtgccctcaacgacgccgtcagcttccttgatcttctcgatgtcgccccaggcgcgctcgtactgggcacgcttcttggacagaatcagacggccttccttgtcttccttggtgacgacaagggcctcgatggcgtcgccgacctcgacgacttcgtcaggatcaacgtccttcttgatggaaagctcgcgggaggggatgacaccctcggtcttgtagccgatgtccaggaggacttcgtcgtgatcgatcttgacgacggtgccctcaaccagatcaccatcatcgaagttcttgatggtggaatcgactgccttgatgaagtcctcttcggtgccgatgtcgttgatggcaaccttggcgacttcagtgttgttctctgccatgtaaatatatggtttctaatagtggatggataatttctcgatattcagttatacgcacacccttacaggcatacagatattcacaatacaagcaactctgcccaaatttcctaggaaactctaggcgtgtcgttcggccatttccacgacgttggccaggagcatggctcgggtcatggggcccacgcctccggggttgggggtgtaggcggaggccttgtcgtagcaggccttgtccacgtcgcccttgatgcggtagcgaccggcttcttcgtcgtagacgcggctgacgcccacgtcgaccagcacggcgccgtccttgatcttgtcgggcgtcacgaatccggccgaacccattgcggcgacgatcacgtcggcgcggcgcatgtggtcggccacatcccgggtaccggtgtggcacagggtgacggtggcgttgacggcgttgcgcgtgagcatcagaccaatcgtgcggccaatggtgatgccgcggccaagcacgcacacttccttgccgttcagatcaatgtcataggcgtcgagcagctcgagcacaccgcgcggagtgcaaggcagcggtgtcgaaatgtcgccgcgcacatgcagcaccagttcgccgaggttgtacgggtgcatgccgtcggcatccttggccgggtcgatcatgtcgatgatcgcgttctcgttgatgcccttgggcaacggcaactggacgatgaacccggtgcaggccggatcttcgttgagttcgcgtacggcagcggcgatgtcgtcgaagctggcgtccgccggcagttccttcttgactgaggtaatgcccacttcctggcaatcggcgtgcttgccggccacgtacttcatcgacccgggatccgaccccaccagcaacgtgccaagccccggctggatgccctgcgccttgagcttgttcactcgctcggcaaggttggtcttgatttcggccgcaatccgcttaccgtcgatttttgtggacatcaacgccctcccccgtagtttcggtgcattctatcgaaacgataggctatcgttggaacaagtcaggattatatatcgttcgctctcacgaagaaggcgtgccatggggactcaaatcacacgacttacgcgactcgccgcagccggcctgagcgccgtcctgttgttcgcgaccgccgcatgcgcagccacctcccccactgaaaccgagccggacaacaagaccagtgttcccgcaccgaccgggccgatcaatgtggtcgcctccctcaatcaatggggctcgctggccgccgagctgggcggcgatgatgtggaagtcacgtccatcgtgaactccaccaatgtggatgcccacgatttcgagccaaagacctcggacgtcgccaagctgtccaaggcacaaatcatcgtggccaacggtgcgggctacgattcctgggccaccaaatcgatgaccaagaccacgaatatcgtatccgccgcttccgtcatgggtgccatggaaggcgataacccgcatctgtggttctccaaagacgctcgatccagcatggccacggccatcaccgatgcatatgtaaaggcactccccagcaagaagaaggccttccagaagcggctcaaggcatggcaggcggatgagaaatcgctggaaacatgggcgtccgagttcaccagatcccactccgacctcacctatgcagccaccgaacccgtggtctattatctgatggccgatctcgggttcaagaatcagacgcccaaggggtatacgcaatcgaccgcttccggcggcgaaccggcccccgcggacctgcagtctttccagaaactcatcgaagacaagggcgtggatgtgctggtcaacaacacgcaggaagccagtgacgcgaccaatatgatcactggcgctgccggtcgtgccgatgtgccggtagtcgacgtctccgaacaaatgcccaaggacaccgacacgctgaacgcctggatcaaccagctcatcaacaccatcatcgacgcggtggatccgagctatggctgcgaagacgccacggacggcaacgcgaattccgatgattccagcgccgacggcgccgccacggatgatgccaatgcgcacgattccaaggccagcaccggttccagcacggagcccaagtacatccgtcagtgcaaggcggccacatccagtgactcgtctcaggattcggcaaaggccgatgcctccaatggcgattccggcgatgcctccggcaacgaccagaccgactccggcaaatagttagaagcaaaggacaacggcatcggattcatgcaatgccgatagacgccttgcacgagaagggttgtgcgaccattgtcgagatggccgcacaacccttttctttggttgccaccatccgtacacgatattgagaacgattgtcagcatcgtttgccacaatcgggcgttatgagtgaaacttccgattgcatcgtgttcagcgatgccgccatcaagcgtggtgaccatatcatctggcaacatggcacctttgccattcccaccggttcggtcacggccatcgtcggcaccaacggcaccggcaaaaccacgatgatgagggccgagctgggacttttgccgctttgccatggcagcctgaccgtactgggcaagcctgcgggcgagatgaacaaacgcatcggatatgtgccgcagagctatgtggcgaatgtcgattccaatctcaccgccgaacaatccgtgttgctgggcctgaccggcacccgattcggcatccaccccatcaccaaggtccagaaagccaaagcgctcgaggcgatggagttcaccggcatcgccgacaaggcgcagtaccgtctgtccgaactgtccggcggtttgcgccagcgtgtggccatcgcccaggcgttggtgtgcgatccacaactgctgatgcttgacgagccgttggccaacctcgatctggccagtcaacgcgccaccgtacacgtgctggccaagctgaaccgtgaactgaacatgaccatccaggtggttgcgcacgatctcaatatgctcttgccgattctgaccggtgccgtctacttgctcgacgggcacccgcactacgccgatatgcacaaagtgctcgactccgacctactcacccacctctacggcacacaggtgcaggtggtcaccactccgcagggtgacatgttcgtgaccccgacgccggatgagccccaggaccagccgcaggatatgcacacggcagccgaagtggcgcaattgcaccatcacgagcacggcaacgccaccaatggcagtgccgccaacagcgccgagaatcgataacatcaagctagccgatccacagcccgtcaacgggctgcagctcaggcatggagaaaatacagggacatgagcaccatcaacttttcgtatgatcccgaatggctggacacactgtccgctccattcatgaccaacgccttcatcgccggcctgtgcattgccctggccgccggtgtcatgggatacttcaccatcgcccgtcgttccaccttcgcggcccatgcgctggcccatatcggtctgccgggcgcgaccggcgcggtgttgctcggcctgcccgtatcactgggcatgggcgtgttcgcactgggcggcgcactggtgatcggtgctttgggcaagcgcgtttccgagcgtgaaatcgcaaccggcaccgtactggccttcgccaccggcttgggtctgttcttcgcgcgattgtcgagttccgcctcccagcagatgcagtcgatcctcttcggctcgatcctgaccatcaccaccggccagatcatcggcttcgccgtgttcgacgtattgctgctggcattgttggccatcatctaccgcccgctgctgttcagctcgttggatgagcaggtggcacaggccaagggtgtgccgatcgggctgatgaacgtggcgtttatggcgattatggccggtgtaatcaccattgccgtgccggcagtgggtaccttgctgattttcgcgctggtgatcacgcctgcggccaccgccaatattctggccggctccccattcaaggcgatggtgatcgccagcgtgctgtgcctggtgtcgatttgggccggactcgtgctgtcggcgatgttccccgcccccccgagcttcattatcgtgacgctttccaccctgttctgggctatcgccaaggccgtggagacagtgcggaagtaatctcattcatttttcttgcccccgctggcaaattcacagcgggggctttgttatatcttctccaccaaggcattggcgatggcggcgatgccttcgccgcggccagtgaatcccatatggtcggtggtggtggcggtaaccgataccgggcaaccaaccgccgcagacagggcggcttcggcttcagcacggcgtgtgccgattttcgggcggttgccgatgatcgccactgaggccgatgccggcgtatacccgttggatgccagatgcgccacaacttcttgcagcatatcgatgccatgccttccggcaccatgcgcgtccgcaccgacaccgaacagtgaaccaatgtctcccaatcgggcggcggcaagcaacgcgtcaatcagggcgtgcgcggccacatcgccatcggaatcgccttcgataccctcgtatttggcggcatcggcctcgctacatgaatcaggcaccggccagtagagcccggcaatccacagttcacggcctgaaccggcaggcgcaaaacggtgagcgtcaaaaccctgccctatcaacactcctgcagaccccatgcagtccccttcgatggcgctacccagacgaacggcagcaaacgattatgaatcacgaagccccggcgtatcgcataaggacacgaccggggcctcaacaatcaaatcacttcttcttagacttcttctcggcttcgacacgagccaaagtatcggccgcggcctcttcgggctcggcggtgtgatgcttgtcgtcaccgggttgagcgggctcgtagcccaggttcacgtcgagcagacgctgggcttccgcctcgtcgatcttctcggacaaggcgatctcagaagtcagaatggcgcgggccttggtgagcatacgcttctcgcctgcggacaggccgtgctcgtcgacatcgcgctgggcgagatcgcgaaccacttcggcgatcttgttgacgtcaccggtggcgatcttttcgacgttcagcttgtaacggcgagaccagttcatctctttctcgatgatcggggtccgcaggatgccgaacaccttggccacttcggatgcggagacgatgtcacgcacgccgaccttcctggcattgtccacgggaacgttgatgaccaaaccatcggaagagagtacggacagctgcagatattcgcgcgtcactcccttgaccgtccgctcggtaatggcctccaccttcgctgcaccatgacgcggatagacgaccatatcgccgactttgtaagacatgtaccctccgagaactgacggcttacacacaaaaactcgaataattatgccatgcggtctggaccgcccctatgagagcgctcacaaccacggagacacaccgaaaagggcaagaattcgccattttcgacgcgccaatgtagcgttttcgactccaacgcacgtagactttgggtcatggctaaagaaacgaagatcaaggaagataccgtcaccgtgcctgtcgcccaaggcgacctcgatgcggtgagcaatgctgaattctacaacccccacggagttctcggcgggcatctcggcatcggcaagcatgccgacaccgccacaatccgtgtgctgcgtccgcttgccaagtccgtgaccatcctcacccaggatggcgaatacccgatgacccacgaatacaacggcgtgttcgtggctaccgtgccggcctccggcaccaagaagcagcccacgattcccgactaccgcgtcaggaccgagtgggaaagcggcgcagtgctcattgaggacgacccataccgttatatgcccacagtcggtgacatggacacctatctgttcggcgagggccgtcacgagaagctctgggaggcgcttggcgcgcacgtgctgcgctatgacgatccgatgggcggcgtggacggcacgcctggcgaacaggtggtaggcaccgcgttctccgtgtgggccccgaacgcccatgccgtgcgcgtggtcggtaacttcaacgcctgggatggccgtcgtcatgccatgcgcgagctcggctcctccggcgtgtgggagatcttcattcccggcatcggcgcgggcgagacctacaagttccagatcctgaacgccaattacacgtgggagatgaaggctgacccgatggagcgtcagcacgaggttccgccgcacaccgcctccatcgtcaccgaatccacctacgagtggaacgatgacgcctggatgcagcaccgccgcaccaccaacccgcatgatggcccggtctccatctatgaggttcacgccggcagctggaagcagggactgacctaccgcgacctggccaagcagctcgtggactatgtcaagcaggaaggcttcacccacgtggagttcatgccactggcacagcacccgttctccggctcctggggctatcaggtcaccggctactatgcggtggattcccgcctcggctcccccgacgacttccgttacctggtcgatcggttccatcaggccggcatcggcgtgatcatggactgggtgcccgcccacttcccgaaggatgccttcgcactcggccgcttcgacggcaccccgctgtacgaggacccggacccgctgcgcggcgaacaccccgaatggggcacctatgtgttcaacttcggacgccgcgaagtacgcaacttcctggtggccaacgccctgttctggctcgaggacctgcatgtcgatgcgctgcgcgtggatgccgtcagctccatgctctacctcgactacagccgcgaacccggccattggcgtccgaacatctacggcggacgcgaaaacctggaggccatcgacttcctcaaggaagccaccgccaccgcgtacaagaacaaccccggcgtcatgatgatcgccgaggagtccaccgcatggccgggcatcaccgcccccacctccgccggcggcatcggcttcggtatgaagtggaacatgggatggatgcacgacaccctcgagtatctgcacgaggagcccatcaatcgcaagtggcaccacaacgaaatcaccttctccatggtgtacgcctactccgaacactacgtattgcccatcagccacgacgaagtcgtgtacggcaagggctccctgtacggcaagatgccgggcgatggctggcagaagctagccggcgtgcgttcgatgttcgcctatcagtgggctcacccgggcaagaagctctccttcatgggcaacgagctggcccagtggggcgagtgggatcacgacgcctccatcgattgggattgcctgaactggcaggagcaccgtcaggtccagaccatggtcgccgacctcaacgccttctacaaggcgcatccggcactttggagccaggacttcgatccggccggcttccagtggctgaccagcgacgatgccgaccacaacacgctgagcttcctgcgcatcggcaccaagggcgagaccttggccgtggtggtcaacttctccggtgaagcctggcccgattaccaggtggcgctgcccaccggcggcaagtggaccgaagtgttcaccaccgatgacgccaagtacggcggctccgacatccacaacggcaccttcgaagcggtcgagggcgaatatcattcgcgtccgttctcggcgaagatcaccgttccagctctgggagttgtattcttgaagccggaagactgaactggtcaacaggctgaaaggtaaccggtttatttatgctcaataccacagcgcgtcagaatacgacaccgcgcatggtgctggtggtcgaggacgagcccacactcgccacggccattgcccagcgcatcaccgctgaaggatggaccgctcgcgtggccggggacggcgcttccgccgtccaggccgcgtcccagctacgccccgatctggtaatcatggacatcatgctgccggtcatggatggtcttgaggccaccaaacgcatcgtcgccgaacgtccggtgccggtgctgatcctcaccgcacgtgatgacgaggccgacaaggtcatcggtctgggagcgggcgccgatgattacatgaccaaaccgttctccatgcgcgagctcatcgcccgctgcaaggcgctgctgcgccgcgtggagcgtgcgaaggtcatcgccaagaattcggagaacgagaagctgctcgacttcggttcgatggtcatagacccggcccagcgcatcgtcaccgtgaacggcgagcaggtgcatctgacccccaccgagttcgatctgctggccacgctggcccgccgcccgaagtcggtgctcacccgcgaaaagctgctcgaagaggtctgggactgggtcgacgcatccggcacccgcaccgtcgacagccacgtcaaggcgctgcgccataagctcggcgccgataccatccgcaccgtgcacggcgtaggctacgctttcgagccgccgaccgcgtgatggcatccaaaaaacaacagcaatcccggcttgatgcgatgaaacctcgcgtcaagccggttgatttgttctcctctctgaagctggaactcagcgtactgatcgttatcgccactgccatcgcgtttgccatgtgctggttcctcctgaaattcggctggtccggttggatcgccatgccgctgactttggtggtggccttgggcatcacctatttcttctcccgcggcatcaccgctcccttacgccagatgcgcgatgtggccgaagccatggcggatggcgattacacggtccgcgtggatatcgatcaggatcgtcatgacgaggtcggccagctggctcgctcgttcaacgagatggccggcgaactcgaacatgccgataaaatgcgccgcgatatgatcgccaatgtgagccatgagctgcgtacgcccgtttccgctttgcaggcgatggtcgagaacatggccgacggcgtcaccgagcccactcccgccaatctggagagcatcctcacccaaacacagcgtctctccgacctcatcgccttcctgttggatttgagccgtatggaggccggtgcggcgagtctgaatatcgagaagttcaatttcgccgactttcttgacgagaccatcgagccgttggaaatcgccgatggcggccacgcccacgacatccatgtcaccgtgccggccgacatctcgatggaaggcgatcaggaccgcctgcgccagctgttcaccaacatcatcgccaacgcgctgaagcattcggccgacggcaccaccgtgctggtcgatgcccatgaggatgacagccaaggcaccatcgtgaccaatgtggtgaatttcggctcccagattgcaccgtccgaccgttcggatatcttccggcgctttgtcaaaggcaagacgggtcccggcaccgagtcgggcggcaccggccttggcctgtccatcgcacgttgggcggcccaattgcacggcggcaccgtcaaagtggtcgatgacacgcgaggcgccgatttcgaaatcatcctgcctaaatatcacgtcgccgaacgctgatattgtccgccgtcctaccgtatactgtattcgaacagatgttcgaatacagggtgggaggcacagcatgacacagcaatccaagtcacgaaccatgccgcacgacaccacgctgtttgtcatgcagatggccggcgattccatgatcaatgccggtattcataacggcgatctgctgattgtcgatcgttcgttggcaccagtccccggagatgtggttgcggctgtcatggacgatgaaatcgccatcaagcggctggtttcacgggccggcatcaccatattgcacgccgagaatcctcgatatcccgattacatgccgagcaacggcgcttcgcctgctatctggggcatcgtcaccgatgtcattcacccgttgatatcgtcatcggaccgtcgcgccacggcatccgccaataccagcacgcccaccaccttggtgccggcctgctgaaacacctgaacgcattgccgcacggtggcacctgtggtgacgatgtcatcaatgagaagcaccgcgtcgccatggcctatgagatcacgcttcaccctgacatgaccggtgatacgacgggcacgctgtaccgaagaggtctgctgcacggagcgtgccttggtggaggagctcagggcattgcatggtcgcgcattgacaccgtacccacgcaatgcccctgccaccgatttggccaacggtgccgtatgggcacgccctcttcggcgcattgacgcccgcgatgacggcaccggaaccaccaatacgcgatgccccaagcatgatgatgatattggcgtcttgttcagcagcgacaccatgatgcggccgaaagggccgtcaagctcggtatcgtcgtggtccttccagtcgagaatggcacgacgcgccgctccctggtaaatcgatgcggaccatatacgggctccgccaccaccgtctgtatcccgctcccggcattgtgcgaacaaggcccgacatgccgcacacaatacctcatccggcgcgtcacacccagcgcagccgcgtggaaacagcagattgcaggcctgtgcccacatcgcatgccaccacttgtatacgctcggcctgtccataacgcgtcaccatcaagctggagtatcgaatcgcgcaagcagtgcatccagcagttgtaccgtgtcttgcggattctccacacgaacaccgatcgcaccggcctcaaccgcaggatagtcattacccgtaggcgtcatgcgatcgcccacgaacaccatttcatcggcctgtatgccaagtgtctgcgtcagcttgcgcacggcataggccttatcgatgccgcattcgctgacatccacactggtgtagccgccggccctgacccgcatgtgcggcagatcggccttgaccgcttcgaccagcgcctgtttcttcgtgttatcgcgatcccatgcctgtttggccgctacgggtgcgaactgtcccagagcggagaaggtgatctggctgcccctgttctcgattcgaggcccccatacctgctgttcccacaatcccagttcccgggcatgtcgctcaagactttccgagacagcggccacggtggcttcggacagatcatgcgcatacaccaaggcccattgcgtgccatcccaccggtaataccgggagccggaggcaggcatgacatgcagattgccgcgcctggcattcggggtgagtacatccagcacctgtgaggtgaccaccgccatgccgccccctgagatcagggccaccaccgtatggtcgagcagcgcacagaaccgttcgatcatcgcgggcctcatcggctgttttgagctggccagcgtgttgtccaaatcgaaaccgaacaccttggcgttggagcagacattatcgaaatcaagttcggaccacgaacgtaccaccatttgtcgcgcctccctcgttgacgaatgttcacagccaatgaaccaatcctaacgcatgttgcctccgccatgtcctatggtgggaaccatgcttcagccaccttggaacgcacgaatctaccgcaaccgccacggtcgcggcacacgaaccccgatgttcggcacccgtctgccccgttaccgcactcgcaccggcatgttcgacgatatggtggcggcccaggttcgcaggctcggccaagcgtggccggaactgatacgtccgctccagttcgcggtggaggatgtgccgccttcggatccgacgccttggcagaccgagccgaatatgacgtcccagtgcttccccgccagccacggcattcccgcacgagtcgtgctctaccgtatgccgttgcagaccgaggcacctaccaagctcgaattgcagttggccgtcagggatgagctggtggctcgcatagcggaattgtatgggcgcaggcccgaggaaatcgaccccgattggggcctgtgacagtattgcgggggccgtgccacttcaagtaagacagtggcacggcccccgcagctatatcggcgccgaaacatcatcagaccgatgcttcggcgagcgcgctctacttgacgatggaggaatcgttccgagcccagacatggaccgtggcgggcatcagcgttgaagcgtcgatggcggacaatccggcgatgtccttgtcttgcaacgaatcgtgactgaaacgcgctccccagctcactttcttggatgagtcctccaacatcagcacgaccgcggtgccatgatcgccggaaagtttgccggtctcaatcgtttgcgccgcgttcgcatccagcgtgatttcctcggaggtcaccgaagcaccggcatcatcgtaggcgtgcaaggtgaccgtcctgcgcgcattggacgtattggccagcgtgatggaggcctttactccgtcgggaagggccaaccccgagaattcggatggctcgccggcattgaccaatgcgaaatcggcttggccggagtcaccggagcgtgtggccttgacggagaacgacacggcatcctctgcggtggacatcacgcccaacgccccatcaggagcctctcccaagtcgatcgccgtcaccttatcggcagtgacggtggcatctttggcgggaaccaatcctttgtcggtaatccatgacagcccggtgctggtgtctgccttggcgaacagataagcggtgaccgcatcgccggcagtgatggacggcgccaccgacgcattggaggcggtcggcagcggcagcgcgaaatcagaacccttcggtgtcagaccatccatggtcaccgtacgtaccacggacgcgataggagtctccttgctggaaacggtcacgaacagaccatgctgcccatcgaccgcggcggacagttccatcgaggactccccctcggccggcacagacagcgtggattgtgtggacaatgccattttcccggctgtctcggaaccccagacggcaatgtcgacggtggtcggcttggtggagggattcgagacgatgagctgctgtgtggtaccggtcgtgccgccggagagcaagaacgactggctgagcgaggtcgatacgcaggatgccgccgatacgcctctcacatcgccgtcatcggcccatgatgcgatggtgccgacggtgccggtgccagctgcggcctgcaacatacgggtattgatcaggcgagctccctgatcgatcttctgagcaccggttttcaccgaggaatcgtcggtcggatcggcgtctttcaaagtcacgtcatctgaactggacttttgcccgatcgccgagacagtggcgctgtagacggagccgaacgccgcgtagcgcgcctgtgtgctcagattgccgacagtggcctggaaggcgctgtcgccgtacgtgccggtatcggccaatcctataggtgccgggcagtaggtttcggactgggtcggactaactgtctggtcgatggcattatcggaagcggccaccttgtccacccagatattggggatgggggccatgacgagaacgacgaacagcgcaatcaacaccagcatggtgatcacaccgagcacgatgccgatcgcacgtttgaaaccagaagttgtgttgctcatgcctgctcctccaatccgtaggacggtcgtctgcgaggcatggcgaccaagcagtacaacgccgtgatcacacctaggcatatcagccaggcgtgcctccagacactatgctgtgcacgttgctgccatgaggtatccacctgctgtgaggtgctgctacgcagcgtcagacgatagtagctgccgctatccgtggagaccagggactgggtgccgttcgatgcggcgatattcgcgctcaactgttcatacggcatgtcgttcgaggaatcgccggtctcgggaaccacgtagatgccgccgaatccaagcgcgctgatggccgcgatggcctcttcgtcgggattggacagcagcgaggcacaggcctgggccagctgttcgtcaaccgcatcatgcttgccggacagcaggcgcgcccgctggaccggagagctgtcgatcagatcgccgcgcgaggtgcgcatcaccgcatagttgacgatgttgcgggtctccgcgctcacggcaagcacacgatgatcggcactggcctccagataatcggtggtgaccatgggcaggccgttttcggacacgcccagtcccgcatccttatgacgttcgatgccatacatgcattggatgccgatgcagcacaccagtatcagagcaagcaccacacggccagacacgatgagcgcatgcagacggtcccttttcggtgcgggatcgctgccggacgcatgcaacggttggaatcgcttcaccgccccaccggcgacgaggcacacgcaggcaaggaagcccaatatcatcatcgcgatgccaggctgtgcggaaccggccacgacgccatcggcatccacggctatggccacacggctggaaatcagggcgagcgcgcctccgcaaacgattaccacccacatcagccgcgaggtccgcaacgcgaacggcagcaccagcgaagcaagagcgagcagcgtgatgacgccgaacagcacagtgaccgccaaatcggcataatcggtcgatcccattcgccatcccagcgcacgctgtacggcctcaagcaggctcagcgacgccggcgacccgttggcggatgacgttggcactgtgatgtcgccgaacagttgacgccacatgcccaaatcggcgtaacgcaccgcattgacgagcgtaggggccaccgcaaaggcggcaggaaccggaataagcaacagcatggcgcgcttgcggcgcacgaacagcaggaacatcaggaacacgacgatcagcgcgaacagcagctgcggttcggcggccaccacagggatgaagcacagtgcggcgatggccgcggcctgaacggatgtgcgcggcttgagcgggtcttcggtatggtacatgcccacggcacggaacacgaatgcgaacgcggccggcaggaacaccattacggtgagcatcggcatattggcctgcgcataccagccgaacataatgccggtggatgcccacaacagtcctcccagcacacgaaccacgtccgagcgggtgaatacgcccgccagcgcccagaacgacaatgcgctcagcggcgcggccacaaacagtatcatcgccagagcggcggtcacatggccgagcgtgaccagcgaggccagcatcagcaccagcagccacggcgtgggcggcgcaggaatgccggtgccgctgccaaacacccatggcgtggtggcggactgcaccagttgagtgaagctggcaccggtggaaagcaacacatcggaatacaacgatccaccggagaatatcgaacggaacaccggccaatacatcaccacgatggccgcaaagcacaccagcgccatcaccacggctgcgctccagcgatatatggtgcgtgtccgcagatgggcacgttccagcggactgagcagcactctgccctgctgggattggaatgcatcccgacgatcatggaactgcttgatctgccgactgtcggcgaacaaaacctgcagggacgatgcggcgaccttcgactgtctggccaccagcctgcgcgatttcatgtttcccgcgatatcggccaaagccaaccatggcaggcacaattgcacccatgcttcatacggcttcttgccgaacatcatggctatggccatgccaaaactgcgaatcagcctccacagccagacgataatccaggacgacatggccaggtcagtgtacagatagcgctgttgggagcgatgcaccgtcatcgcatgattgaccgtgtgatcttccttaagcggctccccgcctcgcgtacgaatgccctcataccgtgcgcgacgatgtgatatctccgcttgcgggactaccaccacgcgtccgccgctcaggcagacacggcggcagaaatcgaccgattcgctgtaggtggtcagccaggcattgatgccccgcagtcgcgtgaattgcgacatggacaccagcgcgcccgccagcgacaccgcgaacacatcctgtcgcccgtcatactgctcctgatcgggttctccatcgaccaccagggaatgcacggcgtgtcggcctgcatacataccgacatcatgcaggtgggatccttcccaatcacactgtttgcacccgagcacgctggcacccggcgtattgcgccacgcctcaagcaatcgttcaaggcatgaggcatccgaggggcgggaatcatcatggagcaaccacaatgcgcggggagcgtcatccaaatcggcccgatccaacgcccggctgaccgcatcgccgaaggaacgcgcgcccttggccgaaacgatgtgaatggtcacatgcttggactgcggcacctccattaccggccccgatggcgagggaatgacctcgaacgaagtggttatcctcgaaccggcgcgcccggtcgcgtcggcgatgatgacgactcccggaagaacattctgcgtcaataccgaacgcaatgtagaccggaggaaacgcatatcctcctcaacggtgatcacagccgtaatgccggtatccacatcctgcctatgcgtatacggtcgagaagacatggcgtcggccaacgcctcatgaatatcgctattacctgtcggactcataaactcccagtgtacgcaccagacttgaagggggtgtgtgtggaactacgcctgctcccgatgctctcgcttatatcgacggcgttcgcgctcgctcatgccgccccaaataccgaatcgctcatcatggtcgatggcccatttcaggcattgttcacgcacttcgcatttggcgcacacacgtttggcatcacgggtcgagcctcccttttccgggaagaacgcctccggatcggtttgcgcgcacaacgccttgtgctgccaagatacatcgccatcaggtcggaatagtccccacaattcatgccatggctcttcggctgaatcgtcgaccacaccccacatgcgattctccttgcctattgagcttttcatacggactaaattacacacatgcaatttcgtttttgtcaaattctttctcgtgtcattacatcatttttatggaactgtgtgctatggcgcggacacgatgccctgatgccgttgcacatgatattgtgccgttcctgcgcaggaacaccatagcgcaggaacacccggcggatgctgtgtcaaagtgtcattcagacaatcgacagtttcaggaggggttatgacgcaggaaccaggtggggcggatccgcatatcaacccgccaagcttcattcctgcgggaaatcgacgcacccgaccttccgggcaggtgccacgctccttcgcccctgcccgcgcctcacgtcagtcaggtcaggctccatcggcccgtccgtccgtcacgggaaatgacatcgaagagcctcaaccgaacgccaacgccacggtaagcgccaacgtcacggacaacggcaggcggactccgcccagtttttctccgaaaaccggacgtgccacccgcagcacggctccggatgccgccgcaccgcgcagcattccgccgtcgcgagcgcggatgtcttccggctcatcccgcaacgccgtgcgcaatccgtcggatatgtcggtttcccggccctcatcgccagcagcaaacgtgtccacgaagttcagccatcttggccggccggcggcggcaacggcgaaaacggtaacggcacaccggccgcgcgccttgcgcatcatcttatgcgcgattgcggtactggtggcggcgttgattctttctgttttcggtgcctggcaatgggtggacagcaaactgaaccggagcgactggctgaccgacacccccaacacgccggcctcgacctggctgattcttggctccgacgagcgagacggttccaccgattacggcggcgtggacaatatctcaggcttcagaaccgatacgattctggtgctgatcaagcctaaaagcgggccgagttcgctgatttccattccccgcgattcgcttatgaacgtcgataaccagtacatgaaaatcaatgcggtggcgcagattgccggcaagaaagccttggtaagcaacgtcgagcagattaccggccagaaaatcgaccatgtggcgcagatcaagttcggcggtctgcagaacgtggtgaacgccttgggcggtatcgaactgtgctatgacgaggatgttcaagattcctattccggactgaactggaaggcgggatgccatacgacggatggttccactgcattgtccttctctcgtatgcgatacgccgacgcgcgaggagacttcggacgcaacgaacgccagcggcaggtcatctcggccatcgtcaaaaaggcttccagcagtgggaccctgaccaatccgtccaaagtcgtggcagtgtccaatgccgcgatgagcgcactcaccgtggatgaaaaaaccaacccttacacgttgctcaccatggcgttggcgttcaaaagcaccaccggctcgaatggcatctccggcagcgtgtactggtccgaccctgattattacgttgatggcgttggctcctcggtgctgcttgacgacgccaagaacaccgaactgttcaatcaacttgccgacggcacgcataaggccggcaccgtgggcaatctggcggaaggctgaccgacgctttcccggagcccatcggcttcatcgtcggcgtatgatcgccaccattgcctacaccgccaatcatgcacgggcaaaatgtcatgtggataactcggcaagctagaaccacataccttgattcggcttgcgctttcggcatgcgttcccccacgctggaagcatggcatcacagcagaacgattcgaagcgacattccgcccacacggcatccgccgtatcccgggcgaagcaccgtttgggcgcgccgccattgcgcgtccgcctgaccatgcttgccgcggcgtgcccgatgatcgcgcaggcattgatgatggtcatactgctgttgcacgggcaatggctgttcgccgccatgatcgcaccgggcatattcgcctgtctcgtgtccctgctgctggcgctccccccacctccgggcccggagaagacccccgccccgcaacaggcaacgatcgatatcggtatcacggacgatgccgatgcccgcgccgcagacctccgtcatgcgccgtcgcagccgatagaatcgctgctgcacttcgcacgcctgccatggcgcaccattgtgggccattggcttgaaccccttgaccttgcggtgccgatcggcatgaccggaagcgagccgctgaggctcgatctgaaccgtcaggggccgcatgctctggtggccggcaccactggttccggcaaatccgtgttgctgcaaagctggtgtctggcgctcgcctcgatgaacgggcctgagcatctgaatttcgtgtttttggatttcaaaggcggttccgcgttccgcaaactcgaacggttgccgcataccgtgggcagcgtatgcgatctggatctggcgcatgccgtacgcgcgttgcgtgcgctggaagccgaactgacacgccgtgaacagctgtccgccgctgtccatgcttccgatatccgtgatatggtcaatccgccaccgcgcctgatcgtggtcattgacgaattccatgccctgaaggaccagctcccggattatgtgaatcgtctggtgcgtattgcctcgctcggcaggtcactgggcatgtatctgatcgcctgtacgcagaatccgatgggtcaggtcagtgccgatatgaaggcgaatatgtccgtcagcatttgtttacgggttcgggaccgtctgcaatcatgcgagctgcttggtgatggtcgtgccgccgacctcagtccggcaatgcccggtgcggcgttctgcaacgattccgaacaggtgacggcattccgctgtgcaacggcgcgcgatatcgatgcggtatgccgccagatcgcgttcgcatcgcggttcgtcgggagcccgccgcagccgtccctgtttaccgcgccacttccccggcacgtaaaagaccggactgtggccaatcacgcaccgcaacgcattcgatttggacttgccgacgatggcatcaacctgcgagaagcgacggtatccctcaccggtggcaatatcggtgtcatcggcccgcaggggcgcggcaaaaccacgttgctgaaaacattggctcgacacgccagcatggctgatggcttggcggtacgtgtcagttccccgcatcgccgggtatggggatcgcaatggcttcgcaacggccgctgcacgccgtatgccagctcggatgcaccaccgcctccgcatatcgtgtggttcgtcgacgacgccgatgagttgttcgacccattccgcaccgacgagcaggcgctgtctttcacacatgcgttggccgatgagtccgtcagcgtggtattcgccgtcagcacgattcgcccgatacgtataccagagcattgcaataccagaatcgtgttcccgtgcggggaacgaacgtctgaccttatggccggagtccccgctcgcctattggatacgatgagtcatatcgatgccgacaacgcgggccgggccgtgctcatcgagggcacatcggcatgtctggtgcagtgcgcttcgtgaaaacttcggttttttctcggcgaaacctcttgaaaatcaccacggttcgtggttaccttggtactggacttaaggaacaacaccagccacggggcttttaagggaggcaagcaatgagcagcgcttttgattggcgagccaaggccgcatgtcgtgacaaggatccggaactcttcttcccggtgggcaacaccggtgcagcctatcagcagattgaggaggccaaggccgtgtgccgcacctgcaaggtgattgatgcatgcctgaagtgcgctctggacaccaatcaggattacggcgtgtggggcggcttgagcgaagatgagcgtcgtgcgctgaagcgccgcgccatgcgcgcccgccgttctcaggccatgcagatgcaaatctgatgttttgattatcgcttcgtcatactaggaaaccctcccacttgggagggtttccttatttttgggcttcgcatcactcatcctgagcggccctgagcttcatatcaagtaccacgcgggtgccgcctccgcggcgcggctcccaatgcacggaaccaccgaaatcattggtcacaaaggtgttgatgatctgcgtgcccaaaccagaaccggaagaacgagccaatcctccctgttcttcggagccgagaccggaaccgtcatcctcgaccaccacattgaggttcgggccggagcggcccacggaaatcgtgatatggccatccttgcggccttcgaacccatgctccaccgaattggtgatgagctcggtcagcacgagggacagcggcgtggcatcctgagcgggcatcatgccgaacttgcccatgtagttgatatcgatgtgctggtctttcatcgtggctaggtccacggccatgcgcagcaggttggcaatcaccttgtcgaagtcgacgacctcgtcggcggtctggctcaatccctcatgcaccatggcaatggtctgcacgcggcgttgcgcctcctgcaattccttcttgacctcatccgacttggtcttacgagcctgaagcctcagcaatgcggagacggcctgcaggttgttcttgacacgatggtgaatctcggaaatcgtagcgtccttggtctgcagctcctgctcacgacggcgcagctcggtgacgtcacggcatagcagaatcgctccgatacgaccgttgttgtcatataagggcagcgagcgtatcgagacggcggaacggttggcgttgagttcggagtcgaccgcggctttgcccgccagcaccaacggcagggtttccggaacggggtcgttctccttcaacagctgtgtgccgagttcgctgaggtaatggccaggcatggtggtcagcaggccgagacgcctaaagcagctgatggcgttcggggctgcgtatcgaaccacgccgtccatggtcaggatgatgaagccgtccgccacgcgagcgatatggcgctggctcatcaccgaatccttgtaggggaactggcctcgtggaatcatctcgtacagctgtttgcccgcgttaatgctttccgactcatatcgaccgttggattctcgtgtggccatattggtctcacgcacgaccaagcccaaggtcttgccattgtgccgaaccggcgcgtacacgttgcagacggtcgccttgcccacggttctcaataccgtggagcggaacaccacgctggagagcatggcggcgtccaattcgccgaccatgtcatccggcatgacgtttcccaccacgtcttccgcccgtagcgtcatcacggtggatgggcggcattgttcggccaccacgtatttgccgtcaccgttctgtaccagcagcagcaggtcggcaaagctcagatcggcgatcacctgccaatcggcaacgagatgatgcagccactcgcggtcctcgtcgtcgaagtcggggcgcgttgcaaggatgtgtgaaaaatcagccatgcccctatcatacgcagacacgtcgccgccattgcggcaagccacacgggcaagtatgacgactattacgacatcgcatcttcaataccgcaccaatcgcgttgcacggctgcccgccgttcaggcggtcatcgcctcatacacctgagaggacaatgcggcgatctgctgctgcgcggttcccgagaccactcccgaggtcataaccaccatcacataatcccgttctgttccgtccgcggccttgccccacaccacggcggcatcattttccacgccggccagttcaccggttttattggccacctgaatgccagacggtactccggcgggtattttggcgcgtcgcgtctgcccgagcaatacgtcaagcatggagcggctggcttcggcggaaaccagtttgcctcggtacaatgcagcgaggaatctgccgcaatcggaagccgacgtccagttctcggtgccggtcccgtctgtgccggcatcggacaacacccgcaactgcttggatgagctgaagccgtatcgggcggccgtaccagtcacccgttgcatgcctgtggccatgtcgccatcgccgaccatcaataccagctgattggtggcagcgttcgagctgacggtgatcatctggttgatcagcgaggtggtatcttgcccgcccgcggccaaggtgccggcatgttgcttatcgtacacggcaagcatcacgtacagtttgatatccgaagccgccaccatgggctggccgccgacgctcacggttttgcccgtggccagatcctcgacatacaccgaccaggtgcctccattgccggccacagctgccgtgaccgccgaggacacatctgacatccgcttctcttccgccaccgtggtcaggtcgggagcaggtgccgccttgcgctccaaggtgtcatgcacagggcgttgttcgtgtttcgatgacgccgttgacgacgatgccgacgctgttgccggtgagtccgatgccgaggcgacgggcgatgttttggcgtgcgatgcgccgagaccgttatgcgcgtacatccatccaccgacgccgattaccaaagcggcgatcagggcggcgatcaggatcaatcccacgacgctgcctgttgcacgcgtgtcgctactatgcttggtatgctgagccaccgtcactgccccaatgtcttgtcaacactggccagcacccggctcatcaggtccgcggccaccgactgcccctgatattgggtgacaacggccacggcggccttatgaccattggcttcgacgatggcgaagtaattccaggtgtcctggatgccttggcctcggtgggcatgcacgatcatgtcggacggaatggttacgccttcggaagcaatgtccacgttcatcaatgacgcgcctcccttggcgtccactgcggcgagcatgcgggccgcatcgcgggaggaaccgtaattctcataaccggcattgctggccgccacatcgccgaaatcgcggttgaacgaagtgcccttatacccatgcgaagatgcccacgaattgacgccgctccagccacctaccgccgcggccgccatattgccggcattgttgtccatggaacccatcatcgcgtttgcctgcgctttggcgttgtcatcgccattgtcctgggccgcaagatagaccggcagatagagaccggcagccacgaattgcttgccggactgcgacgtggtcgcgatggtggcgtcctctgaggaatcggcgtatgttccatcgatgaccatggcggagacggccacatcggaggacgagtatgaatccgcgatgtcagacaactggctggatgtgatcaccggagtggaaggcttcgacttctccgtcgagcttttcttggacgaatcgtcgctgttcttgtctttggcgctatcagacgtgttcttcttggccttggacttggcgtcagaggaatccgtcgtgccatcatcggcggaatccgacgcatcggacccggtcgactgtaccgatgtttgcgcctgcggctgagctccccacaatcccatgctatgggtgacgaacaagccgatgaccaacgccacgacgcaaatcagcgcgatgagcacaatcaccaccgctttggtgtgatcgccgccaggacgcccggcgggaggttcaggagaagcaggtgccgcagggccagcggtcatgggtcccggtgccatagaccccggcaccgcggaacccggtgccgttggcggcgcgacggcgggcaacggcgccgccggctgcttcaccagcgtcagcgcgttatcatcataggcaggggccgccggattggcctcgggctgctccaatgggcttccgcactgcgaacagaaggcatttccttgctcgttggcaaacccacactccgtgcaatacaccatcaccgaaccccttattgctgtgacgttctcatcttcggattccatagtatcgccaccattgggtgatagtgttcgtgtgagtcggtattgacaagcataaaagttacgctaacgtaggttacggcagcgtaagaagcgtatcgtcaactcgtgaaacgggggcatcaccatggcatcaacaaccgacgacgcggaaaagacgatgcatcacgacgctcataacagcgcgacgattgcagaggatgccaccatcgcatccaagcgtcaggcggctatcgaggcgcgcgaacaggcgttgcaggccaaggctgatgccgtacgggccaaggcccagttcaaggccgaggccattcgagccaaagccgaggagaaggcccggcacaagctcgccaaagcggagcaccgtgcgctgaaaatcgagggcattgcccctgcggaagtggaacgcaagattcgtctcgacgtgcacggacgaccaaagccgttgatgcgcggctggattcacgcgattgccgctcccctgtcattggcggcaggcatcgtgcttatatgcctggcacatggcgcgagtctgaagtgggcgtgtgccgtgttcatgacagcgtcgctgattctgttcaccaattcggcctgctaccatctgggcgattggagcccgcgcgtcaccgatgtgctgcggcgtatcgatcatgtcaacatcttcctgctcattgctggcacgtataccccggtttcgtttgcgctggaaccgttctggcgcaatgtgatcatcatatcgatgtgggcgtgcacggccatcgccatcgtgattcatgtgatctggatcaatgcaccacgctggctgtatacggtggtgtacatcatcttcggcatctacggcctggcttatatggtgatgttctggaattcgccgtatgcggggccagccgtggtggtgctgctgtgcgccggcggtgcctgctacatcctcggcgccatcgtctacgccttgcgcaagcccgacccttggcctcgcgtcttcggcttccatgagattttccactgcggaacggtggccggatatgcctgccatatggtggccatctacatggtgatcgtctcgctgtggcaataaacgctacgacatataagtatgcccccgcctacgggggcatactagtcacttataactcaggccagcggcttggcggccttgaccgtcacggacagctcgcggccgttcggtgcggtgtaggaaacgacgtcgcccaccttggcaccttcgatggccttgccaatcggggaatccggggtcatgatgtcgtagtcggtgccggccacgatgtcacggctgccgagcacgtaggtcatctcgttgccgttgagctcgatggtcaccacagagccctcgcccacggtgccttccggggcattctcgatgatcttggaatcgcgcagcttgacggtgagctcggtgatgcggccctcgttcttgctctgcgcctcacgggcggcctggtagccgccgttctcggacaagtcgccctcggcacgcgccacggcgatcttgtgcgcgatttcctcacgcagctcgccttcacgatgggcgagctcttccttcatcttgttgtatgcttcctgcgtcagcaggtagaccttgtcctcagccatatcgtcctcctgaaccgttgtcgatgctgaaacaattttcgttatttatgacaaaacgccggctatgaccccggcgttcgtcatgtgctgacctatggtcagcgggtggaaatgatgtcgatgacgaacaccagcgtgtcctcgccgccgatgccggcctgcgggatgccgcgggaaccgtagccgtattccggcggaatggaaaccaccagacgcgagcccacgttatgacccggcacggtctggtcccagcccttgatgacctgtcccacgccgatgccgaagctggcgggctgatgacggtcgaagctggagtcgaatggggtgtccttaccccacaccacgccgtggtagttcacggtgacggtgtcgccgcgacgcacgatcgggccgtcgccctcggtcagctccacaaccttgaggcccttcggggcttcgggcgccgggaactcgataacgggcgtggtgccgaattcggcgttcacctgaggcatctgatctgccattagtcctccttcaaagacacaatgcgccctaccttagcaccatcggcgaatcggcggtagtccttcatccctgtgcgatacgacacgctggccgtatacgtcaattccggtcatcatgctggtgaataccagacatgtcaatcagcattcgacgacattgacggcaagcccgcccttggaggtctccttgtatttggccatcatgtcttcaccggtctgcttcatggtttcgatggcctgatcgagggtcacgatgtgtgagccgtcgccgagcatggccatacgcacggcgttgatggcggtgttggcggccatggcgttgcgttcgatgcatggaatctgcaccagtccgcccaccggatcgcaagtcaggcccaagttgtgttcgatgccgatctcagcagcattctccacctgttccggcgtgccgcccatgactgcggcaagtccggccgccgccatcgaacaggccgagccgacttcgccctggcaaccgacttccgcaccggaaattgaggcgttgcgtttgaacaggtatccgatggcaccggcggtcagcagaaacgtgaccacgccctgttcattggcgttgtccacgaaatgccagtaatagtgaagcacggcgggaatgatgccggcggaaccgttggtcggagcggttacgatgcgcccgcctccggcattctcctcagagacggccaaggcgaagagatccacccatgcggcgtcggaagactcgagcacggcgtctttgcgccggctgtcgcggcgcagcacatcggaattcgaagcgagacgccgatacatcttcggcgcgcggcggggtacgtcaaggccaccgggcaatgtgggctccgccgaggtgcatccgtggtccacgcaggcgcgcataacacgccagatggcatcaatatcggatcggacctggatgcctgagcgtgaagcggtttcgttggcccatacaagttcggcgatgctgagatgatgttcccggcacaacgacaccagttcggcgcatgatgagaacgggtagggtgcctcgacgccgaaatcagtggatgatgattcgtccgcgtcggcaaaggaggtgccttccggaggacgttcatgaatgccgatcatcgggtcttcgggagcgcctttgcgcacgaatccgccgccgatggaataccagacctgttcgtcgaccaagcttgcggcggcgtcgaaagcctggaatcgcatgccattggggtgcgcggccatgcgcttccattgttcgaacaccacgtcgcggtcgtagtcgaaatggatgcgtttgaggccggcgaggttcagagtatcgtccaacgcgcaggtctcgcggatgcgcatcatgtggtcggtatccacggtggccggcagattgccttcgagcccggccatcgcagcacgatcggtgccgtggccgagaccggtcagcgccagagaaccgtaaagcgtgattttgacacgtgcggtgcgatcgaccaaatggtcggccagcaacgaggaggcaaaggcatgtgccgcgaccatcgggcctacggtgtgcgaggatgaaggtccgacgccgatggtgaacatgtcaagcacactgaacatttggctccttctcccctgctggttcggcatgccggtgtcaccaggcgtcatgccatcacgatatcgtattccagcctagcgcccggaatctttcgctttgcgcgatgatggccgcgcgcgtcgtgccggcgagcgataagtcagtcagtgagatagtgcggagaacatcataaccagtacgatgataccgatgatggccaatacgatctgcaccaccatcagcccgatggtcagtcccttcttggtggcgattttgggcgcgtacgcctgtgccaacaggaaggcgatgaagccgaacaccgcgtagttgacggtcagggccatcacatcgctgttcgacaacaccacgccgttcagcggctggttcagcgtgttcatcatcgtgctcatcacgaacatgccccacacgccgtagccgattaatccgacgacgccgtacagccatggcttgagtttgtcgttggcacgcagggtcagggcttcggcacaccacaacagggcgaagccgacgatgtaggtgaacgccacggcgatcagtatcacgatagtcgcccacggcaggagtgcggccacattgccgatcatggacagatagaatcccgagcaggcgatggcaccaacggtgagtgcagtgcccgcaatgacggcttgggcaagcatggtgggcagggcgccttgttcgactcgttcgacatcggtccagcgtgaagccatgtggattcctcgtttcatcaggtacatcgtcacaacgccacatagcctaacggccttttgtttcggccttataagctctccacatagtaagctgcgagcccctctgacgaggggagctgtcggcgaagccgactgggggagagaccgcggcacagccgcaaaaaacggcatcggccacaggccgatttcaaggtgcctccggtgggactcgaacccacaagccgaagcgatcgattttaagtcgactgcgtataccatttcgccacggaggccaacttttctattataagctatctcctgccctgagcattgcttgcgggttgctgcgcttcgtgcagccgtcgcggcatagccgctcccttcgcctacaaacagcccagtgggctgtttgtagcagccggtagcgatagcgtcgccggcgtcgcatataacgcaaacagcccaccgggctgtttgcttaacggctcagcccgctggaggcacttaccacttacgctattgagccagcaaccggcgaccataatcgagcacaatgccgtccagcagcccgtgttcgctggcgacgaacgaatcgatggcttcaccatgatcggccttggcggcttcgctgacacgcgccagcacacggctccagaccacagcgccgccgccgaccacatcgatacggccggggtggatggtcttgtattcgcggcgctcggcgcgcgtcatcctaaggaacttgtcgtccacggcataggcgtcttcaaggctcaaccgatgcccgtcgaccacggtgtgatcgtattctttcaatcccatagccaaggcggtcatcgtggtcaccgtgccggacacaccgatgatggtacgggccttgcctgcgtccacggtgcggaaggcctcatcgatatgctcgtcgatgtccgcaacggcctcatcgatctgcgcctgggtcggcggatcgttggtcagatgacgttcggtcatgcgcacggaaccgatgttcatggagaatgcgccctgaacctgggtggtgggcgcactgacgccgtcgccaccgatgaccagctcggtggacccgccgccgaggtcaaccaccagatagggggcgggcagatcgtcgcgattgaccacggaagtggcgccgaggaagctcaggtcggcttcttcagtgccgggaatgacttcggggcgcacgccgaggatacgttcgatctcatcctcgaactcctcacggttttccgcgtcacgagtggcggaggtggcaacgaaacgcaggccgtcgatgggatgctcggcaatcacaccggcgaattcccgagcagccgcataggcgcgttccaacgcttcgtcggcaaaacgatgggtcttgtccacatcctgaccaaggcggatcacacgcaggatgcgcggcaccacctcatgcatgccatcggcatcgacacgtgcgatcttcagtcgaatggagttcgtgccgcaatcaatgccggcgacggttacggattccttgctcattgccttctcctcgtatcccttagtgcgtatgaatgggctgttcgcggtggctcatctgttgatcaatcatccagcgtgcagcggcagacggtcggatcgaattcgtctttgacgcgttccagcaccaaatcgccaatggggttgacgcccggccccataaccaaggactgggccagcagggcatgcaggcacttgacgcgcaccggcatgccaccggccgaagtgccttcaatatgctcctcactgtcgccaagacggcctgccagttcgtgacggaatgccagatacagattatgggcctgctcatatgcggccttgagctcctcatcagcggccagcatatcgttgtattgctgcatcacgccggcggcctcgacatgggaggcggccttgacggcttccggaccggtcagatagcacgtggtggggaaaggaattccgccgggcaacaccggacgggtgattacggcaagtggcctaccgcagacgcatcgcgcccccacggcgaccatgccgcgcgggtatcggccgagctgacgctgcacctggtcgatgtcatggtcgttggcgggctcggcaagcatggtgtcgacaagggccttggccttggcggcgatatcgatggtcactgttgggttccctcccctgtgttttgctgggtgttctgatcggattgggtgttctggtctgacttatcggactgcttggatgagtcgttggatgacgagtcagaggaaccggaagtatcggatttgccggactcgctatcggtcacaggctcatcggcctttttgagcgagtaagacagttcgctgtaccatggcaggacttttttgttgctggtattggaatcttccgttttctgggattcgcgatcggagccagtcacggcttcgggatgcagcacacgcacggcctgttcgccggggaatacgaagccgaggcgttcacgggcctgggcggtgatgtaggccttgtcatcccaacgcttgatatcgttctccaactcctgcttttgggcgatcagcgaggcttcctcacgcttgaggccattgagctcggccaggttcagggcataagtgtggaaggtggagaccagctggatggtgccgagtgcgatgatgaacagggagacgaagaacgctatgggccccgccgacccttttttcctgacttgtgctttgccggttttgccaggtttgccggtacgggacgacttgctcatgtcacatgaaaatacccgccgcattcgacttgacgaacacgacgggtatcgagcttcagtggaaactcacgcctttacgggcgtttcagctcacttggccaagtacttcttgcaggccttgaaggcgctgtagccggcgtactgagcggtggagccgagctcctcctcgatctcgagcaggcggttgtacttggcaacacgctcgccacgggccggggcaccggtcttgatctggcgggtgttcttagcaacagccaggtcggagatggtggtgtccggggtctcgccggagcggtgggaaaccatggaggtgtagccgttggcggtggccagctcgatggcgtcgagggtctcggtgacggaaccgatctggttcagcttgaccagcagggagttggcggcgccgaggtcgatggccttctgcagacgagccgggttggtgaccagcaggtcgtcgccgacgaactgcagacgatcgccgaggcgagcggtgatggcagcccagtcttcccagccttcctcattgaacgggtcctcgatggagacgatcgggtactcgttgatgaggttctcgtagtagtcgagcatgtaggcggagtcgcgctcttcaccgtcgaagcggtacttgccggtctccttgttgtagaactcggaggaggcgacatccaggcagatgccgatctgcttgccaggctcgtagccggcggcggagatggcgtccatgatgtacttgagggagtcctcgttggacttcatcttcggggcgaagccaccctcgtcgccgaggccggtgttcaggccttccttcttcagaacgttcttcagggtgtggtaaacctcaacgccagcgcgcagagcctcggagtaggtgtcgaagccgtacggggagatcatgtactcctgaatgtcggtggcgaagtcagcgtgagcgccaccgttcatgatgttcatgttcgggaccggcaggatgtggccgttggtgccgccgatgtagcggtacagcggcaggccggcggactcggcggaagcgtacagagcagccagggagacacccaggatggcgttggcgcccagcttgcccttgttcggggtgccgtcgagctcgatcatcaggtcgtccagagcgcgctggtcagcagcgtccatgccgatgaccttcggagcgatgacctcgttcacggccttgaccgcgttaagaacgcctttgccgccgtagacggacttgtcgccatcgcgacgctcccaagcctcagcttcaccggtggaggcgccggacggaaccagacccttgccctgagcgccgtcttcggtctccaggtagacctcaacggtcgggttgccacgggaatccagaatctgacgcgcgtacacgctttcaattactgccacaactactccttaaaacggttgtgtatcttgaatgacattcttaagagtagtgcgatttgtggacgttgtgaacaacacgcccaaaatttagtgttagcgctcacaatgccgatgcgccgcctgattgcaaggcagtacggacgaaatcgctcagtcgacgtccttgccattgaggtagtcgatttcactgtcggacaatttcagttcgccggctttgaacgagtcctgaatctcctgcgggtttctggccgagggaatcgtgaacagatattggtattgcgcaagttcccacgcgagcgtgacgcgctggtaggagcagtcgtgggacttcgcgacttcgcggaaccggtcgaacagatgctcgttgaacgggtcaaggaatccaccgagcggcgaccagcagacgaaagccaaaccgagtttttcgcaggtctccaacgtgtgttcggggtcgcggtgaaccggggagaactggttctggacggccacgagacgatcgcccaaaatgttgtgggcggcttcgatgtccgcgttgtcgattctggagataccgaccgctttggccacaccttcgtccacgagctgcttgagtgcgcccatctggtcttcgtacggcacctgcggatcattgcagtgcgagtagagcagatcgagcgtatcgacaccgaggcggcgggctgattccttggcattggcgatcatggtttcgggtcgggcgtcggcctgccagccgtagttgccgttgccgtcaagcgtgcgcagccagccggttttggtggctacgagcacctgatctttggggccatgccacgagtgcagagcatcgcggaccagatattcgccatagcccatatcctccggttcgccggtgccgggtgcgctgggcagataataggaccaagccgtatccaaataacggactccggcatcgagcgcggcatggatggtctcgatcgcctgatcacggttggaggggcgcccctcgatggcgagcgccattgtgcccatgccgaggcggggaatctcatagccggcaagtgttgccgcgtgttggtttttcatcgttgtggcctccatgccaagtcatcgaggagttggttagtccagaggactacctggtcggagctcatggggccttggcccagggaaccggtgaacggggtgggtacgatgagctggtgggtgaccgggcggtattgggcgcctttgtaaatacggcccatacgcatctggatggattcgggcgggtcgatacggccgatccgcacgcggttggattgcgcgagaatctccgaaatgccgagcttgcgggccttgaacttcagacgggccacgtcgaacagggtctcgaattcgaccggcggcttgccgtaacggtcggtaagctcctcttccagatccttcaaatcggcctcgttgcgagcggaggcgagcttgcggtacgcttccagacgcagcttgtccgaatcgatgtactcgatcggaatcgacgcttcgatgggcaggtcgatggacacggccaccggctcgacgttctcttcgggctccttgtacttctccacggcttcggacaccatgcgtacgtacaggtcgaagcccacgccctcgatatggccggactgctcgtcgcccagaaggttaccggtgccgcgcaattccaagtccttcatggccacatcgaaaccggagccgagcgccgtgttctgcgcgatggtggcgagccggtcatgggactgctcggtcatcggcttggacgggtcgtacaggaagtaagcgtacgcgcgctcgcggccgcgaccgacgcggccacgcagctgatggagctggctcaagccgaaacggtcggcatggtcgacgatcagcgtgttcgcattggagatatcgagaccggtctcgatgatcgtggtgcacacgagcacgtcgatgtcgcgatgccagaagtcgcggatgatctggtcgagctgcttctcccccatcttgccgtgggcgatgccgacgtgcgcctcgggcaccagcgtgtggatcttgtcggcgatggacgagatatcctgcacacgattgtggacatagaacacctggccgcctcgcagcagttcgcggcgtacggctgcggtggcctgcgcatcctcgtaggcgcccacataggtcagcaccggcaaccggtcttcgggcggggtggcaagcgtggacatctcgcgaatgccggtcacggccatctccagcgtacgcgggataggcgtggcagacagggacagcacgtccacgttggtgcgcagggctttcagcgtctccttgtgttccacgccgaaacgctgctcctcatcgatgatgacgagtcccagatccttgaacttgattttcgggttcagcagcttgtgcgtgccgatgaccacgtccaccgtgccggtttccagaccctcgatggtctcgttgatctctttggtggtctggaatcggctcatggccgccacattgaccgggaaaccctcgaatcgttcgctgaacgtctcgtaatgctgctggacaagcagcgtggtgggcacgagcacggccacctgcttgccgtcctgcacggccttgaaggcggcacgcagtgcgatttcggttttgccgaagcccacgtcgccgcagatgaggcggtccatcggcacgggcttctccatgtcggatttgacctcgtcgatggtggtgagctggtcggcggtttcctgataggggaaggcatcttccagttccttctgccatggggtgtccgggctgaacgcgaagcccctggcgcgctggcgggcggagtacagcttgatcaggtcgtcggcgatctcgtggacgtgtttgcgggccttggccttggtggccgcccagtcggagccgccgagcttgttgagcttgggggcttcggcaccgatgtatttgctgacctggtcgagctggtcggtggggatgaacagtttgtccgccggggcgccgcgcttggaaggcgcatattcgatgaccaggtattcgcgagtggttttgttggcgccggtgccgatggtgcgctggcgcatttcgatgaaccggccaatgccgtgctgctcgtgcaccacgtaatcgccttttttgagttccaccaagtcgatggccttgcgccggcgtttcggcgttttggccacggccacggccgaagtgcggccggtcaggtcgcgttcggtgagcagggcgattttggcggctttgtccacgaagccgtcgatggcctgagagcggatgacgtcgaaattggcgatgccggtagtgttgatcgcgcgcctgagcctggccaaggtgccggccgcagcggcggtgatggtgacgtggaagccggcgtcgagcaggccttcgatgccttgggaggccttggcctcatcccctcggaattcggccgggttctgggcgtcgagctgcacatggccggtcagcgtggtgtccacgccgaaactggtgaggcgaatcaccggatgttcggagtattcgagggagctgatggtttccgcatagtcgaggaagctggctttgtcgaagctgatgggcgcgccggcgccgtggccggaagcggccacatgccagctggcggccaggaactcgttcgcggtttttgccaagtcttcggcggaacggcgcagtttctccgggtcgctcaggaggatcacggcgtgcttgggcagcatggagcccaccggttccagatggtccacgagtgcgggcatcagggattccatgccttcgaccggaatggcgttggcgatggattcgagcatgtcctcagcattgggaatcgaaccgaccaaggctttggcgcgggcgcgcacggcgtcggtcagctgcagttcacggcatgcggtggcccagatggtcttgaggccgtcgccgtaggtacgctggtcggaggcgtggaattccttgatggtgtcaatttcgtcgccgaagaattcgatacgcaccgggtgcggtgcggtgggcgggaacacgtcgaggatgcctccgcgcaccgcgaactcgccacggtccatgaccaggtccacgcgcgtgtaggcgttttcgatcagacgtttggcggcttcgtcgaggggcaggtcctcccccacggtgaacacgagcggctcgacgtcgcccagtccttggacgaccggctggatgagcgagcggatcggcatgacgagaatgcgaatcgggccgaacatcggatcggtatcgctcggatgcttgagtctgcggaacacggccatgcggctggccacggtgtccgcgcgcgggctcagacgctcgtgcggcagggtttcccaggcttcgagctgggcgatgtcgtccgggtcgccgtcataccaggagcgcagcgagcccacggtctcttcggcttcgcggccggaggccacgaccagcacgaccggcttgccgggtttgccggtcacaccctgcccgatggcggcggccaaagccgggcgcaagccttcggaaacaccggccagaacggaattgtcgatgtcgtccgaaacctcgatgtcaccagtggcgagtctaaggaaggtcttgtcctgttccagctcagacaggatgcctaccagtgagccgttgatcaggtccgggtgcgtcgcctcaccggccattgaacttctcctgggtcttggcaagaccgcggaagatgatgtcctcggcggcgtcggcaccgtcagccaggaattcgggcagctgcttgcgctggtccggaccgaatccgcccagcacccagttcaccgtgttgtcatgcgcgttcgcaccgcgcttggagtgaccgacgcccatgcgcacacgcgcgtatttcggcgtgccgagggaacggtcaatcgacttgatgccgttgtggccccctgcggagccgcctgccttgaccttgatacgaccgaattccaagtccatgtcatcgtgaatcaccacgatatggtcgggctcgatctggtaataggcgctaatggaagccaccgcattgccggaatcattcatataagtcagcggcttggccagaaagaacttgacggtgcggccgtccaggttcatcacgcttttaccgagcatggccagacctttgtggtcggcgaagttcaccgtccaacgttcggcgagcacgtcggcggtcatgaagcccatgttgtgccgcgtgtcctcatattttttgccggggttgcccagtcccgcaatcagccagaaatccgatgccataatccactcctcgtccgtcttcctatattcccgtatgcacgttctgtacgttccgtacgtcatgcgcgcgttcgcctcgcgcactggcccatgcccggccggattcaaccgtcaagattgtactcaacgccgccgtcaagccttggaatcggcaagcagcagggcacggcattgctcggcatccatcgatcggaccgatgaatggtgaaacgcttcgacgtcacgagtcacgatgacgtcggcgtcattgtcctcggcaacggcacggatgagcccgtcctcgaagtcgggctcatcggaccggtacgacatacacgcatggcgttccataagtggacggatgtcgaacaattccatcagtccaccgatatcgtctcgcgccgcccgctcctcgccataatgcttgcgcaacacgcaatacacgtcattcaatgacgataccggcgccatgatctcaatgtttggctgtgcaacggcttccatgagcaaatcaacacattgtttatggaaaggcgctcgtttgtcattgcacaaatcgagcagaatattcgtgtcaaacagcagtttcatcccgtcccccaaatcgttccatacgtgcctgcgcgagaatctcctcatccgaaagatcgccttccgcctccggcaaattccggtcggcgaaacgttgaatcaactcctgctttttcctacgctcccgctcctgaatcagggagagcgtcagacgctcgaattccggcagttcccccgtatccgcaaggtagtcggtcagatcacgaatcaggtccgaataggtgcgcccattacgcttaagcactttctccgcgtcgcgcttccgttcggcattgacgcgcgccgtcaccatggccatagtcatatcgcacctccttgtaataccagtattacaagagatggggacgagtgaatcgcgtctattaggcggtgccgccagcgaccttttcgcgctgtttgccgttgaggtaccagtaggccagcgccacgaacagggccgccgaggatattgccgagcgtggctgcggacaggttatagaggatgcccgacacgtcgagcgccgcgacgcccgccgcgtcggcgccgaaaccaaacgttttggcgaccaggcccatcggcaggaagaacatgttggccacgcagtgttcgaagcccatcgccacgaatccggcgatcggcagcaggatgcccagcaccttgtcggatacggagcgcgcggcgaatccgatgcgcacggccaggcagacgagcacgttgcacaggatgccgcacacgaacagcgtgtcccagcttggcgtcactttaacatcaactccggttggaaaaaatctcagtatgtagcattcggttctcaaataggagaaacatgcagcggcaatcaacaacttgtcgtttacgacgccaagcaagggaaacagctcagacagatgacgcttccctgcaatcggatgacatattgcgggacggcagcggattttgggcgttcttggcgtggcatcccgcaagcgttatcgcacgttatctgcatcgaatcataagaatggcagaattccaatgatttcgcaggaagagttgcgggacgcgagctatgtgcatcgtttgacgtgtgtggcatcccacgtgattgcgggataccacgtcaaaacggacgaaaatcgtgtgccgtcccgtagtttgccgttatctgggataagcgcgtccgatatatggcgttcgaggaaaagagctgatccgatacaactttttagtgttataggacaccggaatccatggagagcaagggtaaaccgcctcgggcctacaggtccaaataccagtaggacatgtcccgcatggtgccggtggagtcggtggcagcggcgggcatgaggccgaattgggtgaagccgaagcggcgcatgagggcaatggagccgacgttatcggcgaaaatgatgccacaggccttgcgcatgtggcgggcccgcgcctcggtgagcagcctgtcaagcatgaacgtgcccactcccctgccttgccatgccggatcgatgtaataggccaaatcggtgacgccgtcatacccggcacgatcgtagaacacggagagcgcaccgaagccgatgattgaaccgtcttccgattccacaacaaaaacgccgtagggcggcgtatgggattcgacccaggcgcggcgttggtcgagggtgcgcggggtgaggtcggcggtggccccacccgccaccaccgcagcgttgtagatgtcggtgatggcttggatgtcggattcgacggccggatggaaggtgtatggcatgaagttcctttgaatacgcaaatagcccgtccttatgataaggacgggctatgtcagttgaggtaaccgactcccttcagtcgccttcggcgatagctcccctcaccctgagggaagccaagttacttgtcgagctcgatggccttgttgagggcgtcttcaagctcctgctgcgccttgccgtaggcggtccagtcgccgttcttcatggcagactggctgtccttcatggcttgggcggcatcgttcaacgcctgctggagttcggggctgcggtcggaagacgagccggaatccgactttccgtccgtggtgccggactgaccaccattggtatcggaaccagattggtcaccggacacgttctcggcatcgcccgcggccgcaccggaattgccaccgaacacctgatccaaggcctcatccaacgtatccgcgaatccaacctgatcaccgaatgcgaccagcgtcttcttgagcaacgggaatgaggtcacgcccgaagacttgacgtacacgggctgcacgtacaccagtccgccaccgagcggcagggtgagcaggttgccgcgcaccacttgcgtgtcgccggattgcagcaggttcagttccttggatacatcggcgttggcgttgaagttgttctgcgcctggccggggcccggtacgttcgaatccttgggcagctcctgcaatcggatggtgccgtagttcgagcctatcttgcccttctcattgccggcatccgagtcgaccgacaggaagccggtcaggatctcacgggtggactggccagccggaatgtaggtggaggtcagcgagaacaccggttcctcggtgccaccggtctgcaaggtcaggtagtacggcggctgcaggatgtcctggtcctgctgggactgggattcggtcggatcgaccggcgtctgccagaagtcttcgcctgagtagtactggctggcagaggtcacgtggtacttggagagcagctcgcgctgtaccttgaacaggctttccgggtagcgcatgtggctcatcaggtcgccggagatatcggagagctggtggtactggccagggaagatcttctcccatgccttgatcaccggatcggattgatcccacacgtacaggtccacggaaccgtcgtaggcgtccacggtggccttgaccgagttgcggatgtagttggccttctgagagcccagggacgagaccgttgcggaagagacggtggtggaatccttggtggcggagccgaggtcggttatttgcgagtacgggtaggcgtcggaggtggtgtagccgtcgacgatccacttgacgcggccatcgaccacggccggatacacgcggccgtcaagcgtcaggtacggtgccaccttggccacgcgctccttgggggaacgatcgtagagaatctgtgattcgctggtcacacggtcggagaagagaatctgatcggagccgaagcggatcgcgtagagaatcctggagaacaggttgccgaccgaagggccgccgtcgcccttgaacgtggtcagagcaccttccgaaccggtcgggtagtcgaactcccaggcctgcgtgccttcaggggcaccgacaatcgagtattcggtggtgttcggcgagaagtagatgcgaggctcgtacttttcggattcggtgagcttgccctgggtggggatgccggattcgaagaattcgggctggccgtcggcggtcaccttgttgccgtaggcggccaccacgccgtaaccgtgggtgtacacggtgtggtcattgacccagttgcggttgtcattgccggccagatcgagctcgcgggcggcaatcacggtgtcctgggagacgccgtcaatctcgtacttgtcgaccgccagggtgtcggcgaaggtgtagtactgcttggactgctgcaactgtttgaacgtggggctgacgacctgcgggtcgagcagacggatctgcgcggtggtgtcggcctccttggccagagcgccctgctcacccttgtcggtcaccttgtattgctcggtcttgagcttgtcaagaccgtaggcggcgcgggtggcgtcgatgttgcgctggatgtaggtggattccatctcctgtgcgttcgggttgacgcggaagcgttgcaacagcaccggccatgccacggtgagcacaagacccaccacgaccacgacggcaatggaggtcaccggcacacgccaggccttgagcgcggcggaagcgcgcacgccgatggacgcctggccttcgagcgtgtgggagcgcatgagccagatgcccagcaccacgccgaggatggcggtcagcacggccatgatgaaggtgacggggatgttggcatgtacggcggtgtaggaggcaccggtgatgcgtgaaccctgcacggtgagctggtcgaagacgccaatcatctggcgcactgcccaagcgaacatgttgagcatcagccagatgccaagctggcgacggcaacgcttggtaatggagaacaggccgcgtccgttaaccggcatggtaatgcggataccgcccatcagcacatgcgtgaccacggaaaacacaaggcccacgcccagcagcatggccacggcggcgagcacgagcttcaggcccggcagcacgaacacgtagaagccgttgtccagaccgaactgcggatcggtggtgccgaacgactgcgcgttgaacatgagcagaatctcgctccagttcgcgttaaactgggaaccgaagatgacgccgacgatcagcgaaatcaccacggccacgcggcgagcggttttcgagctgacggatttgccgacctcgaccacatcgccgttaatgcgaatggtggaaccgtcggccgaatcagggcgtgctcgaatggccagccaggcggaaacgaagccggtcagggccatgagcagcgcgtaggccacccacagaccgattttcaccccgagctgggtccagaccacggactggaagccgagctggccgtaccacatcagatcggtgatgaatcgggacaggccgaagaacagaccgacgatgatggccaaggccagcaccacgccgatcagaatcttgctgccacggctggctcctgagccaccggacgctggcttacgggtgatacgcggattggccggaccacgtggagggcgggatgacccggaggggccagcgttggtgttgtgggccggaccgtccccatcggcctcgacatcgaggatgatcggatcgtcattgttcgcattgttgcgtcgtgaatcgccgccattgccgaacagtactgagaaaggatcgttaaaagacataactcaagcctatcgaaagggcgggaggtcggttatgccctgagcacagaatgaggcaacatcctgttctacgctctgttctacgcttgccggtatggacagacaacggccacaacatatgcgtccctcagcacacgccacacgccaacttcggcacaggagcattccaatcgtggcggcaatatgtgctttggcggtggtgttggccggtgtggcagtctacggatggcatgtcggatggttcgccaaatccacatcaaacggcaacaccaccactccccagacctcccagacgagtgcgttaccgcgcaccgacgttccttccccgaagaagaacgacgatccggcggcacaagcccaacgtgcggtatccgccatgacgcttgaggaacgtgtgggacagttagtgatggtgccgttgttcgccggttccgaaccctcctcgttggcttcaacaatcgccgacgagcacattggctcggccattctcattggcaattggaataccggcgtcgatacggtcaagaccgcgaccgcgcaactccaaggatatgcgccggccggcaatcgtctcatcatcgccaccgatcaggagggtggtcaggtacagcatctgactggtaccggtttcgacacaatgcccagtgccgttgagcagggcacaatgtccgctgacgcattgcgtcaatcggcaggcacgtggggttcgcaattagctgctgctggcataaatgtcgatttggcaccggtgctcggcacggtggtgggcgatcgtgcctcaaatgctccgattggcgcgctggatcgtgatttcggattggatgcggccggcaacgccgaacatggcatcgccgttattgaaggtttgcgagacgctcaagtcggtgcggcggtcaaacattatcctgggttgggcgcggtaagcggcaataccgacttcaccaccgaaggcattctggatacgaccaccacgttggacggggccgaggcaggtgcctttgaccaggcgattaccaaggccgatcctgcaatggtgatgatgtcgtcagccacgtatcaatccatcgacccgaataatccggcggtgttttcttctacgattatcgacggtcatattcgcaacgtcctgaagtacacgggcgtggtgatttcggattcgatgtctgccgaagcgttgagcagctacgatgtaagccaattgggagtaaatcttgtcgaggcggacggcgacatgtcctgcatcggtcagacggattatgtaaagccaattgtggacggcctcaacgaacgggcgaagtccgatccggctttcgcttcgaaggtgacggcggcggcgactcgcgtaatgacattgaaaatcaagatgggactggcctgaccgttcatccttgcactggcgaggattgatgcgcgctgattcgcgctaatcctcaccagccctcgtacaaatgcacactagtcctcgtacgaatcgtcagtcctcgtacgaatacagaccatgcttgccgatgtattgcaccacgccgtcgggcaccagataccagaccggctcgtcgtgttcggcgcggcggcgtacatcggtcgaggagatggccaaggccgggatctcaagcgtatcgaccttgccttcgggcaaggtcacgccgtccgggctggagtagccggggcgcgtgacggccacgaagtgagcgaggtcccacatgaggtcggcgtccttccactgcatgatttcggccacggcgtctgcgccggtgatgaagaacagctcggcgtcgggatgttgggcgcggatatcgcgcagagtgtcgatggtgtaggtgacgcccggacggtcgatgtcgacacgcgagacggtgaatttggggttggatgcggtggcgattacagtcatcagataccgatcctcggcgttggtgacgtgcttgtccagcttgaacacaggtcggccggtgggcacgaaaatcacctcatcgaggtcatacacccaggcgacttcagaggcggcgaccaagtggccgttgtggatcgggtcgaacgtgccgcccatgatgccgacgcgcaggcgtgtatgccagttgccgcgtgcggaaagcctgcctttgccgtggctgctggccccggccggtacggacaggtcggacatgcgccgttcggtttcgccttgggtgacggcaatgatttcggcgggctcggcggattccactgttttttcggactgaactgacgcagccgttttgtggctgccggtaacaccactcatgcctggccgccctcaccggcggcgtcatcggctgattcggtttcctcttcgatttcgccggcggagggattgtcttccttgggatcgatcttgcccatgtcttcatcccattcgtcttggaccacgcgacgaatctcggcgaaggtgggcagcgggaagtccggctggtagaggcggcggacctcggccacgcgctcggtgatgcggatgagcgtgtcggtcatgccgtcgaggtcgccgtcgtgctccatctggctgtatttgccgatgtagccttccatgagttccatgtgttcgcgcacgatcttgagctgggcatcgttgaggtccacgacttcgggtgaatcggtctcgggccagccgatgagcacggcgtccgcgtattcgagcgacgcacgctgggcggcggaggcgatgccgtcctcaatctgcacgaggaacacatagcggacgatgctgagccgttcggccgcgatcttcaggccgagcttgggatcgttgaggtcgatgtcgggccgcagttcgcttgccttgtttgccgtgtcagccgtagtgttcatgttgccgtcctcgttcatgcgcgcacctggcctgttccgtaaccgatccacttggtggtggtcatctcccgcaatcccatgggaccgcgtgcgtgcatcttctgcgtagaaatgccaagctcagcaccaaagccaaacacgccgccatcggtgaagcgagtggaggcgttgaccatgaccacggccgagtcgatgcgcttggcgaattcctcgatggccgcataatcctcggcgatgatggattcggtgtggcccgtggaatgcgtgttgatgtggtcgatggccgcgcccagatccggcaccaccttgatgcccatcttgagggccagatattcagtgtcccaatcctcctcggtggcgcggttgaggtcaaggccctcgatcgccgcgccggagatgatgtcatacgacgtggtgtcggcctgcagtacaacgttcgcctcggccagagcggcggcgatctgcggcaggaattcggcggcgacatccttatggaccaatagcttctcggcggcattgcacacacccacgcgctgggttttggcgttgatgatgatcaggatggccttggcgagatcaccggacttgtcgatgtagatatgcacgttgccggcaccggtttcgatgaccggcactttggagttgcgcacgacggcttggatcagacccgctcctcctcgcggcacgagcacgtcgatatggcctcgcgcctccatcatggcggtggcaccggcgcgtccgtactggtcgacggactgcaccagtgcggattcgaaaccgtgtgcttcaagcaccggggcgatgacgcccagcgtggcagcattggtgcgttcggcggcgtgaccgcctcgcagcaacgcggcattgccagatttaaggcacaggctggccacgtccacagtgacgttcggccgggcctcataaatcatgccgatgacgcccatcggtacgcgcgtctgggtaaggcgcagaccgttgggcagattgtatccgcgcacgatttcgccgaccggatcaggcaaggtggccacatgacgcacgccttgggcggcggcggccacgcgcggcacgtcgaacagcaggcggtcaagcttgcccgcatccatgccgttttccttggattcgagcatgtccagcgcgttggcggcttcgatgtccgcggcatgcccgtccaacgcatccgcaatggcgagcagcagttcgtttttggcttcggtatttgcctgtgcaagacgctcctgtgcgcgtgcggcctgatcggcctggcggcacaccgcgtcgaacacctcaggactcaattcatcgctcataacagtcaagcgtaactcacaacgcggctgattgcttactccgacccgcttgttatgggatgtctgacgttttgaatcgcaaacagaaccggctcccctccatctcaggcgggaagccggtgatgcgatgcgctccggtcagcgaatcatcactaaccggtgcaccacggtggattagcgaatcagcaaatcagtggatctggtccaggtcggggtagagcgggaagtcttcggcgagcttgtcgacgcgggccttcagcgcggtcacgtcggcggacgggccggcggcgagcgcggtgccgatgatgtcggccacctcctcatattccttcgggccgaaaccgcgcgtggccagggcggacgtgccgattctcaggcccgaggccaccgaggccgggcgcgggtcgaagggcacggtgttgcggttgatggtgatgccgcaggcggcgagcagatcctcgccctgctgcccgtccatctcgctgttgcgcaggtcgaccatcaccaggtgcacgtcagtgccgccggtcagcacgctgatgccgttggccttgacatcgtcggccaggagacgttcagcgagaatcttggcgccgtcgagcgtgcgctgcatacggtccttgaattcgggggtgccggccaccttgaagctcacggccttgcccgcgatcacgtgcatgagcggaccgccctgctggccggggaacacggaggagttgagtttcttggcgtattcctgcttggcgagaatgaaaccggaacgcggaccgccgaaggtcttgtgcgaggtggaagagaccacgtcggcgtatggcacggggctcgggtgcaggcctgcggccacgagtccggcgaagtgggccatgtcgacccagaatttggcgccgacctcgtcggcgatctccttcatggccttgaagtcctcgatgcgcgggtaggcggaccagccgccgatgatcatggccgggtgggtttcgagcgcgcgctggcggatgatttccggatcgatgcggaaggtcacggggttcacgccgtacgcctcggcgtggtagaaacggccggagaagttgattttcatgccgtgggtcaggtggccgccgtggtcgagggccaggccgagcacggtgtcgccgggcttgacgagcgcctggtagacggcggcgttggcttgggcaccggagtgcggctggacgttggcgtattcggcgccgaacagggccttggcgcgttcgcgggcgatggtttcgacttggtccacgtattcgcagccgccatagtagcggcggccggggtagccttcggcgtatttgttggtcagcacggagccctggcattgcagtaccgctcgcggcacgaagttctcagaggcgatcatctcaaggccattgcgttggcggcccagttcgaagtccagcagttcggcgatctcaggatcggtttcgcagatcggcgcgttgaaagcatcggtcgctttctgcgcaaggggtgaagcggtcatgggtgctcctttggtatgggcgacaattgattcgccgttgccgccttactgtatggccggtttgtagccggcctgtttcatgatatggccggtccccgttcgatggcaatggtgattttcgccggtttgaccggtcggctacgcgagacggacggcccttctgcccacggcccacgctaaactggtgtggattcatcatccctttcaggcagaaggattcatcgtgacaaccaccttccattccacccgcagcaccaccgattcgctgaccgccaagcaggcgattcgtaagggcatcgccgatgacggcggcctgttcgtttcggacgcgttgggcaagaccaaggtggacgtggcctccctgccgggcaagtcgtaccagcagatcgccgccgaggtgctgggcgcgctgctgccggacttcacggccgaggagctgggccagtgcatcgccgactcctacggcgaacagtggtccgatgagcgcatcaccccactcaagcccctgggtgacgattacgtgctcgaactgttcaacggtccgacttccgcgttcaaggacgtggcgctgcagatcctgccgcgcttcatggcgcacaccacgccggccgatggcgacgcggacgagaagatcatgatcctcaccgccacctccggcgacaccggcaaggccgcgctggccggcttcgcggacgccccgggcaccgcgatcaccgtcttctacccggaaggcaaggtctcccaggtccaggaactgcagatgaccacgcaggccggctccaacgtgcaggtggccgccgtggaaggcaacttcgacgacgcccagtccgcggtcaagcgcatcttcggcgaccgtgccctggccgagcgtctcgccggcaattcgcacgtggtgctttcctccgccaactccatcaacgtgggccgtctggtgccgcaggtcgtctactacttctccgcttacgcccagctgctcgccgaccaggtgatcaacgtcggcgatgaggtcgagttcgtggtcccgaccggcaacttcggcgatatcctcgccggctactatgccaagctgctcggtctgccggtcaagcacctcgtggtggcttccgacaagaacaacgtgctgttcgacttcctgaccaccggtacctacaaccgccagcgcccgttcttccagaccatctccccctcgatggacatcctcatctcctccaacctggagcgcatgctgtactacttgtccgagggcgacacccgtctgatctccatgctgatgaacgacctcaacaagtggggcacgtacgagatcccggaagaactgctggccaagattcgtcagatcttcggcaccggttgggccgatgaggatcaggtacgcgagtccatcaagcactgctgggacgagaaccactacgtgatcgacccgcacaccgcctgcggctactacctgcttgagcagatgccgcgagacccgctgaccccgcgcgtgctgctctccaccgccagcccctacaagttcccgcgcgtggtgaacgaggcattgggcttcgacgccaccggcaccgacttcgagtgcatggatgtgctggcccacgagaccggcaccaccgccccggccgccctgcgtggtcttgagaccgccgacgtgcggttcaaggacgtcgtggccatcgacggcatggaggactacgtggagaaggccgcccaggcgctgtaaaacataccagcacattggctcccctcagagcggggagccattttttacatcagaattgcgtttacatcagtatcgcggcgactggcagtcctatggcgattgccaacagcacgatagtgccgatgatcacgctggggcgtgcgaggttgacggtccagccgacgccgaaacgtttggggatcatgatggcaggatcgtcacggttgatgtagatgatgccgccaatccagtgcaggtcatcgtcatacggcatggcattatcgtccgaaatgtcaccgccgtcactgtgccgaacaccggcatagacgcgcgccccgttctgcccgtaatacacgccgatcatcagcgcgccgaccagagccgccacggcgatgaacatgccgatgatgccgattagattgatatccagcacgccaatggtgacaagctgaacgcctaggcccaatccaccggctgccagcagtccgatgaccagcacgtagatgctccagacccgcgagaacacaccataggcatacccggtggcggcggggtggtcgggatcaatcgggtgcttggcgtagatgatcgcggcatggctggccaccatcaccgctgccagcaccacctgcgcgagcacggcgtaccaaatcaccatcggactcttctcggcccaaccgttcacattgccggcgatatccgcatgaatcggcacccgctccggcatccggtcatagcccagcaacccgacagcaatggtgacagcgagacaaacgacttgcagcaattcccacttcaagctcatcgggtcgggattgtcccgctcacctatcaatgctgcacggcgggcactggacgcctcccatccctgatcgactttgatggatagtactttgcggcgaaacatctgctgcagcacgaaaccacatatcgcaatcgccaccgctgcgatggacacagtccagaacgccgcgtcgactccgcagagttgccaaacggccagcgagaccagtatggcgcatacgccaagcgccaccgtaattcccgaaaacgcgactttaaatccgcgaatgcgcgtattgacatgggcggcggccggcactgtgacaccgaacacctcatgccggtcggtaacccatggaacccctgccaggccggcggtcactatcaccggcaacagtaaaaacgcacacaacgcgatgttcatcgacacgactgtattattcatcgttatctcccctgatttccttttgttgcaccgtcagtaacgctctgcgaggagcgcacgccgtatgcccgttcgcattgccgtttggtggcatcgaggaatgcggccgaatcaccgccgcgcgccctgtaggccaaggcaaggcgatagagttcctcgcccatccgctcatcctgtgcttcggcagttcggttcggtgcttctcccccgccgtcatgctcggcgacggttgcaccggcaccacgacgcataacgatgtatccctcgtcacgcaacagcgcataggccttgttcaccgtgtgcaggttgatgccaaggtccacggccagcgagcgcacggacggtaacgagtcacctggcgacagctcatcgcccgcgatggctgcgatgagctgcctgtgcagctgctcgtaaatcggcacgtcactgcgctgatcgatttccacaatcacggtcaattccacccctctcaagaactgttctatttgttctacatcaaatataacagttttgccgtatgagtcaagatatgcgaatctcggttgaacatccggcaatgggccaacggcgtgttgcttgaattttctaggaaggcgggaatcgccatgctgccggcgaatgggaaaatccatgtggcttgtcagattctgttcctgcaactgaatagtcccatgagggagtagacagcattgcggcgaagggctcggcccaaaccgcaataaagcgtgccgagcgccaaagccgccaacaccggtatgacgccgctgcaggagaagctcgcgaagctggacgaacttcatgggcggcaccgccgaacagcagtcgaccattctgttcacgctgttcgtggtattccagctgttcagcagtcgaccattctgttcacgctgttcgtagtattccagctgttcaacgccttcaacagccgcgagctgggcaacgccagcctgttcgccaatctgctacgcaataaggtgatgatcggcgtgttcgcgctgatgttcgcacttcaggtgctggtggtgcagttcggcggagcgatgttccgcaccgtgccgctgccgatcgacatgtggctgaagatcatcgcggtcggacagatgcgcggttagagttctttggctcggtagatgcggatggctataagcatggagccaaaatatgcgagcagacacaacacggcgagaacaagcgccgtatgccaccagatcgtcaggaaatcggcaatattcagcaatagccattgccagtcaacaggcaatcgggccagcagcgcaatgactgcatacaagccgacaatgaccgcgccagaggccatcatcatcttgcgggaggtgaaccggtatgcacaggccagcagcaccgacccaagaatgatagccaaagcgaagatggaagcacctgctgccaaggtaccaatccaccccatatctgctatatcgccaaagacaatgaagacgccgccgcatatcaccacgtccaaagcccagagcaggccaaccaccaacagaaaaaggtaccgacctacaacttgtgcagtgcgtgaaacaggaatcagccctcgcatggcactgtgccctgcagattcctcggatgacgcaggccccaatgcactcatacatgccatcaccgatgccagacctccgagtccgcccatcagaccactggcaacgtgttcatcgacgtgggtcgatatcatcaccagcgataccacgatagacagcaccgggaaaaccagcagaaataccatattcgctacgctaaacagacctgtcccaacacaatcgaatcgacattgctttactacggatttccagctcatcgtcaccattcccttgaagcaaatatgcgagaggcaattacatacgagattccatatgccacaaccgtcgttgccaataccgcaataaccagccacaatcgttgcgcgatgatggcattcgcggcatgggccaatcctttggtcaccgaagcaggcaaaatagatagcagtatgaatccagccaatacaacgacataaatcaccatcatcgtgacttgaagaccgcctagtttggtccacagataacccgtgggcacgataagcgcgaccatcagcgcggtgcagaaacctcccaacggagccgcccacagattgcccgcgaatgaccaatccggattgaccagcacttgcaacccgtcaatcagaacaatcatcgctatcgacaatacggaaatcaccaatccaaccacatatcgcgcggccacctgactcttcctcgaagccggaataatgccacgaagtcgatatccgttctgtaagtcagcaaccgccatggtcagcacccacatggcgcaggtgaataccgtcatgatgacacccatgcgatagccgaagccatc

SEQ ID NO: 100 - DNA, 20750 bp, Unknown
  R206_24m  MAG No. k141_18825
aactggcaatcattgactataaagaagtagtacaaacacgctcttgagttctcaaaccaccaccacaccagcaagacaggaaaccaaccagaagaaggaacccgccgcgccgagcggcaacaggtgaataacttacacgcatgtttggattcgcgcaaatcgaggcgcgcaaaagccgaaggaatcgttgcaatcacacggttccttcagcgtgtcgcaaacagcctatttgcgctgttctgataccagaataatccgttttgcattgccgatgcgtaacaaattcatgcgttcaccggcatgttgcaagaattcgattgcgtgaccatccaggttcaccttctcgcaaccggtcatcgcatatgcaaaaagggacttccctttatgggaagtccctttcagtagctattgaagctcgctagcctcaggccagggtgttcgggtcaaccggaacgcccgggttcatcgtggaggtgatggtcgccttggtcaggtaacggcccttcacggtggacggcttcagacgcttgacttcgtcggccacagccttgaagttctcgtccagagcggactcatcgaagctcatcttaccgatgaggaagctcaggttgccgttcttgtcgacacggaactcgatcttgccgcccttgatgtccttgacagccttggtgacatccatggtcacggtgccggtcttggggttcggcatcaggccacgcggaccgagcacacggcccagacggccgaccttgcccatcatgtccggagtagcaaccacggcgtcgaagtcgaggaagccgccctgaacctttgcgatcaggtcgtcatcaccgacgatgtcggcgccagcctcggtggcctcggtggccttcgggccacgggcgaacacgaggaccttggcggtcttaccagtgccgtgaggcaggttgacggtaccgcgcacgagctggtcggccttacgcgggtcaacgctcagacggaacacggcctcgacggtctggtcgaagttgtaggcaggcatgctcttgagcagagcgatggcctcgttggcggtgtagaggttgttgcgatcgacgcgctcagcggcttcgcggtacttcttggaacgctttaccatctgtccttctccttatcagtccgtaaccgtgatgcccatcgagcgagcggtgccctcgatgatcttcatgccggcctcgatatcgcgagcagacagatcttccatcttggtctcagcgatttcgcgaacctgcgccttggtgacagagccgaccttgtgggtcagcgggttctcggtacccttctcaatgccagcagccttcttcagcagagctgcagccggcggggtcttgagaacgaaggtgaaggaacgatcttcgtaaacggtgatctcgacagggatgacctgacccatcttgtcctgcgtctgggcattgtatgccttgcagaagtccatgatgttcacgccatgcgaacccagagccgggcccagcggcggggccgggttggccttgccagcctggatctggagcttgatcagcgccgagactttcttcttgggagccatattatggttcttctttctataacgcggttcgaatggtcgccgtcctcagatccgcttgcctgctatcacgctcggtcttgactcgttatttatccgtgcatgctgtaggcaatcggcctatggtcggtctcctcccgcaacttatattgctgtgctgtgctagcgggtcttccctccagacacaagctttcctattatgcaaatccacccggacaacgcaaaaagcccgaccacgatggtcgggctctgcaaagtttggggttaatccagcttctgaacctggtggaagccaagctccaccggcgtatcgcggccgaagatggacacgagcacggtgagcttttgggtggtgggctccacgtcggaaacaacggcggccatggtggcgaaaggtccatcggtgacggtgacctgatcaccaacggcgtaggagacttcgaccttgcgcttcttggcggcggcaggcttgtcgccagcggccttgagtgcctcggaagcgatcatcggagccatcattgccacgacttccttgcgggagagcggggctggatccttggtcgggccgacgaagccggtcacgccttcggtttcgcgaacgatacgacgagcgttctcatccggccacatacgaatcagcacatagccaggaacacgtacgcgggtgatgatcttcttacccttttcggtgtgcttctcgacttcttccatcggcacctcgacctggaagatctgatcttccatgccgaaggaggcgacgcgggactcgatgttggtcttcacgcgcttctcatagccagagtaggtgtgcagcacataccacttgccatcaagggaacgcagggacttggagaattcgtcaacggcctgctgaccggcatcggtttcctcggcctgctcggattcgttgacttcttcctcgtcctcatccagagaaacggtctcggtctgagtggaagcaacgggagcggattcagtcgcggccggagcggcggactcaacatctgcattgtcgacggatgcgtcagattctgcggaaaggtcagcaaccggttcagccggggcagctgcctcatcggcagcagcttcggaagcctcgacaacaggctcctcagccggcacggcgtcgagattctcgagattcagttcatcactcatgcgttgttattcaccttaggttgtgcggatcagccgaacacccacagcacgagcttgcccagaccgaagtccatgcccgtgacgagggccatcagcagcagcacgaagataaacacagccagagaccagaagaacagttccttggcagtaggggttacgaccttgcgaagctcgtcgatgatctgcttgataaacagaccgatacgcatgaagacattcggcttgactaccttttcgctgttgttcgtcttagccattctgtacctcgcgtcagctgcttgattattgaaaacttggcagggaaggcgggactcgaacccacaacctacggttttggagaccgttgcgctaccaattgcgccacttccctaggtgaaaatccacctcggcgtgcattccgtaaagaacgcttcgccacggcgaaaccgccaagttgttatagtaacggctccggtggattatcgcaaatcgcgtgtcgcgcgcgtggcatgtgcgcggcacacgactcttctcagttagcccattccttgaatcgacgcatgccttcggctaggtcttcgtcggccagtgcgtaggagaaacgcaggtaaccgggagcaccgaaggcctcaccagggacggcggccacgtgggcctcatccaacagtgcggcggcaaaatcagcggacgtatcggacacagtgccgttgggccccagcggcttgccaagcaaagcggtgatgtccgcaaaagcgtagaacgcaccggtcggagtcgggcagttaacgccctcaatatcgttcagagcagccacgatcgcgcggcgacgtgcatcgaacgccttgcgcatctcatgcacctcgtccagcgggccagccacggcggccagagccgcacgctgggagatgttggccacattggaggtcatatgcccctgcagcttggtggcggccttggccacctcaagcggcgcgaccatccagcccacgcgccagccaggcatcgcataggtcttggccacgccgttcagcaccagcagctgcccgcggcattccggcacggcggcaccaatgtaggtggtgcgcgcgtcgtcgtagttcaggtgctcgtagatctcgtcggagataacccagatgtggtgctcgacggcccaacgaccgatcgcttccacggtttccggcttccagacggctccggtcgggttgttcggggagttgacgatgattgccttcgtacgctcggtacgggccgcttccagtgcctcaagcgagggctcgaagttcacgtcggcaccggcgaatacttcgaccggcacgccacccgccaatttgacggcttcaggatagctggtccagtacggagcggggatgatgacctcatcgccatcgttgagcaagatctggaaggattcatacacggcctgcttgccaccgttggtcaccacaacctggtcggcggacacctcgtagccggaatcgcgcagcaccttagccgcaatcgcttcgcgcagctcgggcaggcccggcgtaggcgtgtacttgtaattctttgggtcaaggcaggcatctgccgcagccttgaccacgtttgcgggggtcgggaaattcggttcacctgcgccgaagccgataacgtcaagtccggcggccttcatggccttggccttggaatcgacggcgagcgtagcgctcggtgccacagtgttgatacggtcggaaagagtctgccattgcgccatagtcatggcttccatgctaaacctacagcacgaaaaatcgccagagccgcactatggtgatgggatctgtcgtgtgacagatcccatcagtcacacaagtacaagattgtcgcgatgaaccagtgggtgggcgtactgggggccgaggaaacgcttgagttgggcggtgttacgcccgagcatctgcggaatttcttcggaatcgaagccggcgaggcctcgggccaggtgttcgccgctttcggcatcgatccagaccggatcgccggcggaaaaatcgccatgcacttcgagcgcgccggccgccagcagcgaggcacgcccgccgcgaatcgcctggccggcacccgcatcgaccacaatagtgccgcgcgggtcggcggcgaagccaatccacagacgacgcgacgaaccgcgggccttaaccggtgcgaacacggtgcccaccggatcgcccatcatcgcagggcccgcgttcgaggcgcaagtgagcaccgtggggatgccggagacggccgccacgcgcgcggcctcaagcttggtgaccatgccgccggtgccgaccttggagccggagccggaaacctggatgtcgccaaatgcatcgataacgttgggcacatattccacacggcgggagccgggctgggaaggcggtgccgtgtatagcgcgtccacgtcggtaagcaataccaaagcttccgcgcgaactaggttcgcaaccaatgcggacagacggtcgttatcgccgaaacgaatctcgttggacgccagcgaatcgttttcgttgataatcggcaccacgccgaggtcgagcagacggtccagcgtgcgttccacattgcggtactgggtggcacgaatcgtgtcttcagcggtaatcagaatctggcctacgcgaataccgaaacggccaaaagcagtctcgtagcgagccatgagcaaaccttggccgaccgctgcggtggcctgctgagtagccacgtcggccgggcgttcgtcaaagcccagcgggccgaagccggccgcaatagcaccagaggaaaccagtaccacacgcccgcccatcagtcgtatctgggcaagggcggcggccagagcgtcgagcttgtccgggtcgaggtgaccgctcggctgggtcagcgagctggagccgactttcacgacaatggttccggctgctgcgaccatgcgccgtacctcggcctgactcggagtgctcatttattcctcggtttcaccatcttcgctggactcaccgtggccgaacagactggtttcgtcatggcgatcgtcgtcaacggtcgggtcggcccagtggccggccttgcgttcggccatcatcgcgtcgcgcacggcggcacgggcgtccatcatctcgtggtattgggcacgacgttcggcgttggagcggcggtgcgtgcgcgggtcctgttcctcaagacgcagatccttgcctcgggcaccgaggttggagccgtcgagcatttcggcaccggcggatatggtcggatcccaatcgaattcgaccatacgggcaccacgaccgatgcgcacttcgtcaccagggtgggcacccttgcggcgcagctcgtcctccacgcccagcttggccaagcggtcggccagatagcccacggcctcgtcgttgtcgaagttggtctgcatgacccagcgctccggcttgacgccacgcacctcgaagaacacttcgccattgccgagttcgcggcgctcgaccgtgaactcaagcgcactgccgccctcatcagcgcgacgcggacggcggcccttggtctccaatggcttgatgaccacgcgcgtctcctcttcggcctgctcgcggttggccacttcctcacgcatctcatgcaccagcgcagacaacgcgaagttgagctccttcagcccctcatgagaggcggtggagatctcaaagaccttcagcccgagtttctcgaactccggacgcacgaactcggccaattccttggcctcgggcacatcgatcttgttcaggatcacgatgcgcgggcgttcgggaatcgggatggcgcccaatggcagttcgagcttgtcggcgtagagtgccaactcgttttccagcgcgtggtagtcggacatcgggtcgcggtccggttcaagcgtggcgcaatcaatcacgtgggcgatgatttcggtacgttcgatgtggcgcaggaactccagtcccaggcccttgccttcagaggcgccaggaatcaggcccggcacgtcggcgatggtgtatcgagagtcgccggcgatgacgacgccgagattcggcaccagcgtggtgaatgggtagtcggcgatcttcggcttggcggaactcatcgccgcaatcagggacgactttccggccgaggggaaaccgaccagcgccacgtcggcgatggacttcagttccagaatcacgtcgcgttcctcgccgagttcgccgagcagggcgaagccgggggcgcgtcgggtcttgttggccagggcgatgttgccgaggccgccggcaccgccctgggcgacgacgcagcggtcgccctcgtgacgcaagtcggcgagctgtgcgccgggatgcttggatttgccctgttcgccgcgcgcctcaaagacgacggtgccgcagggcacgggcagaatcaggtcctcgcccttggagccgtccttattgtcgcccaaacccatggtgccgctgccggcgacacgatgcggcatgaaacgatagtcgagcaggctggtggcgttacggtcggccacgaacaccacggaaccaccgtcgccgccattgccgccgttcggaccggccaacggcttgtatttctcacgacggatgccggccgaaccgttgcccccatcgccgcccttgacatggacggttactcgatccacaaaatcactcatattgattaccttacaaaaaagccgcgtccttacgggcgcggcttgaaaaagcttgacgctatatcgctcaggcgatgacgtcgacaaccttgcggtcgcgacgcacaccgaacttcacggagccatcggtgagggcgaacagcgtgtggtccttgcccatgccgacgttgtggcccgggtggaagttggtgccacgctggcgaacgatgatgttgccggccacgacggcttcgccgccgaacttcttcacgccgaggtattgcgggttagaatcgcgaccgttgcgagagctggacgcacccttcttatgtgccatgattcatggtcctttctataactcaggcaatcgccgtgatcttgacgatagtcagcttctggcgatgacccttacggcgagcaacaccagtcttgttcttgtacttctggatgtcaatcttcgggcccttggcttcatcgttcacaacctcagccttgacggacaccttggccagatcggcggcggcgagggtgaccttgtcaccatcgacaacgagggagaccgggaattccacggtatcgcccttcttggcgtcgagacggttcacgaggatgacgtcgccaacctcgaccttttcctgatggccaccggccttcacaatcgcgtacattatcgttccttttatgttttggaaagctaccttgcctaacacgcaccgagcctgcggtcagacaccgagtttcaaatctacaccaccatgcggactaaatcaaatgatttttgcccgcgtgtcaagcacgacacacctgttactcttccgccgtattgttggcggcgacggcagcggcggcaatctgagccagtttggctttgacgtcggcgctggaaccagccggttcgggagcgggagcggtgccgcgaccgtgcttgttggttttgacgaacgggtcaccaccgcgaagcgcgtagggatcgtcgtagtcggccgaaacggtcggctgatcatgcaggatgaaaccacggcccttgcaggtcgggcattcctcggagaacgcctcgaccagaccctggccgatgcgcttgcgggtcatctgcaccaaaccgagcgaggtgacttcggccacctgatgcttggtgcggtcgcgtgccaggcattcgaccaagcggcgcagcaccagatcgcggttggcgggcatgaccatatccacatagtcgatcatcaccatgccgccgatatcgcgcaggcgcagctggcgggcgatctcttcagacgcctccaagttgcagcgcgtcaccgtttcttccaaggacttgcccttgccgataaagcggccggtgttcacgtcgatggtggtcatggcctcggtgcgatcgatgacaatcgagccgccggacggcaggtagacctgacgttccatgcccttacgcagctgggagtcgatggaccatttgtcgaacacgtccttgccttcgtgctcggccgggtcccacttctccagcttgtccttcaggtcgggggccatggtgtcaaggtattcctcgatacggtcgtagaccttgtcaccttccacgatgagcttgctaaagtcgtcgttgaagatgtcgcgcaccacgcggatggccacgtcgggctcgccctgcaggagtttcgggcgcttgccgtgccagaattcctcgcgcttggcgttgatgcgctcccactggcggaccagtgattcgagatccttgacgatggcgtcttcggatgcgccttcggccgcggtgcggataatcacgcccatgtctttcggggcgatcttggagacgatgttcttcagacggctgcgttcgcgctccgaaagcttgcggctcacgccggtcatgccaccggagggcacgagcaccaggaatcggccggcaagcgtgacctgagaggtcaggcgggcacccttgtggccgatcgggtccttagtgacctgcacgagcaccgggtcgccggacttgaacgccagctcgatgcggcgcggctgaccttcgagacgagcggcatcccagttgacctcgccggcgtagagcacaccgttgcgggactggccgatatccacgaatgcggcctccatgctgggcagcacgttctgcacgcggccaagatagatgttgccgacggtctgtacttcctgaatgtcggagacgtaatgctcgaccagaacattgtcttccaccacggaaatctgggtgtggtgttccttctcgcgcaccaccatcaggcggtccacgttctcgcggcgtgcaaggaagtcctgttccataagctggctctggcggctgcgctcacggcggttgtcacggcggcgctgcttcttggcctcgagacgagtggagccttccacatcggtgatttcgtcgatgtactgctgcttgcgggagcggcggaccagcggctgttcgctgttctgactctggtcgtcggtgccctcgccgttcttgccgccacgacggcggcggcgacggcgagtgacggtctgctcctcatcgtcctcatcgcgatcacggtcatgatcatcgcgatcgtcacgacggcgggaacgcgtatcctcggcatcgttctcggcggtatcgtgctcgccgttggcaccggtttcgccgcgtgaaccacgacggcggcgacggcgcgaacgggtgcgggtgacgtcggattcctcgtcgccctcctcctcggcaatcggcgagtaggcgatatcgtccagctcgaggtcttcctcaatctgctcgacttcggcggctgcacggcgctcctgggcgttcagacggcgggagcggcgcgaacggcgggagtccgaggtgtcgtcggcgtcgaaatcgtcgtgatcggcgttggtatcgccggacgcggcgtcacgggaagcgtcacggtcggcggaggcgcggccgcggtcgtcgcgatcgtcgcggcgacggctgcgcggctgggcatcgtcatcgtcgtggctgcgcgagcggcgggagcgacgagacgggcgttcgtcggcgtcaacatcgtcatcacgagtgtcagcggtatcgtgcgcatccacggcggcgggcagcaccggttcctggaacagcagggacgtcatcggcttgccacggcgcacggtctcgtggccagagggcagggattcgaccgcgtcgaacaggcgctcatccggggtgtcctcgtgcgtatccgcaactgcacggcgagaacgacggcgaaccgtacggtcttcgtcatcatcatccatatccataggcgcacggcggaggcgggagcgaaccgggcgatcctcgtagtcatcatcgtcggactggcgggagcgagagcggcggcgaaccgaacggtcctcgtcgtaatcgtcatcgtccacgactgaacggcggcgggaacgcggggcgtcatcgtcatcgaaatcatcggcactgaccgtgcggcgcgaacggcgcggacgatcatcctcgctatccaagtcggccactgcggaagcggcgcggcgcggacggcgcggagtctcgtcgtcatcatcggtatcgctggaagatgcggcggacgtacgacgggtgcgacgcggcgtttcggcggcatcgtcggccgtggaaacgcggcgcgtacgacggcgggttggacgttcggcggaatccttggaatcgctggattcatcggaatcgccggaatcggatgacttggaatcggccgcggtgctggcattgggaagcgcgggggcttcgaacagcggggtgcgttcctgcacttgcagttccagggaggcgccggcagcaccggtgccgcggaccacgcggcggccgccacgacgacggcgaacaggttcgacgggctgggaggcggcggcaggcgcagcgttcacggctgcagccgaatcggcattggatacggttgaattatcggttccgtcgttgacgaaaccttcacggttgtcagtgggcacaatgctcctcgcggcgcgctgcatcacgacgcctatttccaggcctatacgcttgactcacaccacgctctcaccgtggccgcgcgaaaacgcgccgcgtaaaggcaacttcgtctcaagtctgtcctgcgggtggcggacaccggcgcttgcgttgtctcattctcgagagccgcaaggggatcgacgccatctcgcacgctgatggttatgcagaaccaccatcctttagtatgccacatattttgtgcgggcgtggcccggcgaggctgacgttctctcggctcccctccctgcggtgacagctcccctcagagaggggagctagagaggtgtcagaccagccagtcggcaagaattgcggtcatggcggccaggtcggattcgggcacctgctcgtcgtgcttgtgcgccagcagcgggtcgccggcaccgaggttgacggccgggatgccgagctgggagaagcgtgccacgtcggtccagccgagcttggccaacgggtcgcggccggtgcgctccttgaccagtcggaccagatcttgggcgagcggggcgttcaggcccgggcgcgcggaggggctttcgtccttcatttcgatgccgtagccctcgaacacgccgccagtggccacatgctcgccattgccgagttcggcaccggcatccgcgcccatcatcagagccttggcctcggccagcgacttgtccggggcgaagcggtagttgacgtgtacgcggcattcatccggaatgacgttcgtgcctttgccgccggaaatcagcgtggcgttgaggccctcgcgatagtcgagcccgtccacgttcacggtggccggctcgtaggcgttgagtcggctcaggatgtcggccgccttgtggatggcgttctcccccatccacgcgcgggcggagtgcgctgccacgccgtgggtcacgacgtcgaagcgaatcgtaccgttgcaaccgccctcgatgccgctgttggtgggctcgccgatgatggcgaaatcgccggtgatccaatcgggatgggcctcgacgactttgcgaaggccgttcttttcggcgacgacttcctcatggtcgtagaagacgtaggtgaggtcgactttcggggtggtttccggcgtgcggccgtcgagcgtggcggcgaggtagagcatcaccgcgtcggaggccttcatatcggtggcaccgcggccccacagcacgcggtcttcgggatgagcgtgggcgatttcttcgcgaatcagcgaatcgccgggctccagccacttcggtgggaaattgtcgatgaccggcacagtatcgaggtgcccggccaagatcacacggttcggctcgccgaagtcggtgctggccaccactgtgtcgccgtgacggcggacggtcaggtgctcttgctcgttaaggaaggcctcgacctcgtcggtgagggggccctcgtggtcggacacggagaagttctccatgatctgggtgagcaggctgttcagctgctcggcagtggatgcggtgcggttcaattcaagcgtcatgtgaacagcgtaccgcgtgggcggcgggcccagcacacccactacatgagattttgcggccgaatacatttttatgtgccacactggggtggcgaaagggaggattatgtcaggtctaatcagcgccatgcaaggcttctgcgttatcggcatcgtgattgcggtgggatatgtcgccgcacgaatgcgaatcggcgggccgtccgctcagatggtgctcaaccggttctccttcttcgtatcgagcccgtgcctgatgttcgccatcctctccaaggaaccgatcttcgacatcttccatccctcgattatcgtggcgttcttctccgccgtgctggtaggcgtggtgttcctggtgctcaaccgcatgttcttccacctgaacgccccggacgccaccatcggcgccctgaattcgctgtacctcaattccaataacatcggcctgccaatcgccacctacattctgggcaatccggctctggtggcaccgattctggtcatgcagcaggccatcttcacaccggtgggcctgacagtgctggacgtgaccaccaagggcaaggtctccatcaaggaaatcgccaagcagccactgcatcaaccgctgcttatcggttcgctgctgggcattgtggtctctgcgatttccgctaaaagcggctggttcccagtgccgaaattcattttcgacccgatcgacatgatcggcgattcagcggtgccaatgatcctgatggcgttcggcatgtccctacacggcaccaagccgctgcagcagaagggcgatcgcccggccatcttcacggtcgcggtcctcaagaacatcatcatgccaatcatcgcgttcctgctcgcctatttcgtgatgggcttccgcggctccgagctgtacgcctgcgtggtactcgccgctctgcccaccggccagaacgtgtacaactacgcggcccgctacaacgtgggcctcaccttcgcgcgcgacggcattctgatgagcaccatgaccagcccggtgtttatcgcgatcatcgcggcgctgctgagctgagccggcaactgtaatcaccgtaaaaaaacttccgcgaaatccaccgtaggattccgcggaagcctgagatatacactacttgagaatcgccttaatcgcctcatactgctgagcagtgagttgcaccgctggctcacggatcagggtggaaatgttcagtcccttggccttgaccgcacccttgatggcggagatgaacaggtcggtctgatcgtacagcgccatcaggtggctgatgcgttcggcggcctcaattgcggtgccatagtcgccggcctcatatgcacggtgcagcgtaacgaaggtctccggctccacattggtcatgccgcagatcacgccatcaccgccggagacgcggttgacgagatagtactcgtcgaaaccggagaacaccgcaaaccgtggattcacggccttgaccgcgcgaatcaccttacgggtgtggctgattgtgtcgaccgtgtccttgatgccgacgatgttcgggtgcgcggcggcaagctcggccacgagctccggggtcaagtcgctgccggtgcgcggtgggaaattatagaggatcaccggaagattcgtcgcttcagcgaccgcgccgaagtacgccttcgcgcctcccgcagtagggccgaagtaatacggcgaaacgaccacgagcgcatccactccacttgcttcgactgcccgcgcgaagtcgatcacattgttcaagttggtatcgcccacgcccgcgaacaccttgatgcgcccggcgacatgcttggccacgaagtcgaccgcctgcttcttgacgtccagagggaaggcatagaactcgccgatgctgccaaacaccagcacgccgttgataccggcctcgatcagatgatcgagatgctgcccccaacgttcatagtcgatgtcaccgtcgtccttggtgatggtgatggatgggcagatgatgcctgagaattcggcgctgctcgtcatgattgttcctttcgttacggaataggggtgccgcacaagcggcaccgggtttgcggcctctcccccagtcgtcctgcggacgatagccccctcatcagagggggcttgggtttagtcgatgttgtaagcgcggcgggcgttgttttcgaagaagtcctcgtcctcgccgaacgtgtccagcatgagttggaagtgcgtggcaaaggtcgagttgagttccacgaccggccagttggagctgtacagcaccttcttcgggccgaatgtgtcccgcacgtatttcacgatgtccgggtccaccgggttgtcgccggaaaccttgatatacgaattcggcagttcggccaacgctgcgagtgcggcgcacgattcctcatcaagcccgggcacgttgccgagatgatcgatgatgaccgtcacttcaggaacctgcgagaacgccttggccatgtcgcccagttccgggccacggttgcacagctcgaatggcaatcccttggcggccatcgcgcgtagaccggcgatgaattcgggttcgagcgcacggccccgcggctcggaatccacatgcagcggttccctgatgccatcggcgttgatcgggacacgcatccaagggcttacccgtccttgcaacatgcgcttcaggatcagagggctggcattctcgtacaacaaccggtcctcgagctcgtgatcggccgcgtcgacctccacatatacgccgccgaggaagttcacgccaaacttggcgtactgtgcggctaggtcttcaatcgtgtacttgtgttgcagcgagggcaatcctgccagccatggcagatcctgcgcatccggatcccagatatggaagtgggaatcgattacgttgagtgtcatatcaggcctccttcagaccgatcttggaaccccagaatgcgtaccatgccacgaacaggaagcccgggaccatcaccaggatggcgatctcgatgcctgccgcatcctgaatcacaccgagcagcagcggaatcaacgcggcgcccacaatgctcatcaccaaagccgaggaaccggtcttcgccgcggaacccttgatacctttcagcgtcagggagaatatggtcgggtatccgatggaaatgaacagatacgccaccatgaacgcgatgacggagaccttgcccaggccaaggaataccacgaacatcagcacggctgaaatggtcatgtatacgccaagaatcttcgcgggatcgaatttggccatcaatggggtggtggcgaagcgtccgatggtgaacagcagggaaagcacggaaagcatcatcgctgcggtgccggctgtgacgcccgcgccccagtgcttgagcgcgtaggcggagaagaccgccatgccggccacttgcaggccgatgaaaatgaactcggcaagcacgcccaatgcgaagtgcgggcgcttgagcaggccgaagaaggagctgttctcggaggaggcgccgcccgcggcctcctcttcgtctcccggaggcgtgggcagcttgaacagcgcgaacacggcgagcaccacgaccagcacaatgccgatcacaatgtatatcgtgcgggtatcattcaggaactgcgtcttagcggcgtcgaagccggactcgcctgatgcgacggtggtgccgagaatctggccaagaatcagcgggccaacgatgttgccgacgccgttgaaactctgcgccatgttgatacggaacgattcgcccttttcatcacccagcttggtgatatacggattgcagttggtctccagcgatgccgcgccgagcgcgataacgaacatggcgaacaggaacaggccgtagctggccatgctggtggcagggatcaccatgaacgcgcccagagcgaacaggaacagaccggagatgacgccgcccttataaccgaaacgcttggcgatcaagccggctggaatggccatgacgaagtatgcgccgtaataggccacctgcagtaatgacgcttcggcgctgctgagttctatgtagtttgcgaacggcgagttcaacgcgttcacgaggttcatggtcaggccccagataaagaacagtgaggtcaccagtacaatggcgatggtcgccttggaaccggttgtgtttttggatgtcatcattgactccttagtgatacgagtttccccgatattgcctagcgagaagtggaccaccctgggccatgttggtaaacggatgacccagggcgcgggtgatacgggcggcatacgcggatacggcgtacggatggagcaatgatcaaagctccggaattgccgcgcgaatattcgggaaagggctgcttgtcagctcagcgcacggtcaaggtggacatagccgccatcgacgtacacccactgaccggtggtgtggctggagcggtcggagagcaggaatgccgcttcattaccgatctcttcggtggtggtcatacgatgttccagcggaatcttgtcggtgatcaccgacaggcgcgcctgctgggccgcttcatcgccaaaggtcttgatccaatcggcatagagcggggtccagcactcggagacgactatggcgttgacacgcacgctatcgtgcaccaatgcggcggcccattcacgggtcaggcccaggatcgcgcccttggcggccgcataggcgctggtcttgccttggccggtaagcgcggtcttggacgagatgttcacgatggatccgcggctttccttgagatacggcacggccgcgtggaccagctcgtaatagtgagtcaggttgccgtgaagcgattcctcgaactcacgccaagtagtggtctcgagatccttgttgtcgttctttccggcgttattcacaatgccatcgatatggccgtacttcttgtatgttgcttcgacgacgccggcgatcttgtcggtgtcgttgaggtcaagcaagtgcacatcataggtggtggtgtactgctcgatatccttcttgaactcgtcgagagcgctgtcgggtcgattaatcaccaccgggatggccccctcctgggccagttgcagcgtgatgcctttgccgatgcctttgaaaccgccggtgatgatgatgactttgccttcgagatgcagatccatgggaactccttcgtccatccttattctgcgtttcatgggtgttccatgtcacgcccggccggggcttcggcaccccagccggagtagttgtgtgttgttgtgttaagttgtgttgttcggttatgaatttccagttgcggtcagccgcgatacaggtacttctcggccgtctccagcgtcatttcggtaccgttgcccggagcggtcggagcgacgtagttgccgtccttgatctcggtcgggtggacgaaatgttcatgctggttatcgacgtattcgatcatgcggccgtccatcgtgccggacacggccacgtaatcgaacatcgcgaagtgacacacggcctcgcacagacccacgccgccggcgtgcgggcagacgggcttgttgaacttctttgccagcaggtattcgagcacaatctcctgcggaccggccactcgggtggcgtcaatctgcatgatgccgaaggcgttggcctgcaggtactgcttgtacaggatgcggctctgcatctgttcgccggtggcgaccttgatgggattgatggcgcgcgcaatcgtggcgtggccgatcacgtcatccgggctggtcggctcctcgacccacgccagatcgaagtcgtggaacttgttgatccagtcgatggcggtgggaacatcccacacctggttggcgtccacggcgaggcgcacgtcggggccgatggcttcgcgggccttggccaggcgacgcagatcgtcgtcgatgttctggccgaccttgagcttgatctgcttgaatcccttgacctgcgtctcctccttggcgagcgcgaccatcttctcatccgagtagccgagccaaccgggagcggttgaatagccggggtaaccgacctccagcagatgcttgatacgctcggccttgcccttctgaccctctttgagaatcgcaacggcttcctcagggcgcagggcgtcggtcatgtagcggaaatcgagcgtggagaccagctcctccggctccatctcgcccagcagcagccacaacggcttgcccgcacgcttggccttgatatcccacaacgcggagagcaccgcgccgatggccatatgctccacgcccttttcagggccaagccaacgcagctgggaatcatgcacgaacaggtcccatgcaatgcgcatgttgtcgagcagttcctcggtgttgcgcccaatcagcacctgcgacatcgattcgatggccttgcaaaccacgtcgttgccacggccgatggtgaacacgaatcccacacccgtgatgccgtcgtcggcgctggtggaaatctccacgtacgcagaggaataatccggatcggggttcattgcatccgagccggaaagcgtcgttgaagtggggaatcggaagtcatacgtcttgactttggtgatggtactcatgtgttcgggctccttcgcctggtgtgaaccaacggctatatcgtacgtccgaataaagaaatttgcaagcctatttgcgaaaatttttattcaaggccggacaaagggcaagaaaacatggaattgttacggcacaatgcgtcataatggtgggaacaacgacgaaatcgtctcagtaattgaacggcgaatatccaagagggaaacaccgatggttaacgatacatccacccacaagctcaaggtcggcgagctcgcaaaaatcgccggcgtatccgcatccactgtttccaaagtcatcaatggcaggtcaggcatttccgacgagacgcggagacaagtcgagcaaatcctcaaagatcacggttactcaaggcctctggtcaacaccaaactctcccccaccatagagctcgtcgtcgaatacattgagcacaacggcacgatggaactcatcaaatacgcctcatactgggcgcagcaggcgggcctcgccatcacggtcacccagaccaaccatggcgatgccacggaagactgtttccgcggcatcatcgatagaaatccccaaggtgtgattatgcagcagatgggcggtctgaccactcaagcgaagtctttgttgaaatcgcgcagtattcccgtggtcatcatcgacccaatcgataccgtcgattcggatgtgatgagcgtgtccatcgataactggaccgcaggataccaggccggcaaacacctgctgtcgctcggccatcgacgcatcgccgttatccgggggccggcgaacctacagaccagcatcgcgcgctatagcggattcaccgccgctctgcaacaggccggggtggatctgccggagtcctatatcgaacagggcgactacttccccgccgaaacaagctatgaagcagcctgccggctgctggaactcaccgaccgacccaccgcgattttttgctgcaacgacttatctgcagtaagcacgtatcgtgccgcacgagagcataagatcgcgttgccaaagcaattgtccgtcatggggttcgacgacattttccccgccggccaactcatgccctccctgaccagcgtgcatcagccgttcagcgaaatagcccaacgcgccgtgcagatgatcatcgacagccgcaagggcaatcagggtgatatgcacgtcatcctccccaccagtgtcgtcacccgggaaagtaccgtaccgcctcagtcatcggcccgataatcggccagattcaagctggcggccacccgattggacgcgaacgcacccaccgaaaccagcgcatagcacagcgcaagcccgccgaagaagctggccagcgtggccggttcggtcatcgaagcggcgaacag

SEQ ID NO: 101 - DNA, 8210 bp, Unknown
  R206_24m  MAG No. k141_19856
acatgggtatgttcatgaccgccgaccgcaggaacgaacaggcccgtccgccacggaccgcatcttgcggttcaggcggacgggccttatgggagggatgggaacgggagatcagttcttaataactgcctgcgcctcatcaccggcggcctcgacggcctccacgacctgcgcctcatcgtcgacgatctcgccggaagcgagcttggcttcgagctcgtcaacgatctgcgcgtgcatcttctcggtgatcttgaccttggagacgaacaccaccaggctgagcacgatcaggatgagcggggcatagaacgcgcagatcttgaagacgtggatattcgtcggggtcatatcggcggcggttgcgtcacccgtcatgccggccgcaagggcgatgaagccgacgatgccgttcgacagagcgccaccaatcttatcgagcatcgggcggatggaaagcgtaacggcctcgttgcgcttgccgttcttcagctggccgtactcgatggagtcggtcagggagaggatgaccgtcatcatgatgagcgtgccgggaacgtagaagagcaccagcgcgatgaagaccaggacgatgttgctggagaacagggcgagcatcacataagccacgatcatggagaccatgccgccgatgtacaggtagcggcgcggaatgtacctgttcagaatcgggtacagcggggacatgaccaggcccgcgatcatggcgatgacacctgtcgcggagaaagcggcctgattgtcaaggacgaacttgaacaggaagagaagcacaccggtggtggtcacgttcgcgatggcgtacagcaggtaggacagggcgacccacagcagctggtcgttctggaacacggccttgaacgcctgcaacggaccaccgttgtcttcggcgttggcgcgaagggcgctttggttttccctggtgccgaaggcgacggtccaggcggtcatgatgccgagcaccgcgacgatgatgccgaaagcggtccaacccgactggtgctcggcgttctcgccggtgaacacccagctgaaataggtgacgaccggaatcacgaggatggtgatggcgttgccgccgatggagccggtgaaggagccgagggcagtgtaggtggaacgttcgtgggagtcggaggacaatgccgggatcatgccccagtaggagatgtcacgcagggagtagaacacgtcaagcacgatgaacgtgatgacgaacacgacgatgaacaatgtggagttaacgttcaccaggccaaacatgccgctgaaaaccacggcaagcagcacggaggagaccagtccgccgaagaactgccacgggcggaaacggccccacttggtggtggtgttgtccacgaggttgcccagcaacggatcgacgaagatctcggcgatgcggatgatcaccacgaggctggtgatgacgccgatcagcttggccgcaagcgccttgtcaacgcccgagaacaggcagctggtgacatacacgatgaagtacgtgctcatcgcgttgtagaaggcggcctgaccgaggttgccgaacgcgtaggcgatgcgctggcctaacccactcttcttgcggacgtcaccgtccgcggcattttcgttgctcattaatcttctccttaagaacccagagcatggaatcactcattgattttgtaaagtaagcatacaagttttatcaccgaaagtaaaaagcattagtaaacaaggagataaacagcgtgtcgcaaggatgggataacatgggctgaaccgagacattgcatggacgcggcgtagcgtcgacggcaagcagtgccagtgatttggaagcggtaaacaggatttgcgttttatataaaaactgtttattcttttcggtaaaggaggccccggcctcctccataatatcattcacaacgaggtaatgacagaaagcaggagagcatgacagacgtcacacatgtcgatcgcgcatcgcaggcttggctgaccgacccgacggtgttcgaggtgaaccggactccggcccattccagccacaagtggtacgcccgcgacccccagagcggacaatggtccgatctcaagcagagccttgacggcgagtggcgggtcgaggtcgttcaggccgccgacatcaacctcgaagaggaacccgcgacggccgagtcgttcgacgactcctcgttcgagcgtatccaggttccgggccacctgcagacggccggtctgatgaaccacaagtacgtgaacgtccagtatccgtgggacggccacgagaacccgttggaaccgaacatcccggagaacaatcacgtcgcgctctaccgcaggaagttcaccgtctccgcccccgtggcaaacgccaagcaggccggcggatcggtgtcgatcgtgttccacggcatggccacggcgatctacgtgtgggtcaacggcgcgttcgtcggctatggcgaggacggcttcacgcccaatgagttcgacatcaccgaactgctgcacgacggggagaacgtcgtggccgtcgcctgctacgaatactccagcgcctcctggcttgaggatcaggacttctggcgtctgcacggcctgttccgctccgtcgaactcgccgcccgcccgcacgtgcacatcgagaacacgcaaatcgaagccgattgggatcccgaggccggcaccgcttccctcgacgccgcgctgaccgtgctcaacgcggccgacgcggccacggtccgcgcgactctgaaggacgccgacggcaacacggtgtggcagacgacgggcgacgcggaggcgcagaccgcgatctccagcggaccgctgcagggcatcgccccttggagcgccgaaagcccgacgctgtacgagcttgacgtcgacgtcatcgaccaggcgggagacgtcatcgaatgcacgtcccagaaggtcggtttccgccgcttccgcatcgaggacggcatcctgaccatcaacggcaagcgcatcgtgttcaagggcgccgaccgccacgagttcgacgccgaacgcggccgcgccatcaccgagcaggacatgatcgatgacgtggtcttctgcaagcgccacaacatcaactccatccgcacctcgcactacccgaaccaggaacgctggtacgaactgtgcgacgagtacggcatctacctgatcgacgagaccaacctcgaagcccacggcagctggtccctgcccggagacgtcctcaccgaggacaccatcgtgccgggcagcaagcgcgaatgggaaggcgcctgcgtcgaccgcgtcaacagcatgatgcgccgcgactacaaccacccgagcgtgctgatctggtcgctgggcaacgaatcctacgtgggcgacgtgttccgcgccatgtacaagcacgtgcacgacatcgacccgaaccgtccggtgcactacgagggcgtgacccacaaccgtgactacgatgacgtcaccgacatcgagacccgcatgtactcgcatgccgacgagatcgagaagtacctgaaggacgacccgcagaagccgtacctctcctgcgaatacatgcacgccatgggcaactccgtgggcaacatggacgaatacacggcgctcgaacgctacccgaagtatcagggcggcttcatctgggacttcatcgaccaggccatctacgccacccagcccgacggcaccaggagcctgcgctacggcggagacttcggcgaccgtccgtccgactacgagttctccggcgacggcctgctgttcgccgaccgcaagccgtcccccaaggcccaggaagtcaagcagctgtactcgaacgtccacatcgacgtgacgaaggactcggtgtccgtcaagaacgacaacctgttcaccgccaccggcgactacgtgttcgtcctgagcgttctcgccgacggcaagccggtctggcagtccacccggcatttcgacgtgcccgccggtgagacccgcacgttcgatgtcgcatggccggtggcggcgtaccgcgccgacgcccgcgaactggtgctgcaggtttcgcagcgtctcgccaaggcgaccgattgggccgagagcggctacgagctcgccttcggacaggccgtggtgcccgcggacgcgatcgcgacgcccgacacgaagccggccgatgggaccatcaccgtgggccgttggaacgccggcgtgcgaggcgccggacgcgaggtcctgctttcgcgcacccagggcggcatggtctcctacaccttcgccggcaacgagttcgtgctgcgccgtcccgcaatcaccaccttccgtccgctgaccgacaacgatcgcggtgccggtcatggcttcgagcgcgtccagtggctgggcgccggccgctacgcccgctgcgtggacaacgtgctcgagcagatcgacgacagcacgctcaagggcacgtacacgtatgagctcgccaccgcgcagcgcaccaaggtgaccgtctcctacacggcccacaccgatggccgcgtgaacctgcacgtcgaataccctggagagcagggtgacctgcccaccatcccggcgttcggcatcgaatggacgctgcctgtgcagtacacgaacctgaggttcttcggcaccggcccggaggagacgtacctggaccgcaaacacgccaagctcggcgtgtggagcaccaacgccttcgccgatcatgcgccgtacctcatgccgcaggagacgggcaaccatgaggatgtgcgttgggccgagattaccgacgatcacggccacggcatgcgcgtcagccgcgccgatggtgccgcgccgttcgcggtaagcctgttgccgtactccagcttcatgcttgaggaggctcagcaccaggacgagctgccgaagccgaagcacatgttcctgcgcgtccttgccgcacagatgggcgtcggcggcgatgattcctggatgtcgccggtgcacccccagtaccatatcccggcggacaagccgatcagcctcgatgtcgacctcgagctgatctgatcagaattgatccgatagtccaccgtgcaaacgatgtggcccccgacttcctcgcaggaagtcgggggccacatcgtttgcacggtccttgttagtccagcggatgcgccggatatcgatgcagatccaaacctagtcgttgtagagcatcaatgaataaagatgtcactcataagctatcaagagaatccagaacctttttgaattcatatgctcgacacgcaatgtatccagcgtcgtttataatgattcctcgtgccttaatggcacatcgggctatagcgcagtttggtagcgcgcctgctttgggagcaggatgataccaaaccagcaaaactatgaccctcgctgaggcctactgccgcttaggttttgggacttcggtaaaaactgaaaaatggcatccgttaacaatggttaacaatgaccgcagacctccgagtttgcggatgtttcagggcttgatcccttgggtgcctgaaggtacagagtgtcccactcggtgcgtataattaaaaagttatgccttaaggcatgaaaacgggctgtggcgcagtttggtagcgcgcttgctttgggagcaagacgtcgcaggttcaaatcctgtcagcccgacaatgaaagccctactcccacttgggatgtagggcttcttcttttttgctctgggggcgtttgctaacacaattccagtgttaacggattggctgaatccgttaacattttctgttaacgcagcttggtgcctgtaatccttgtgattccaatggtttcggtatgatcgatggatcgtcgcaatccctcacacgctgtgagccaattcgtgagccaactgaccggaacgacattcatgtcacgataattccgatacctcccgatcacatctcactgccacgtcaaattgtcgagatccacaccgaatcttgtcgcgttggcttcaatcagtgcaagcagccactgggccaaacccggttccaaagcatcgtaatgctgtacgaaacgctcgtcggccacgtacatgcggccgaggcacacgtgcattgacggggtgacatcgaaccataccaaggaacgacggtgggcttccgccagctcattgccctcatcgctgccgggcttcacgccgtgacgcatggcatcggcgagccgctgctcgatggcttcgaattgcttcatgtcgcgctcctgcatatcagacgttctcctcacctggtattccgcaacctgcatccactgccggctcccgccccaacggctctgcgcttcttcggcccattctcgggattgctgcgtcgcatcattcatatcgattcctttctgtgcaacgttcataagccgatcgatatcggccaatgcctgattgatatgttccgccttgcgtgcaagttggccccgacgatccgccaactcgcgtattacctcactcggcttggcatcgagcagctgcttgatacgcggcacgggtatgccgagctccctgtacagcagcagcctgcgcagtcgtctgagatccgaatcggaatacagccggtatccattccagtcgcgttgcggagacaccagacccatttcgtcccaatgccgcagcatgcgaatactgatgttcgtcagccgcgacacatcccctacgttgagatgggaaatacgctccgccggagtgtccatgtcgtgtgattgccggtcattcatggttacaggctaaagtatgacatcatgtgagggtcaaatcagcatggcgacgcgaacacagacatcgatttcagttcacggtatccacggctggagtaaaaatccgattatactgaatcgcacatcacactaacggctaaaaccaaccgtctccgacaatccatagggagaacacatggatgacatgaacccacgctgcggctggtgcaatctcagcaatcccgtctatgttgcctatcacgatgccgaatgggcggttccgtcgcatgatgaccaccacctctttgagatgctggtgctcgagaccttccaagccggattgtcatgggagacgatactgaacaaacgcgagcgtttccgtcagtcgttcgatgggttcgacatcgaacggatccggcgctatgacgagaacaagatcgccgaactcatgaacgatccgggcatcatccgcaaccgtcgcaaaatcgtcgcgacggtcggcaatgccaacgcattccgggatatccagacgtcgtacggcagtttcgacgactatatttggcggttcaccggccgtcacgtcatctacgagacaggcatgactacatcccctctgtccgacgccatcgcagcggatctcaagacgtacggcatgcgattcatcggcaccaccatcgtctacgcctatctgcaatccatcggcgtcatcaatgcacatgagcctggatgcttcctgcaccgggaaaggtgacccgcgcaaggatttataaggtcgctcgggcagaatctctccgagaggaaccagtgcttctagttattttgcttatcgagttcttggtagcgctctttgaccacggtgaggattccggcagattgttcgcgctactgcgcggtgagcgcttcgagcagttcgctgaaagtcaacccaccttcactaccggatgacggatgatggttttgagattttccggtttggctcggcgcgggtcggataggtagatctcgtgatggcggcgggcgtcggagaagtcgagcccgtagccttgcgaacgcgcgtagccgtccagaatcgtcacggttgcgggctcgtcgtcgtacgggcctttgtgcatgacctgcgcgaccacgccttcatcgaagtcgaagagatatgcacgattgatgtcgacttcgggatgcttggaggcaaacgatgccttggcccacgcaaagacctcatcggtcacgaattccggcagacgaatcatcgaagtccaatagaagtcggttttacgcgtgtaatcgacgccgggcacacccttctccatgctccataagccctccagcggaggcacggtgtagtcgaagtacccgtcaatgtgctcgtccggattatttgacttcttgttcattttgatggtgaacgaaatgccgtacagcagttgcatcgccttggcgtaatcgccgccttcttcgttcgggtcgcccacaccgtccaccgcgacgaaccgcatcgccggtaccatgacgatggc

SEQ ID NO: 102 - DNA, 10451 bp, Unknown
  R206_24m  MAG No. k141_20155
gcggcggccttgtacgcgccggccacggcgtgcgagctttcgatggcggggatgatgccctcggtctggctcaggtcgcggaaggcgttcatggcctcctcgtcggtggcccagctgtagttcacgcggccgatgtccttgagccatgcgtgctcggggcccacggaagcgtagtcgaggcctgcggagatcgagtaggtgtcgagcgtctggccttcgtcggtttccagcaggtagctcttggcgccctggaacatgccgagctggccggtgccgggggcgaagcggatggcgtgcttgccggattcggggccgttgccgccggcttcgtagccgtagaggttcacgcgctcgtcgtccaggaaggcgttcatcacgccgatggcgttggagccgccgcccacgcaagcgcagatcgcgtccggatggtcgatgccgtaccagtcctggagctgctgcttggcttcctcgccgatgatcttctggaagtcgcgcaccatggccgggaacgggtgcgggcccgcgacggtgccgagcaggtagtgcgtgtccttgacgttggtgacccagtcgcgcagggcttcgttgatggcgtccttcaggatcttgtcgccgagggtcacctcgaccacttcggcgccgagcatacgcatgcgggccacgttcagggcctgacggcgggcgtcgatctggcccatgtagatgcggcacttgaggccgagcatggcgcacacggtggcggtggccacgccgtgctggccggcaccggtctcggcgatcacgcgagtcttgcccatgcgcttgacgagcagggcctggccgagcgcgttgttgatcttgtgcgcgccggtgtggttcaagtcctcgcgcttgaggaagatacgggcgtcgagaccggtcttctccttgacaagtgcggcgaagcgcggggcttcggtcagcgggctcgggcggcccacgtaacgctgctggagcgtcatgaattccttgtggaattcggggtcggccttggcttgcgtgtacacgcgctccagctcgtcgagggcggtgatgagggcctcgggcacatagcggccgccgaactgtccccagtacggtccctgatgttcgctgagcggggtggtttcggatgctttcacttgtgctcctgcctttactagtcgttccactgcaagttcatgatcatcagcggtggccacgccttcaccgaccagtaccgcatccgctcccgcgcgggcgtagtcttcgacctcgaccgcgccgaatacgccggattccgccaccttgatgacgtcatcgggcagatcggccgcgagttcgttgtatttgttcacgtccaccttgaggttcttcaggttgcgcgcattgatgccgatcaccttggcaccggccttgcgggcgcgttcgatctcctcgcgggtatgcgtctccaccagcacggtcatgttcaactcgtgcgccaggtcgagcaggtgcttgagctgggcgtcgtccaatgcggcgacgatgagcagcaccaggtcggcgccgtgggcgcgggcctcgaagatctggtagtcggtgacgatgaagtccttgcgcagcaccggaatgtgcacggcggcgcggaccttgtcgaaatcgtcaaggccgccgaggaatctgcggccttcggtgagcacggagatggcgcttgcgccgcccttctcgtactcgcgggccagcgcggccgggtccgggatgtcggagaggtggcccttggacggagacgcgcgcttgatctcggcgatcacggggatgccgtcggcgcgcttaagccatcgtgtcgcgtcaatcggagccggggccgccagcgcggccttcttcacgtcctcaagcgatacggtgagctcacgggcgcgctgatcctccagcgctcccgccaccagttcgtccaaaaccgacatggtcctccctttgttggtgttcggtcatgcgccactctaggtcacgccccgtcccgattgccgaacccgtcctacattctgggctattcctcgttggttcgtatcgctacggaaccagagcggccaacaaaaaggaaaatcgccatgaatatcggtcatacggcctgggattgattccattgatggcatagactgggcgcatgtgcaggagattcgcgcttgatttggattgggatgccgtggcctcacagttcgcggtagacgaggatgacgtgcgcgttgacactctgccacagccttcctacaacatcgcacccatgcagaacattggcgtggtggcacagggcaaggatggccgccgtcatctgaccggtgcctattggtcgctggtgccgcgatggagcgccagcaaagtgctgagctaccccacatataatgcgcgtgtggagtctgcgcatgtcaagccggcgttcgccgaatccacaaaatccatgcgagccatcatccccgcttccggctactacgaatggaaaggtcgcaggccgttctattttcacgcaccacatgatgaactattgtctttggccggcctgtactcatggtggaggccgtctcccgcatcgccatggcagctgaccgcaaccatcatcacctgccctgccgcggacgagttcgtcaaggtgcatgatcgcatgcccctgctggcgcctcggaatatggttgcctcatggctggaccgctccgttgacggagccgcactgttagattccatgcgggaagcgggtaccatgctttcccggcatctgcaatttcacgaagtcgcgccactgaacagcgacggcaaacgtcttattcagccattggattccaccgaacccatgcgtctgttttgagctcttgcagctggaaccggctatgcagctgtatatgaagatggatcaatcaacgccccactgataactaacctcgtatggccatcagtcaaaaacaggtctcttctgctcgacattggtcgactacgactacttttgcaccaatccgcgcaacaactcgatctcgtcgcgatgcgtggcgggcgtctgctccttggtttcgagaatcatcgggagcttggccatggttgggtcgttgaccagtcgcgtgaagaacgggatgccgagctggccctcgccgatattggcgtgacggtccttgtgcgagccgaggccgaactgcgaaccgttcacatgaatcgccttgaccttggccaagccgatcgcctcatccaactggcgcatcacgccgtcgtagtcgtgcaccaaatcgtagccggcatccaacacatggcaggtgtcgaacgtgacgccgacgttcgccttgttctccacgccatccatgatcgtggcgagctcctcgaagttgcgcccgcattccgtgcctttgccggccatggtctccagaagcaccatgacgccggtcgtacgctcgaacacctgattcaatccctcgctgatcagccggcagccggtctcggagccttggcccacatgcgcgccgggatgaatattgatatacacctcctggccggcctcgcggatggcggtcagcagctcgatgtcctcggccaacgcctcgatcgcgaatgtgcgcttggcctcatccttgccggccagattgtagacgtacggcgcatggacgaccaacggcccatagccctcagccttcagacgcgcaccgaacgccgccgcgccggccggatcgagcgccttcgaacgcttgccgtacggggaacgcgggaagaacgcgaacgcggtaccgccctcctcatgggaacgttccagcagcgcattccatccgccggccgtcgacagatgcgatccgatatacagttccgtcattccaaactcctcgtgttccactcgctgttcgtgttaccgctatcatatggtaggcggcatcgagcgccgcccgcacaaccgacacgagacacaactgttcacccgaccaaaggagacctgagcatggcggcagccggcacacccaaggacgataccggccttgaacggaagatggagtcgcgtcacctgacgatgatctccctgggcggcgtgatcggcaccggcctgttcgtcagctccggctatacgattcaccaggccggtccgctgggcgcgattctcgcctatgcggtcggctccctgctcgtctactgcgtgatggtgtcgttgggcgagctgtccgtggccatgccgtacgccggcagcttccacatgtatgcgaagcggttcatcggccccggcaccgcgttcaccatcgccatcctgtattggctgaactgggcggtggcgctcgcctccgaattcacggccgcagggctgttgatgcagcgatggttcccgcattcgccgtcctgggtgtggtcggccgtgttcattgtggtggtgttcgcactcaacatcatgtccgtgcggctgtacggcgaggcggaattctggttcgcgtcaatcaaggtgttcgccatcatcgcgttcattgtgatcggcctgctggcgatcttcggcgccataccgattgccggtcatgattccgcgccgttgctgggcaacttcgtggccgacggctggttcccaagcggtatcgcgccgattttctcgactctgctgaccgtggtgttcgcgttctccggcaccgaagtggtgggcgtggcggccggcgaaaccaaggatccctcgcgtgcgattcccaaggccgtgcacaccacggtgctgcgcctggcgattttcttcatcggctcgattctggtgatggcggccttgatcccctggcatcaggccggcgtggatacgagcccgttcgtgctggtgttccagtcaatcggtatgccgttcgccggcgacatcatgaacttcgtggtgttgacggctgtgctttccgccgcgaactccggcctgtacgtgtgttcgcgcatggtgtggtcgctggccaaggagcggctgattcccgaacgttttgctaggacgaatttccgtggtgtgccggtgtgggccgtgctgttcagcatggcgggctcactgctggcgttgctgtcttccgtgatcgccgcctcgaccgtatatctggtgttggtcgccgtgtcaggtttggcgacgctggtggtgtggttctccgtatgcgtgtgccatatccgtttccggcgcgaatgggcgcggggtgggcacagcgccgatgagctcggctatcgtgcgcccggtttcccggtgctgccgtggctggccatcgtgatgtgcatcggcgcgctggtgctcgtggtgctcgatgatacgcagcgttcgaccctgtattgcatgatcccgttcgtcgcctgctgctacgcggcctattacgcactcgaacggcagcgcaaacgcgaaaacaacgcctaactcgatttcgaggggctgatttggcacttgccggagatctatctccgtttcaaggggctgatgcccgagtagacaaggctccacaatggcgtaatggcgttgccgcaaagccgtttatactcgtggtttggcgtttgagcagcccctcgaaagccaagtagatgtccccaccggacgaaatcagcccctcgaagccgagaaaccattgatggccgattatgttgagcccagtgacgtgcctggtcccgtgctcgaactggtacaacaattggagtttggtttttgcaaagggcattgttatgtacaaggtgttggtgtcgttcgcagacagctaatgcgcgttgactcgtcgcgctaagccgtggtcaccgtttgggcccacggcacttctgttgtgccatttcccacgcacttggtcgaaggctggcgatgggccctgaccaagcgcgtcttcctatccgcgatcatactcggggcaattgtgaacatcgcctgcgtagccagtatcaccggcgcgcagatcatgttggccgcccgtggcgccaacgcggtcatgatcggactgctcggcacggcaatgggcgtgagtactttggtcggctcgctgttggccaacaagctagtcgatatggttcccacagggaaactgattgcgggcgcgctggcgttgttcgtggtcagccagatgccactgctattcctgcacagctacgcggccattctgatctgccagattctggccggcctgccgttccccgcgttgaacgctggtctgctgggctttctctacggcaagacacccgacaacatgcaggggcgggcttctgccgtatttgaaaccacggtcggcatactgggcgcagcatgcccggcgatggtcggctggctgttgcaacagccagatctcggtttcacggcggtgatggccgtagccgtggtctgttccgtagcgggattggccgtatcgttggccggcccgctgcgcagcattccgaatcccgaccagtggtcggaggttttcctgtaacgccaagcagcggagcgccggtttatatcaggtcgtacggcatctgacgcttgaccagccagaagatgccgaggccgatgaacaccagcagattgaatccgccactatgccaccacaccacggcgatcagcgtcgccatgcgcgccacatagaacgccgcacgccgccagccttctcgcggccgggtttccactgtcatgtgcgtgaaactgccgccgaacgtgcagccgccgcgcaaccatggcaccacgccctcgaagaggatgagcgccgccaggaagaggatcgagccggtccagtcgaacggttccatcgactgccatgagccgttggagcccgagggcaggttcgattggacgatcatgacgaacagatgcgtcggcatcacggcgaacccgatcagcgtcatgtcgatgatgaacgtgatcagccgcctcatgaagccgggtgtggtggtcggcgtcgtatcggcgacccgcgccggaatcaggcgcagcgagaacatggccagcgcgaacccgatcagcgcgccggtcgtgttccacaggagatcgtccacgtcgaacagacggtaggcgcacgggaacacgcccatgaggccggtcagctgcatcgtctccagaaacagcgacgtggcgaacgacagtactgcggtaaccggcagcggccaacgccagatacggcccatgatgaagcccaacggcaggaagaacacgatattaaacgcgatttgcagtacggcggtgagaccatcggtacggatgtcaccgatgaactgcagtgggttgatctgcggtgtcagatggtgcgcggcgcaataggccgccgcatcggccggcatcggatacagtgtgaagcacagcaggccgagcagatacagcaccgtgccatacgccactatggccgacgacagtcggatgcgattgtcgcggtgatacagcagcgccagcaccggcaccgtcagcagcatggacacaaacggccacaatgccagcgcgaacgcaaacggttcggaaaagttcttaagaaatcccatcttcaatgctccctgcttcggcccgctccgttcggtttcggaccatgactctcgacttctgattccaaggtacggaacatgacggcatgcgggtatcggccatgagagcgaaatcattgggatgaaaggcgattcgtatcattcgcatggatgaggaagatgcaccagttgtgactgacaattgcggcctgcgaaccggcaggatgaatgggactgacccaactggcccgtctcatcttgtagggtgtttcgtgctcttgtaggcagatgattccaatggcgatgatcggaataccgccattgcaatgacctctcgccaaggccagctacctacaagatgctgaatctgcctacaagatgaattcgccggtgaaccatgccggcatcaccgcttcgaggtaagggcgcatcacgttcacgagccgaaattcgcgagcgtagttcatgagtttgaccaagtcagtgtgcgcggatctcatgtaattctggaaggcggattgcaaatcttgcggatccactgtgctgcgggagcggaacaaatcgcaaatggttcgttccaaatcataaacgcgaaccgtatgcccgaacatagtgatagccgacgccaggccaattgtaaagcgattgtcggccacctttctcactgttacgtcttcattcttgagacgagccgtacctgatgattgcggtaaggtaatcgtcggtgtcagggggggctcgccccctctccaagcaagaacaacgcagtttcatgcgaaaaaatggctttcggatatcgatactgcaattcgaacagcggatcggactccgcattcggtgaaacatataagccctttgccgctttctcaagcttggcttcacgcacgaatcgcgaaatctccgtgcgggaaactcctcgacgctccatttccgataccggaagatatcccatatgctccttcaatacgctttccgcttctgtcgctctagtggacatgggcattccttcagatgttgcggagctcggagagttgcctgaagaaaagttttgctatcgcctaacctaatgcgttattcgactccaaccgttgctcgacttcgaaatgctcgaatactatgagcgagttgtcgttcaacggaaagattgggttggcgaattcatcgcggtattccgccgaattccagaaagattcgtgtgcgctccgccattgggccgccgtgacgtcgccttcaccctcatcgatggcgtaccggtcagtgacttttccgagcggaatcacgtcaaccgcagtggtgacgagtacggctacgggtcgttcatcggaatccaccaacaccgaatgcgcgccaacgcacggcagcggttcgacctcttcctcatattcaatcatcagcgcagcggtggcggtttttacgccgtccagaatgagcttcaccaagcgatcgcgttcaggcccaggaaacataaactccgctttgggcaaatcactggtttcaaatgccgtattgacgctcatgcaatgctccagatcgtctttatgttcaattgtgctgtgcttttcttactcccatcataatagcccgaattccatgagtttccggcgctgatccagtggcctccattacggtcaatacaacctgatgccaagcaatcacatgacaacaagtgacactgtactcacgaaccggcctactatgggcggcatgacgattcgtattgttccgattgagccgccatggtttgaggaaaaggcccaagttcagtcgtgcacgtggcgcgaactcaatcaggggcatattccgcagggaatcgtggatgcgatcactcccgaattcgcgctcaaactgacgcgcagtcacgccaaagaccccaatcaggtcgtattggtcgctttggagaacaaccacgtgattggttttgctgagcttctgcaaacgccacgttcgccaatcaaacggtccgaggctgcggaactggcttcgctatatgtgctggaatcttgccatcgtcatggtgttggccgtgctttggttgaggcaggccaacgcgccatcggcaacgatcggctcgccttgtgggtcgccggattcaacaccaacgcccaaggtttctaccgtcacatcggcttccatgagaccggcctgactcaaaccgaagacatgggcccggaactcgaaatgatcaactactctgacggcgtattccagtgagcagcccgacctcccacacgcgtccggcgctaccatgaagccatgtctttgaacagtgagcaacgcgcggcgactatccgcgaatttcaggagaacatgagccggctgggtctgaccgccgaacggcggcaaggattttggcgtcagcggcagcagagtggagcaaatcatcaccctcaagtcgggcgtgctggagtatccgtggattatccgcgcctatctgctgagcagagctgagacacagggcgtggaactcacgccgttcatggcgttacgcggaaatccgcacgattattggttcctcgacggcgactctatcgaccgaggcgaaatcgattaaaaccgattgataatcggccatttacacgcaagaggcgccgtcaatcgcctcgcgcatagaggccatcgctctccatgcaggtggcgatgcgtgtgtagtattccgtcttgtcctcatggtcgatacgtgcgccgcaatgctgctgcaccgcaagacttgccggattggttttgtggacactcaggtaagcctcctcgatgccgagctcgcgggccttggcgagcgtgagcttgagcccggcggtcgcgtagccgtggccgcggtattcgcgggcgataccgtagccgatgtggcccggaccgttgcgcaggaagtcggtgagccggtgacgcaggttgaagatgcccacatagtcgccctcatcgttgacgagaatgtatttggtggctggcacccagccgtccggcaggccgacgccaagcgactcatcacgcaaccctcgcacatatgcggcgaaccgttcacgattcatgccggccgctgggttctcgaatcccgtctcctccgccgggaatttcgcgaacaagtcaaa

SEQ ID NO: 103 - DNA, 15379 bp, Unknown
  R206_24m  MAG No. k141_20259
cgatctcgaagacctggggcttctgcggggtgtgcgggtgctcggcgccgcggaagacacgcagacggtcgagctgcaccttggccagacggttcttcggcagcatgcccttgacagcgttcttgatgatgcgctcggggttcttctcgagcagctcggcgtaggagtcacgacgcagaccaccgggacgaccggagtgcgagtagagttccttgcccatcttgttgccagtcagagcaatcttgtcggcattgatgatgatcacgtggttgccggaatcggcgtgcggagcgtaggtcggcttgttcttgccgcgcagcaggattgcagcctgggtggcgagacggccgagcaccacgtcggtggcgtcgatgacataccagtcatgagtcagatcagctggcttcggagtgaaagttttcactggattaccttttctatattgtgttccgggtcttagctgcttggtgtggcttggtcagggccgcatccaagaggcatcgaacctcattatccgtgggctccctgaaagtcctcgatggcgagtgggatagcgctttgaaggaccccttagggaaacacaacaatccactagtatatcgccgggcttgacatagggcaactggggacactccattgggtttatggcttctcttcccctatttatggtttctcttccacccacttcggctaaccgactcgcctacggtgaggcaattccctgccttctctcagctatcgcttcgttcaggcctcgtctacggacagtccactggactgtccgcttaacgactcggctcgtcagagggaggtaaagtgggtcaggaattgaagatttgggcgaagcgttggacgccgggggtgtcgaagagggtttcgagcggtaccacgttgcccttggcgtcggccagcgggatgcgccagttcgggtattcgttgttggtgcccggctggttctgcgcgcgcttctcccccaccgcgtcggtgatcgaggcggcgagcagcttgcacggcgaacccttcagtgcgcggtacagcgcgtcgatgatatccgcctcgtgatcctcacgatgttcggcgaagtcggcatcaagatagccctgctcgaccagcatgaccagcatcgcatcctgctcggcctttgcggaggcttcgaattcctcagccgggccggtcagcaagcccagacgctcacgaatcttgacgtgctcgtattccaggtaaccggcggtcggcggcaaatcgtgcgtattcacggaggccaatgcgtacggacgccactgggagggggcgcggaacacgccgtcgcactgctcgaaccattcaacggcgcaaccgagaataccgtggctcgacagggaatcggccacatggtccggcaccacgccgaggtcctcacctacgaccacgccgccggcgcgagaggcctcgatggccagaacgcccagcatgatgtctgagtcgtagtacacataagcgccatccatagccgaccggttctcgggaatccaccacaggcggaacaggccgagaatgtggtcgatgcgcaccgcaccggcacgggcgaacatgccatgcaccatattgcggtaggtctcgtagccggtggcctccagattgatcgggctcagcggcggctggctccagttctggccttgctggttgaacatgtccggcggtgcaccgaccgtggctcccttggcgaagcgctcgggattccaccacacgtcagcgccggaggggtgcacgccgacggccatatcggacatgatgccgatatgcatgccggcgtccttggctgcctgctgggcggaggacagctgctcggcggcaatccattccagccagcggtagaagtccaaggtgtccgggtactgcttgcgcagattggcgatttccggggaattgcggttgaacttgcgctcccagttgctctcctcgccgttgggtgctccccacttgtcgtagcacaggcaccacgtggcatacgcctccaagtcggaaccgcagtccgccttgaattggtcgaacgcgctttggcgttcggcggtacggccggccttgaagataatccacagggcgtgcatcttgctgcgccacatggcgtcacggtcgatgagctgggaatcaccgttcagcggttcggtgtcggcatgcagtccgtcgacggcgttcttgtcgcccgcgctgagcgtggcatattcggcgatcgcctcggggcggatgtacgtgaagttgatcaggcgacggcttaccggcagatacggcgacggggtgagcggggacaccggctcggcggcatgtaccggattgatgagcacaaagtcggcaccggtcttctgcttggcgtccaccagcatggtcttcagatcctcgtaatcgcccacgccccaggagttggaggagcgaatcgagtacagctgggccatccagccccacagactgccgcccttcatcgggtcaagcagatcgacgcgatcaggtgcactgatcaaagtggcgtcttgcacacggtcggcgaccttgacgtgcagcgtatggtagccaatcggcagatcggcgggaatgaccacagccgcattcgaaatgaacgtgccatccaagtcgtaggcctgggatccatctccaggaccaacttcaacggtgccctgatatggctcgccgttctccagcgtgatgctcgccgaaggcacgtccagaatgccggtgttcaccagcacccggtcctcgctaccggcgatatgcagcacggtgggtgccaccaatcgggagtaacgctcgttcagaatgcgtcggatggcgatgagttgggcgttctcgctggaggcgtcgatgcccagcgctgccagcacctcgatcaggacgtcatcgtctatctcgtggtagtcatggctcatgcccacataactcgtgccgacaccgaccaacttggccagtcgaatcaacggacgggccagacgctcttcactctcggtaatctcactcatagccccagtctaacgccgtttgattgcgccacaccgtaagcaaaatgccgtgattccgccaaattatgtactttttaccctcacatagtgagatgtgagcgctcacaatggtgaatagagggtgattgccggccaaatttgcacggcaaaacacagcaatagtgtgcttagcggcggctttccacggcgtgccgcacctcggccgaggggtcgttggccaatttggcaagcatcgcttcggacgtattggggttcagcgccacggcacggcggaccatcgaggaaagcactgccggtgctccctcttcggattcggtgccaagtacgcccaagaaatccaatgtctccgcatccgcagtggggtcctgcgcaccctcaagccgcatcttccagctggtgcgcttgtttttcaacgccgtatcccggaccgcaggtaccgggtccttggtcaggcggccgaccagccaattcttgtcatccccgttggcggccacggcttggcgcacggacggttcggggtcttcggagagtttgaccaatacgttcgggaacggcatggtgtcggcgaggaacacgcgatcggccaccggggtgtgcgggttgccggccacagcctccaaaagtgcggtggcgcgggagaacgccgcctgatcggcacggtcaggcaacggccgacgggcgaattcggacagttcggccgggtcggtggaatgacgcagacgttcgtatgtagcggtcagcggttcgaaatccaccggagcggcggactcggctgcggtctgcgcgccttggtcccgctgctgggcgcccgtgtcgattgcagcctcagttgcggcctcggtgggctgggtctgctggctggtgatgttctcgtcggtcatgatgcccagcttagtcatacaggcgtcacgcgagcggaaccggaatgttgaccacgtcaatcggatccggcaccaccgcggcattgaacgcttcccgcacacgctcctcgaatcgcgcgcaatcatcctgcggcaccaccgcggtcagttcgacgttcaccgcatacgattcatcctcctgactgccaccgagctgcgccaggatctgctggaatcgggccagctgcgggtattcgagacggacccggtatcgcttggcggtcatgatgcgggcggcgcgggcggctttcatcgccaatgatgcggcggatgagtacgcgcggaccagaccaccggagcccagcagaataccaccgaaatatctggtgacggcaaccacgcaatcggtggtgccggactgcttgagtacgtcgagaatcggcttgccggcggtaccggacggctcgccgtcatcgctcatgcgttcggacagtcgcccatccgcgcctccgcacacggcggcatacgccacgtgtcgggctttcggatgctgctcacggatcgcggccacgaacgcgagcgcctcgtcgagcgtatcgacatgggcagcgtcgccgatgaattcggactttttttcgacgagcgaatcgtgggcgggatcgtcgggcgtgttgagaatcgtctgcataagcgtgttccggtggtcggctgactgggtgttcgattgagcgcgaggctagacaggactatcagtgttcggagacgacgacgttatagtcctcgccggcgaagtaggcggtcaggcaggcgatcatctggcgggtgagctccttgaacgcgccgtcggtacgccagccgacgtgcggggtcaggacgatgccgggcacatggcagatggcgtcgtcggcggtcagcggctcgtggtcgaacacgtcgagtgcggcgggaacatcgcccttttgcagtcgggcaaacagcgcaccggattcgatgacttcggagcgggcggtgttgatgaacagggtgccgggcttcacatgcgcaaggttctcggcggtgacgatgccgcgagtggcgttgttgagcggcagatggacggagatgacgtcgctggtttcgatgagctcgttgagatcgtcgaccggagtggcgccggagcgttcgaaatgctcgggcggcacatgcgaattccatgcggcgacctccatgccgaaggcacgggcgatgccggccacggtggcgccgatgccgcccagtccgatgatgcccatgcgacggccggcgagttgcagtccatcgccgccggcccacgcccagttgccggccttgacatccttatcgagttggccaacgcggcggatgagctcgaacaggagggcgaaggtgtgctcggccacggcgtgatcgccataatgttcggcgttgcagacgcggatcttcagctcgcgcgccttatcgagattgatgtagctggcgacgccggtaccgcagaacacgatgcacttgacgtgcccctgctcgctgatggtgcgtagcagatcatccgaaatgtggtagccgcccaccagcagggcgtcggcatccttcagacgctcggctatggtcgcctcgtcggacgtgaattcctcgaacatacgcacgcgggcaacgtcgtggagcgcggggaactgggccttgatgggctcgatcatcgcgtcgagcacggacggcatcacgacgaggggcagatcggtgcgttcgctttgggtttcgtaaatctcggtcatgggctccacattaggaggccgacgggaaaagcgtcaccttgcggcttcccctccttgagaccaagccgagcaactattgctttgccgcctgctcctgcgtgatgttccattccttgacgacgttctggtccgcgcccatcgaatagatgacatcccagatgcgttggcgtatctgagcgtcgtaggcttcgtcccaacatgtgcctatgggatggtcgctggatatcgggcaccattggtagttgccttgatgcacgttggcggtgggcacccagtcgatgcggttgacgcgccacgaccccttgacgcccttcttgccggcgaactggatgcgtgcggtcacaccctggttgttgaccaaggtttccggcgtgttcgccgactcggtgacggtgttgcccagaccgtagacaatccacgtgccgttatagttctcgatgggctgcgcacaatggcagccggcaccgtagataacgtcgaaggcaccagtgtcggcaagctcatgggcttccgaaatctgccaggaatcggcgtaatcaaggtattcctgcaccgagtgcatggcgatggccaccacatcggcaccttgctcgcgggccttgttggccttgtctaccgcgcgctggatgtcgctgccgtgattcgggtcgccgtcttcgcgcagacgatccacctgccagtcctcgtcggcggtcatgccgttgagggagaccgtgccggtgaccagacccagcttgccgccgccggtcggggaatcgatgactaacggtttggtggagtcggcttcggttttgtacgagccggtctgggcgatgccatcggcctcaagcgtgtcccacagacgggcgatgccatccgccccctgatcccaggaatggttggtggcgtgtgtgcaggcgttgtatcccacgttgcgggcggcatccgccacttccggcggaatgttgaagatcgggtacgcggcatatgggccgccgcgctgggcgatcggggtttcgaattcgcacacggcgatgtccgaagcctgaatgtactgcttcatcggcgcgaacagcgggtcgaagttgaaggcggtgccatccgtggcgttggggttcgggccttggaaatggctccacaatccctcatggaacaacaaatcgccgttgaccagcatggcgatgcagtccgtatccgggcaatccggtgaattgccgtgatgttcggtcaccggtttgggcgtgttcttcgctttattcaacgcgacgtccgacactccggcgcgtgcggggccattgccgtccgtgcgatgggttgcgaaccatgcgccgatgcccagcgtaacggcgagcgtgatcacgaacacgataatcagcgccgcacggttggttcgtgtcgagttggagcgatgttgcccctgcccagcgatatggctcatctttgcccacccttcggaactcttcttctctctctaggataccgcccatctcagtcaaacactgcggggaggaaggcgatgggcaagcgattggacaagcgacataaaccggttaatcttcaatcaccattcacgaccaccacgcaaaagtctcacttagtggacattcttctttcgtttgttagcctttccccgaggtgccgcactcgttcacccgctaaaatggcggtttggaggcggacggacaatggcgtacctccgactccgcttaccacaagcggagaccgaccgtcctcggttatttcggttatttctagcgacacattcccaggaaagtttcgcaaaacagacccccaagcaacccactagaaacacattcccaggaatgcgtcgcaaaacagatatccggacaacccaccagaaccgtattcccggggttcgaatccctctgactccgcgaagtgcgaacaggcccatcatcaggagtttccggaaaacaaaaaagattccaagctttcacccggaaccttaatcggcggagtcagagggattcgaaccctcgagccgtttacacgactaacaccttagcagggtgcccctatcggccactcaggcatgactccacgttacgcaataatgcgcaacagcaaattactgtaccacgtcctgcggatacggcgtgccgaacgacacattattgaccgtccgcgggcgcggcatcgccggagaacgtaacgataaccgcgcaaatcaccaacgccacaccgatgatttcaccaacgccgggaatctcgccaaacaccagtcccacggccaccgccatggcgggattgatggattgcattaccgaaaatgcgccggatgtggtgcgtcgcagcgtgatctgctccaccacatagggaatgaacgaggccatcagggaaatcacaaacagcagagccagcagcttcagcgatccgccgggctcaagcgcccacgtggcatcggccttggggtgaaccacatgagccacagccggcacgccaaggaacagggactggaccagccagccgatggtcacggcgatgcacagattatccagcgaattgccgccagccgccacgcgccggccggtgatgatgtacatgccccacatcgacccgccgatcaaaatcgcaatcagaccatacaaaaacgtgccattgccggacggattggccaatgatatgccggccaacagcaccacaccgaccgccgcgatgccgataccgacccgctcacgccagcttttgccggtaatcaccgccaccgaaagcggtcccaaaaattcgatagacacggcaatgcccatatccatattgctgatggccacataaaacagggtattcatcagcaccagcgagcagccgagcagtacgaccagcccccagccgcgggcatcgcggtgaaacagctgcgctcgcttagccttgctccagggcctgcaccacagcagcaacagcaccgccatgaatcccacgcggtaccacaccgaatacagcgggtcgagctgggtgaacgcaagtttggcgacggccgtagccaaataaatcaccagtgcctcaccaatcacgataagcaccacgggaacacggttgaggataccgaccactgccttcttcacgaggtttacgctactcggagagtcgggacagcgcgcagcgacttggaaggcgttacggacagtgacgcaatgtggacgattccgtggaatcgcacccaccatgcgaaacagccgcacagtgcgcaaacccttggaattccggcgatatttggcattacgacaatgagcgccgcgccatgcgcgccacatagtgagcatgacctcgttcggcattcctacaatggtggcatgagcaccgcaccgagacttgaggccgccaaacgcgattggggccacgacgagaccggatgcaccgtgctgcatatcgacatggatgccttctatgcctcattggaggtggcgcgcaaccccgggctcaaaggcaagccggtgatcatcggcaccgggccgcgcgcggtggtgtccgccgcgagctatgaagcccggaaatacggcatcaattcggcgatgccggccgcgcgcgcccatcagttgtgcccgaacggcgtctttctgccggtggatatggcgtattaccgcatgatgtcgcaccgaatcatgcacgaggtgtttttgaccgtcaccgaccggttcgagcaggtttcggtggacgagggctatatggatgtgtccgccgcactgctggagtgggggcggccgagcgcgatcggcgcgtggattcgcgctcaggtggccgagcgcttccacgtgacgtgttcggtgggcatcgcctgcaacaaactggtggccaaaatggcctcgaccaatgccaagccggacggcatgctgctgattccggcggcccgctcggctgagttcgtgcagatgatgccattgcgcggcattccgggcatcgggccgtctttggagaagcggcttaatgcttggggcgtgcattcggtggctgaattggctcagctggatgaagctgcattgactcgcgccactggctccccggctgcggcacgtggattatgggcggcctcgcacgggttggattcccgtgaaatcaccacggtgcgtgaggagaaatccattggatccgaggaaaccttggccgaggatacgcgcgatatgcgcgtggtatgcggtctgctgcgttcggcctgcgacgatgtggccagcacgctgcgacgcaagggactggtggcgcgcacgctgacagtgaagttgcggttcgccgacctgagctatcagacccggtcttttacgatggagcggccgaccgatacggccggcgtgctgtaccccgaatgcgtgcggcagctgaaagtcatgttggggctgccagcctcggcggagtctgccactcccctgcccaaaactattcgcttggccggtatgagcacgtcttcgctcagtgaggcggcggctacggccgtgcagccttcactggatgacatgctcgaagaggccgacaatgcccgcggccagacctcacaggcacgtttgcatgatgccgaggccgcactggatgccgtacgccgcaaatttggcagcaaggccgcccagtttggggcgtgaacggctcaacgccacttgcgatctcattacgccgtgagacgttcgcaggcggagcggatggcctcgtcggtggcggtggcggagaaacgcaggtaggcgggagcgccgtagaattcgccggggctggggatgatgccgatcttggcgagctcggccatatcggcccagcagtcgccggacttggccttgacccatacgtacagcgcgccggagggcatttgtgccgaatagccatatgccttcagtgcgtcaaccagcgcggataggcggcgacggtaacgcccccattgctcgtgcacggcggctgtgtccttcagacctgcggccatggcggcctgcaccgggccggggataatctgtccgatctgcttgcggtattcggccatttccttgaccagccggtaatcgccggcaaccagagccgtacggtagccggccatgttggactgcttggacagcgagtagagcaccaggatgccagctgccgaaccttcacacacatgtgaattcagggcacatggcgtggcggagagactgaatgcggtatcggaggcgggctcgttggattcggccaccggtgcggcaggcacagacgcagcagatgcagacgcggcaggcgcagaggacgaggctgtattgcggcgcaccgaacgccagtccatcaacgcatagcattcgtcggagagcaccacggcaccgatgcgacgggcagcagccacgatgtcggtcagccagtcagcggagatgacctcgccggaaggattacacggcgagttgatccagatggccttgacgttcggaatattcacccaggaatcgacgtcggtcacatcatcgactttgaccacggtggcgccggcaagttgggtaccgatttcgtaagtcgggtaggagacggccggttggacgaccacatcgccttcgccaaggtgcagcaggctggccatcagtgccacggcctccttggaacccacggtgggtacggcggcagcgttgatggacttcagatccacaccgcgcagttcgcggaaccatgtatcgatagcggccttaaggtcggcgctgccggcggtgaccgggtatccatgggcgttgggggcgtctgcgccggcaaccagcgcctgctggacactgctcggcaccgggtccacgggcgagcctacggacaggtcgatcatgccacccggcacggttttggcggtggctttgaagccggcgatacgagaccagtcgtatggcgacgaatatgcgtggaagcccatgagaacccctttcttggacggtatgttcctaagatacgacgaaccctcggccgtgatagaccgagggttcaatccgaactatgcgctgtgtgcagcgcttatccgcaaatcagcttactggttctgcggcggcagcgcggcgacctgttccgggtctttgccgattgggccattggcggaagcgccgcccaaatcgccgacttcagcgaagaagttgacagcggcatccttgtaccaagcccactcgtccggtagatcatcctcatagaagatggcctcggtggggcacaccggttcgcatgcaccgcaatcgacgcacgcgttggggttgatgtacagcgagcgggaaccctcgtaaatacagtcgacggggcactcgtccacgcaagccttgtccttgacatccacgcaaggctgagcgatcacatatggcatggaatcctccttaacagatactggtacgagggtacgcgcccgttgggacgctcctcgctctcagccgttaacggccttatcggtttcggcggacagcgtttcggtcaggtcgcccttgccgaggcgcgcatgccagtagccgtagccgaagtagatggcgacgccgaccacgagccacaccacgaaacgaatccaggtgagcacggacaggttgagcatcaaccagaagttggccacggcgatgaggatcggaatccacgggtcgccgggcatcttgaaggcgcgcggcaggtcggggcgcttcttgcgcataatcgggatggagatggccaccagcgtgaaggcggacagggtgccgatgttgaccatgtcggagagcacgccgatgtcgaagaaggcggccacgagcgccaccaccgcgccgacgacgatctgcagagcggccggggtgccatgcttgccggtcttggacagaccgcgcggcagcaggccatcgcggctcatggcgaagacgatacgggtcaggccgagcaacagcaccatgaccacggtggccaggcccagcacgatgccgaagctgatgatcttggcggcccagtcggcacccaccagttcgaaggcggtggccagcgaggggctgtcttgcttggcgagatcggcataggagaccatgccggtggtcaccacggccacgagcatgtacatgacgatgatgagcagcatgcccacgccgatgccgagcggcacgttcttgtgcgggttcttggtctcctcggaggcggtggccaccacgtcgaagccgatgaacgcgaagaacacgagcgccgcgcccgaaaggatgccgggaacgccgtacacggatggggtcatgccggtggcgaactgccacagcggctgggtcatcacgccggtgacggcggaggagccttccacggtggaggccggctggctcggcggaatgaacggggtgaagttggaggccttgacgtagaagaagccgacgatcaccacaaagaacacgatggcgatcttgagcacggtcatagcaccgtccacgcgggcgccgatcttggtgccgaatacgagcagcgtggtaaagaacgccacgatgatgatcggggcgatatcgatatggaaggagccgaacgccaggttggtgttggcgttccagcccatcaggcgcatgaagtcgttgaggtatacgccccaatacttggaaatcacggagccggccatcagcatttccagaatcagatcccagccgatgatccaggccatgatctcgccgaccgtggtgtaggtgaaggtgtaggcggagccggccaccggaatcatcgaagcgaattcggcgtagcacatcacggctgcgccgcacacgatgccggcgatcaggaagctgatgatcacggccgggccggcgtggaaggcggcggcctgcgcgcccaccgagaagatgccggcgcccacggctacggccacgcccatgattgacagatcccaccaagtcaggttgcgcttgagcttgcggccctcttcacccgtttcggcaatggtctgttcgacggatttcgtacggaacagttgcatagtgctcttctttttctctgttgtttgcgcaccgaatgcgcacaataccgacaatcgagtatagaagagcccgcgtgtcttgtctattaataagacttagagtccgcaatatatgggattaatatccaactccatcaatcaatagcgcgattacagcacgccgacgcagaccggttcgggcaccaagtccactccgaacgcgctcttgaccgcctgctgaaccgcacgcgccaaagctgcgatatcggccgcgctcgctcccccacgattggtcaaggccagcgtgtgctgcgtggatagactggccggcgcgtacgcatcgaccttatatcccttatggcagccggcatggtcgatgagccaggcggcggacgtcttggtgccgggagtgccgtcaggcagagtcgcgtcgaacttcggcgcatcttcgggcagggccgccgcttggccggcggtcagaatcggattcataaagaacgagccgcagctgtggcgattgtagtcgggagcaggcaggccgtcatcgccaacgggaacgccggcggcctcattgagggaggccagacgctccagatcggtcaggatattggcctcgcgcttggcggtggccatgtcgggcaaggcgtagcgagtgggatcctcaagcatgcccttggcggcacgtactgcgagcacggctttgcggatgtcggcggtggccatacggtcgcccacttcgacgccaagcgctttggcaagctgtccgtaacctaccgtgccttcggccgagtgggtcagggcaaaggtgacggagagcaccacgtaacgtggcgtcgggaagaatcggtcggccggctggccgggaccggcgtacatgctggccttcagtgcggagtatcgatagccgaatcgaagatcggcgggtgtgaggtcgcgcgttgttttggtgtctcgatcccagacttccaccgattcgaccgaagtggcgacttcctgtccgtaggcaccgatgttctgcaccacggaagcgccgactgtgccgggaatgccggacagtccctcgacgccctcgagcccgagctctacggtgaaggccacgaaatcatcccaattggcaccggcctcggcattgacatgcacggtgcgatcctcgccctctaccggtgcagcctcgtccggcacagtgatgaggcgtcgggcgtctcgaaccaccacgccgtcaaaaggcttatcggaaacaagcaggttggagccgccaccgataacgaccaagggcaggcctttggaatcggcatcctccacggcttcgatgagccccacgcgcgtggtcggctcgatgaaatgggcgatggggccgcccacgcccatggtggtgatgtctgcaaagcttgtcatgacttcctatcttagtggcgcaggtgcgatatcggggcaatcatcggctgaaacggcagaacgcccgcgaggggttcgttcagacgcgggatttctgccgtttctcacgcgatgcggatactgattccgcaccctaccactcggctctggagtcaatacgcaaaaacccggccgaatgggccgggttttgtaaagctgtgatgcttgcgatcaacgagtctcgcggtgcacggtctgcttgccgcagcgcgggcagaacttcttgagctcaagacggtcgggcgtattacgacggttcttagtcgtaatgtagttacgctccttgcactcggtgcaggccagcgtgatgcccggacggatgtcggcgctcttagccattgtcattcacctctgtgttcttaggtatagtgcgcgcccaccggttagcgggcgcgatttgtagcgaggaagaggctcgaactcttgaccttacgattatgagtcgtacgctctagccagctgagctaccccgccagagagccccgagtgagaattggactcacgacc

SEQ ID NO: 104 - DNA, 5124 bp, Unknown
  R206_24m  MAG No. k141_20425
cccagcaacgacttcagctactacgatcagatgctggacaccgccatcctcctcaacgtgattccgaagcgttacgagcgtctcgccttcgataaccaggaggacacgctcttcgccatggcccgcggctaccagggcgacaagggcgacgtgaccgccctgccgatgaagaagtggttcaccaccaactaccactatctggtgcccgaagtcgagtcggccgcggagatcaagctcaactccaccaagccgttcgacgagttcaacgaggccaaggcgctgggcatcgacaccaagcccgtgttcatcggcccgtacacgttcctgaagctcgcccgcaccccggaagccaccgaactcgagctcgacaagggcctggtcaacgccgtggccgccgtctacgccgaagtgctcgacaagttcaacgaactcggcgccgcatgggtccagctcgatgagccgtacctcgtgctcgacaaggagccgggcgatgtggagctcttcaagaccctgtacaccaagatcctgtccgccaagggcaacgtcaaggtgctgctcaacacctacttcggccacatcgccgacgtgtacgagaccgtcaacctgctcggcttcgacggcatcggcctggacctcaacgaaggccgcgaggagaacctcgaagccgtcgccaagtacggcgtggcctccaacaccaccatcttcgccggcgtgatcaacggccgcaacatctggcgcaacaactacgccacctccctcggcctggtcgacgctctgaagcaggtcaccgccaacgtggccgtctccaccgcatcctccctgctgcacgtgccgttcagcactgaaggcgagaccggcatctcgtccgaagacctcaagcacttcgcgttcgccgtggaaaagctgaccgagctcaaggaagtcgccgctctggccgacgccaccgaggacgagaagaaggcatccgccgccctcgccgccaaccaggccctgttcgacggcacccgcgtggccgccgacccggccgtcgccgagcgcatcggcaagctgtccgacgccgactacgtgcgccagcctgcccgcgaggagcgtcaggccctgcagcgcgaggccctcggcctgccgctgctgccgaccaccaccatcggctccttcccccagaccaaggagattcgcgccgagcgcgccaagctgcgcaagggcgaggtcaccaaggaagcctacgacgagttcatcaaggcccagatcgacgccgtcatcaagaagcaggaggagatcggcctcgacgtgctggtccacggcgagttcgagcgtaacgacatggtcgaatacttcggccagaacctcaacggcttcctgttcaccaagaacgcttgggttcagtcctacggcacccgttgcgtcaagcctccgatcgtctggggtgacgtgtcccgcgccaacccgatcaccgtggaatggtccgcgtacgcccagtccaagaccgaccacgtgatgaagggcatgctcaccggcccggtgaccatcctcaactggtcctggccgcgcgaggacatcacccacgaggagcagaccaagcagctcgccctcgccatccgcgacgaagtgctcgatctcgaggccgccggcatcaaggtcatccagatcgatgaggccgccctgcgtgagaagctgccgctgcgcaagtccgactggcacgtcaagtatctcgactgggccgttccggccttccgtctggtgcactccgccgtcaagccgaccacccagatccacacccacatgtgctactccgagttcaacgacatcatccgcgacatcgacgcgatggatgccgacgtgatctccttcgaagcctcccgtggcgatctggtggtgctcgacgccattcatgacgcgcacttcgagaccgaggccggcccgggcgtctacgacatccactccccgcgtattccttccgagaaggagatcgaggatcgtatctacgagatccttgacaagatggacgtcaagaaggtgtggatcaaccccgactgcggtctgaagacccgtggtaacgccgagacctggccgagcctggagaacctggtcgccgccgccaaggccgtgcgcgccaagctcgacaagtagcggaaatcaccgagctccctctgtatgagggagctcgggtttatgtaaggaaatcagcatgcattccccgatgttcacccttgaggtctttcccccgaagcgcaacgctcccgtggacaccatctatgacaccctcgacggactcgaagggctgaaccccgacttcatctccgtgacctacggtcacggcacccattcggatcgcaccgccaccgcgcgcattgctcatacgatcagcaaggagtacggcattcccgcagtcgcgcatctgaccgcgttgtattccgacaaggcgaaaatcgacgaggccctcgacatgttcgagcaggccggcgtgagcgccgtactcgcattgcgcggcgactacatcgacggcgagcagctggtaggcgagttcaaccacgccagcgacctcgtgtcatacatccgctccgtgaagccgggcctcaaagtgttcggcgcctgctacccggaaggccactaccaggctgactcgctggaccaggacatcgaaaaccttaagatcaaggtcgatgccggcgtcactcacctgatctcccaactgttctacgacaacgaggacttctatcgcttcctcgacaaggcgcgcgccgccggcatcaccgtgccgatcgaggcgggcatcatgccggtgcgtggtgccaagtccgtgcgtcgcatggccgaacgcaacgcctcgcgtatcccggacaagctcaacaccctgctgaacaagtgggaggacgacatccagtccctgcgtgccgccggcatcctctacgcttccgagcagatcgccgacctcgtggcccacggcgtggacggcgtccacctgtattcgatgaaccaccccgccaccacgcgccgtatctggcgcaatgcggaaccgttgttcctcggtacgcaaggttgacgcatatcgcggcgcggcgcatctcaatgcgtcgcgccgcacgttaatctgctggcgaaacccagagttcccccagcggccgatggatatcatgaacgtacaagccaaccaaagcgatggaaggaagtccgttatgtgcactggtgtccgtttctccgatgatgagggcaacacctatttcggccgtaatctcgactggagtttctcatatggggagaccatcctggtcactccgcgcggctaccactatgacacggtgttcggtgcgggcggcaaggcgaagccgaacgcggtgatcggcgtgggcgtggtcatggccgataggccgatgtatttcgactgcgccaatgaacatggtctggccatcgccggcttgaatttccccggctacgcctcgttcgtccacgaaccggtcgaaggcacggaaaacgtcgccacgttcgaatttccgctgtgggtggcgcgtaatttcgactccgtcgacgaggtcgagaaggcgctcaggaacgtgacgctcgtctcccagatcgtgccgggacagcaggagtctctgctgcactggttcatcggcgacggcaagcgcagcatcgtcgtcgagcagatggtcgatggcatgcacgtgcatcatgatgacgttgatgtgctgaccaatcagccgacgttcgacttccatatggaaaatctgcgcaactacatgtgcgtcagcaacgagatggccgaaccgacttcatggggcaaggcctccttgaccgcctggggtgcgggtgtgggcatgcatggcatcccgggcgacgtgagttccccgtcgcgcttcgttcgtgtggcctacaccaacgcgcattacccgcagcagaacgatgaagccgccaatgtgtctcgcctgttccacaccctcggctccgtgcagatggtggacggcatggcgaagatgggcgacggccagttcgaacgcacgctgttcaccagcggatattcgtccaagaccaacacctattacatgaacacctatgatgaccccgccatccgttcctacgccatggccgattacgatatggattcctcggagctcatcagcgtcgcccgatgactccttcccggctcatgccccattcggagggcatgagcgtatatagtggaatcttatggaatcgtcgatgttcaaacccagctccatggatctcatcagggcaggtctgcaagacctcgacaaggcccgcaccttgttcgaccagctcaagacggacgacattcccgatgagcgatgcgccgaactgctgagcatgctggcccacgcctgcgaccccgatatggcattgagcaatttcgtggatatcgtcaacgcgatgcaatccagccagcgcgatctgaaacatgtcatccccgacaacgacgccctgaagcgtctggtcacggtgctcggcgtctccgacgcgatgggcaagttcatgcgcttcaagccgcagcttgtggaggccgcagcagtcgacaactgcaacagccatctgttcaatcacgcgcaacgccgtgcacgtctgctcaaggcggtcggcgcggacccggacgaaccggccatgcccgtcgcctccaaggatctggccgaagcggccacggccttgcgttccagctaccggaaccaactggccgccatcatcgcccaggatgccgtggcggacgacccggcctccatccaaccgaccatcagccgcgaactgtccgacctcgcggacgcggcgctcgaaggcgcgctggccatcgcccgccacgaaaccgagggcagcgagcacgtgcgcttcaccatcatcggcatgggcaaactcggcgcacaggaactgaactacgtttccgacgtggacctcatctacgtggtcgaaccggtcgacaaggacgtggaccatcagacgctgattcgcgtgggcaccaagatgggcaccatgctgcagcgcgtctgccagtccgccatcatgggcgtggccgagcagccgctgtggcagatcgacggcggcctgcgcccggaaggcaaggacggcgcgctggtgcgcgtgctctcctcgcacaagaactactacgagcagtgggccgagaac

SEQ ID NO: 105 - DNA, 13550 bp, Unknown
  R206_24m  MAG No. k141_20591
tcgccaccatcgatgccggctggcgcggccagattattccgggcgatggtcgagatatacgtcagatcgttggacagcgtgtcgtgcagttcgatcgcgagctggttgccgtggcgcagatcggccagcgccgattccatctgctcgttttcgttctcctgattcaccacgcgcttgcgccagcgcaacgcaatgcccagtaataccagcagcacgcttgccgtcaacgccgccgacgccgtgaccagccacgacccggtcaccgcatagacgatggccgccaccgcaagcacaccgatcgggccgaacatcgccagcggatgattgagttctatatcgatatcaatctgatgatgcttcttgccgtcggcgtgaccatacgaatacgacgaatgccgcgaaatgataatcggacgtttcaccggcccgctccccttatgcgccttgcgcttcttctaccatgtccccacacacccatcggcgccttcatcagtgcaggttcatgcgaatccatgcgccgataagttccttgagattgccagcgccgagcttgtcggccgcacgcatcagatgcgtgcgcacggtggtttcggtgatggacagttcggcggcgatctgcggcatagtccggccgcgggaccacagttccgcaacctccatctcacgcgcgctcagacggttgtccttctcggccttgatgcgcgcggacgcaacggccgcggtctcgaaccgcacgtcgccaccatcgccccatattttgccggtctgcacctggcggatagccacggcctgcaatcgcacatcatcgttcttgctcatgatgccctgtgcgccggcccgggccatctcctgggcatgtcggcccacaatcgaggcggtaatggccagtatcgccgtggtcgcgttttccctgcggattgcacgcaccacatccggaccattgatgtcgttcatcgcgatatcggccaatagcacagcaggcgggtgtttggtggccgtgcacagctgaatggctttgctgccttcgctcaccggcggcaacaattcgaagtctggcagggccttcgacaaaatcgactgtaatgccatcagggccatgcggtcgttgtccatgatgagcatggtgggccttggcccatcctgcccgctgatatccggcatatgcctacgtgcgctcagctcttcttgggcttgagcgcggaaggcatgggcatcggaatcggcttacggggagccggtttcggtacattgaccgccttcttgggtgccgatgcggggaattctccactggtcgccttggctgccgcttcggctgcccacttggcgtactcgtcgaggtcgtcctcctgcgcggcgggagctgcctcggcggcaccggaagcgtggtcgtcagcagcagaatccacatccttgtccgcatactgatcatcaatatcggcgaacgggtcaggagagcccgttcccggctcctgctcgctcagctcttttgccagctcatcgtaatcggtatcggtggtcaggtacttgagctttcgggcaattttctgctgttttgctttttgacgtccgcggcccatctgaccccctgcgattactgtgctgttcgattcatcaacaatagagagtaccactaatagtggcttgttcgttgtcggctcacacttttaccataaaaagcgtttatctgagccctatttaaaggattttcgcatgaccgacgagcagcaactgacagcggcaggcaatgagataagcgcgagcttcctcgcggccaaaaagcgttcggacgaaacgctcgccaagctggaggccaagccgtcgtccttcaccatgttgaccggcgaccgcccgaccggccggctgcacctcggccactacttcggctcgatccgtgagcgtgtcgccatgcaggagcgcggcgtcaacacgaacatcatcatcgccgactaccaggtgatcaccgaccgcgacaccaccgagcacatccaagacaacgtgctgaacctggtgctcgactacatggccgccggcatcgatccgaacaagaccatgatgttcacccactccgccgtgccggccgagaaccagctgctgctgccgttcctgtccctggtcaccgaggctgagctgcaccgcaacccgaccgtgaagtccgagatggaggcgtccggccacgcgctgaccggtctgctgctcacctacccggtgcatcaggcgtgcgacatcctcttctgcaaggccaacgtcgtgccgatcggcaaggacaacctgccgcacgtggaaatcacgcgcaccatcgcccgccgtttcaacgagcgttacgccaagaagaacccggtgttcccggagccggccgccattctgtctgaggcaccggagattccgggtctcgacggccgcaagatgagcaagtcgtacggcaactccatcatgctgggcgccaccgccgaggagaccgccaagctcatcaagaagagcccgaccgattccgagcgccgcatcaccttcgacccggttgcccgcccgcaggtctccgccctgctgaccaccgccggcctggtgaccggccgcgacccgaaggacatcgccgaggagatcggtgattccggcgccggcgcactcaaggcatacgtcatcgaatcagtcaacgagttcctggccccgcaccgcgagcgccgcgccgagctggccaaggacatggattccattcgtgacatcctgcacgacggcaacaagcgcgccaacgccatcgccgaggagaccctcgaccaggtgcgcgaggccatgggcatgaagtactgattttcccgccgctcgtagcaagacgccgtgtcagccccaactgggcaactgacacggcgttttttgtattgcggcgtctggtgtgtcctatcttcacttcgaggggcggatttctcgttttccggaggtctatctccgcttcgaggggctgttgctcaagtaggcgaggcacaaaaacggcggaatgacgttggcgtgaatgggattttatctgagattgagcgcatgaccagccccttgaaacggagatagacctccggaaaggctcaaatccgccccttgaaacggagaatcaagcgttagtaactctcaattcaaaaaacacaacatgttttccgtgcaacgcggctatcaagacggacctctggtcacttcatgccgatggcttgcatcaatacgtacgctccccgcacagcaatgtcattacgacgtgttgcggcatagcgcgcatggcttccggagtatcggcggcgtatgggtcggcgtccaacaacaccatatcggccgggtcgccggatgcaaggcggtcacggccagtggcggtcgaggctgccagcgaagtgcgcacatcgaggcactgctcgggctggaacggctcgcggtcagagctttcggagccgaacacggcggcggaaatggccagccacgggtccagcggggccacgggcgcatccgagcccatgcgcagcgtggtaccggcgtcgtggagggccctgaacggataagggataccggccgggttggcccagaaacgggtgatgacgtcgcggtcatccatggcgtgctgcggctggatgctggccgtgagccccagctcggcgaaacgcgggatatcgacgggtttgagcatctgtgcgtgctcgatcgatccatgtgcgtgcgtggcggcgactgcgttgagcgcaatggtgttcgcttcgtcgccaatagcgtggcaggcgatgtcgaagccatgctcggtggctaggcgcatatagtcttcgatttgctgcggcgtgtagctcagcgtgccatacgtcggcggctcgatgcccgaatacggcgtggagcagtaggcggagcgggtgttgagcgatccgtccgagatgagcttcatggcgcccacatggccgagcccggcgctgcccggcagtgggttgccggtatgccaacccgcgtcaatggcggcttgcaaccgctcggggtatacaccggcgtccacgcgcaaaccgttaatgccggccgcgaaacgattggtccatgtatcgatgttttcggccatttcataatcgcggatgcccaccacgcccttgcttgcggcgtcctgttcggcctcgcgcagcagacggtcagtctcttcagcagcgcccggcaccttgtcgaaggcggtgtaggcgttgaaccattcgagttcaccgaccagaccggattcgtccacatgtacgccaagcctgcgggccgcggcggagttcacccatccgcagtgcatgtccgcgctggagagggccaccggctgttcgccggtcacggcgtcaattgcagccagtgtgggctgctcgtcgtcggcccacagcgagtgacggaatcgcatgcccaccacgaaggcatctgggtcaagcgtgccggcggcgcggcgctcatccagatgacggcgcaacatgtccatcgcttcggcggcggaacgggcattgatgaggtccagtcggcccagcgtcttagcccattgcgtgaagtgcgtgtggcagtcccacaggccgggaataacccacaggccgtcggcgtcgatggtggtttcgtcagcaggtgcggaggccgacgttgggattgagacgctgccagaagcaatggcattcgtcgcgtatgccaacgatgtcgtatgcgccttagtctgcatcgtgccgtccgaagccgagaccgttccagcagggccgacagacgcaacaaccccatcgcgaagcaccacatccacgtggccctgagaccccggaacaccggcattgacaatacgcaccaagctactcatacccgccatcatgccacctttgcatgaacgccatggagattcgttcaagctgaatcgcaccgtcggcggcgattcccgctggctgcctgcaaacccctacgttccatgtaattgcgggatggcctgcaactgcgatgaacacccatagtttatccaccgacttatccacatttatccaccgaaaaattggggcggtagacagggccggtagccggaccctacactgcgaggacaaagcgaacatcacgaaggggtgatcatcatgggtagctcaacggcattgaccgagctgacaatgcagaagtatcaacgaatgcagacgtgcgcagatgttcaacgacgaagcgcatggcgcccaccctatgccctgacaacagcattggagcttttgtcaattgaagtaccccgcatatcaagcaaacacagaggccttgcaactacaaccattgttgcggttccacatgccaatgacaaacggcacattgtgggggtcaaagtggttgtatggcctttcccactagacacggtcataatcgagggacaattcacatgcacttcaccagcttgcacatgggccatgttctccgcgtatctcgaacttgaagaactcatcgttctcgctgattccatgatgcgacgagatcgaaggctctgcagaacaaccatcgacgccctttctctgtatctcgatgaggccgaggcccaggtgcgagccgacaaagagaatggcaccaattcgtatttgttccgcgggtataacaaatgccgtcgcgccctgcttttggcgcgcgcgggcacagattcctccatggaaacacgaactcgtttggttctcttgaaatacggtctggattgcccgcaggtgaattatccaatattcgtaggaaacaacaccagacccatatatctcgatcttgcataccctgaattcaaggtatgcatcgaatacgaaggctctcatcatgccgggcaatggctgaatgacgcgagacgccgccagatgatcgaagacgctggctggaagtacattcaagtcaccaaattagatattggcgacgaagcgggagaagaggcccttgcccgaagagttgccgaaaggatacaggaggttacgggcaaaacggtccagctcacgatgcggcaaaccacccagcaaattagcgatgtccgaaagctacgccgtattccgctgtacaaacggctgaaattcgagcctctgctgccgattattccgacgacgcaggaataataagcccggtagagtcagtccgcaccgtccgcaccgcgctacggtattcaaaacccatttcaaggggctgatttggcctccgccggaggtctacttccgtttcaaggggctgatcatccgctagatcacgtgtatcaatgcccttacgccaacgccattccgccgttttggagccgcgtctactcaggcatcagccccttgaaacggaagtagacctctccagaacgtcaaatcagcccctcgaagtccgttttggcctcaatggttcctgccgaaccacaaaaaagccactcctctaccatacgagccgaccgcacagcaggcacgtgtcatttgccgctgcggacctcggactccatggcttccatgggctcgtcgacgagcacggtgccggacggcagggtgccgggcagcggatcgtccatgtagtggtcgaactcgtagagcatacgctcgttcggtttggcggtcagcaacgaaaccaccacgatgaacagcagcgaaatgatgaacgccggcagcagctcatagatggcgaatacgccgcccaagggcttgacgaggttgtgccagatcagcacggccgccgtgccggacagcatgccggccacggcgccggccttgttggcgcgacgccagtatagcgagcacagcatcaacgggccgaatgaggcgccaagcccggcccacgcgtaagacaccacctggaagatcgacgagttctggtcgtatgccaccagaataccgaacaggaacatgaccaccagcgtgaccctggccacgatcatgacctgcttgtcggtggccttgcggtgcagcagcccgcggaagatgttctcgcccatggccgaagcgccgatgatcagatacgaggagctggagctcatcgaggccgcgaaaatgccggagaccaccacgccgcacatgaagctcggcagcagggtctgcgccagcacgatgaaaatggtctccgcatcggtggaggtcagcagttcggtgggcatcatcgcacgtcccaccaagccgatgcacaccgcgcaacccagcgaaatcacgcaccaggaggtggcgatgattcgggacttgcgcacttcttccacgctgcggatggacaggaagcgcaccagcacctgcggcataccgaagtaacccaggccccacgccagcatggagatgatggtgatgatgccgtagtcggagggcgcgccgaacacggccttgcccgcctcgacgagctgctggccggtggccgggtccagcttgggcgcggccacctgcgtgccggacaggtagccggggatggcacgcaggaattccacggtgttgtcgacgccgcccgcgctggccacggtgccgatgaacaccaccgcgagcgcgaagaacatgagcatgccttgaatgaagtcggtcatcaccacggacaagtagccgcccaccacggtgtagacgaacacgaccaccgcgccgatgatcatcatgacgtggtagtcgaaaccgaacaacgtggcgaacagcttgcccacggtcacgaagcagctgcccacgtacacgctgaagaacaccaggatgatcacggccgcgatggtggagaccacgcccttcttgtcatggaaacgcttggcgaagaagtcaggaatggtgatggcatcgccggccactaccgagtagcggcgcagtcgccgggccacaagcttccagttgagataggtgccgagcgccaggccgatggcggtccacatcgggtcggccgcgccggtgaagtaggccaggcccggcaggcccatcagcagccagccgctcatgtcggaggcttcggcgctcagggccgtgagccacggccccacgccgcgcccgcccgcaaagtattccttggaagaggagttggagcgtttggagtagatgaatccgatggacagcatggccgcaaaatagatgaccatggccagcagaatccagaaatcgttggccaactgcgacacctccccaatcatgacgccaagcggctaccgccatggcagaactatgtgctgatatgcgtgctgatatgcgattgacgccggagcggcgtcatacagaccgtcacagccgtgaatacggccgcaacgcacttcgcctgatggtagtggatacaagggctcaagcaccttccaccgtttccatactgagacgctgttttatccgagctcccctcacctgaggggagccaagatgacggtcagatgtcgtagcgccaggacttgtcggtcaccacgcgggccatcgccaaaccgatcggcagacagataatcaccatgaacgcacggaacgcccagtccagcgcattcatggtctggaagctgccgaggtaccacatggcacggtacatatacagaccgggcaccatgatcacgatcgacggcacggtcaggcagatgcgcgggtagccgaggtgcggcggtagccagccacgtcgcacggatgaacgccacgccgatgccagaatgcccgccaggaacgcgccgatgaaggtagccatctcaggagccatgccgaagtcctgcaattccagacgcagcgtgtccgtgatcgcaccgatcagggcggcggccaggcacatgcgctgcggcgaattgaacagcacggagaagccccacacgccgacgaacgccgccacgaaccgcagcaatccgttgacccacgggtcaagccccagcggttcaaagccttccgggtgcaggtgcaccatcacggccacggcccagcctgccagcgtggccatcaggatgatgcacagcacgtacgccacgcgctggatgcccgaggggaagtcgattttcgccatgtcgagtccgccggtgatgagcgggaaaccggggatcacgaacagcatggcgccaatgtaggccgtatcgtgcgagagcgcgactgggtcgaaaatgccgatgagtcgcagggtgccggtgcaggcgagcgccgccgcggccacgcacacaaaggtgacgaagaactggttcagatggtatgcaaacagccggcgacgcatccactggccaaggcccgcgcccacgaacgcaccgatcatgtcgtatgggccaccgccgagcaggaacacgaaggccgcgcaggccagggcggaggccagaccggagaaccacggcttgtacagcggcttgcggcgctcaatcagatcgagtcgctcgtgcgcctgccgcacggtgataccgcccttggccttctcttcgtcggagcgctcgttgaagtgttcggcgtattccttgggcacgcgattcttgcgcttcgtactgcttgcagcagggctttcggcggttgcgccgttcgccgccgcgccctcagcgcccgcctcggcattcgctgcgttcgccgattcaaccgactcattggagtcaccggtaaacacttcggcatcgtcgtaggccttctcttcggccgctttgtcttcgaccgaagtgacttccgcgctgtccgccaaaagtcggtgggcttcttcattgtcatcatccaaggacttggccacggaggtcacgagtaccttggttttcaacgcaagatccagcgcctcgtccacgctgccgttggccgcctcagcctcggccttggcacgttcgcgcaggcgcttggccagatcagcagaatactgcgaagcgtcacgttcgtccaaatgcttgaccacgccatcggacagttgcgaatcgacgtgatacatcgaccccttgccgagattcacggagaaccagtcggcgaaatgttccagcagccagatacgttcggtgttcacgccggtggtcggcaaatccacgacttcggtgatgcggttacgaccatccgtgcaggtggcctcgatatccgtcaggttcacgtcggcgcgtacgtgcacgcccagcgggtaggcgatgcggtgcatcatttcacgcacgcggaaggagccggtgccggctcccaggtccagcatgccgacccgtacaatcacgctggctttggcggcgataccggcgtccaccaccggtttttcccaatcgcgcgcaatatcttccatgtccagcggaatggagtgggtgtggaatttacgtacagccgttgcgcctttcgcttcgggcgcactttttttcttctgttcgctcacatccctcattactactccctgcctcccccgccagcaatcgtaaggtgctcaaatcttccgcgaatcggacagtgtctcatatgctgtccgatattcggtctctataggtggacaacttggcgcactatatggactccgtaacgcaaatagcgatttcgcggggatacactattgcccacacaacaaccacgttgaatatgggctgtgggctcgcaacgactggcctcaacaactgcggaggagccgcagacgaccggtagaccgagcaacctgttattcggcaaaggaggttatatggcaacacctgaagaacagatcactcccgctgacgccgccatcgtcactaccgggaccggccgaaagggcccggaggagcatgatcttcccgaaagcctgaagtacgacatggatctgtgtcttgagatcctgcgtaacgtactgggcgaatacaaccccgaactgctgtctacgttcgacaccgtgcgtcattacgcggtggaggccagcgccgagcatttcgccgagctgaaggatccgaaccccgaccaggatggcctgaaggaggccgtgaacgtcatcgacaacatgacgttgcacgacgcccagctgctggcccgcgcattcgccacgtatttccatctggcaaacctgtccgaggagaactaccgtgtttccgtgctccacgagcgcgagaacaacgtgtccgttgaccaggcggtcgacccgatcaacgagctcaccgtcgcctaccaccagctcatcaatgagactggcccggccaaggccaaggaactgctcaaccagctcgaattccaccccgtcttcacggcgcaccccactgaggcccgtcgtaaggccgtggaaggcaagatccgccgcgtttccgaattgcttgaggagtacaagcgcctcggcggctcggataagaaggaatgcctgcgccgtctctacaacgagatcgacgccctgttccgcacctctccgatcgcgctgaagaagccgaccccggttgaggaagcggacacgattctcgacatcttcgacaacacgctgttcaacaccatccccaaggtctaccgtcgcttcgacgactgggtcctgggcgataaggccggtctcgtcgagcccgcttgccccgcgttcttccacccgggcagctggatcggctccgaccgcgacggtaacccgaacgtcaccgccaaggtgagccgcgccgtggcccgcaagttctccgatcacgtaatcgccgcccttgaggaagccacccgcaccgtgggccgcaacctcacgatggaagccgagaccacgccgccgagcgccgagctcaagagcctctggagccaccagaaggaaatgagcgagcgtctgaccgacaaggccgccctgatctccaccaaggagatgcaccgcgcggtcatgctggtgatggccgatcgtctgcactacaccatcgagcgcgatgccgacctcatgtaccactcctgcgacgacttcctcgccgacctcaaggtggtccagcgttcgctggccgccgccggcgccaagcgttccgcttacggcccgctgcaggatctgatctggcagaccgagaccttcggcttccacatggtggagatggagttccgtcagcactccgtggtgcacgcccgcgcccttgcggatatccgcgagcacggcctgcacggcgagcgcggcgaactgcagccgatgacgcacgaggtgctcgacaccttccgcgccctcggtgccatccagaagcgcaacggcctcaaggccgcccgccgttacatcatctccttcaccaagagcgcccagaacatcaaggatgtctacgagctcaaccgcttggccttctcccacccggaggacgtgcccaccatcgacgtgatcccgctgttcgagcagcttgaggatctgcagaactcggtggacgtgctcgaggaaatgatcaagatccccgaggttcaggctcgtctgaaggccaccggcaacaagctcgaggtcatgctcggctactccgactcctcgaaggacgccggcccgacctccgccacgctggccctgcactccgctcaggagcgcatcgccaaatgggctgagtcgcacgacatcgacctgaccctgttccatggccgcggcggtgccgtcggtcgtggcggcggccccgccaaccgcgcggtgctcgcccagccggtcggttccgtcaagtgccgcttcaagctcaccgagcagggcgaggtcatcttcgcccgttacggcaacccggtgctggccatccgccacgtcgagtccgtggctgcggcgaccttgctgcagtccgcgccgagtgtggagaagcgcaacaccgagatgaccgagaggtacgccgacatggccgctcagctcgacgaggccgcgcacaaccgtttcctcgacctgttgaacaccgatggcttcgctccgtggttctcgatcgttacgccgctgaccgaaatcggcctgctgccgatcggctcccgcccggccaagcgtggcctcggcgccaagtcgctcgacgacctgcgtacgattccgtggatcttctcttgggcccaggcccgcatcaacctggccgcctggtacggtctcggcaccgcatgcgagaagttcggcgatctggagaccatgcgtcaggcttacgaggaatggccgctgttctccacgttcatcgacaacatcgagatgtccatcgccaagacggatgagcgcatcgccaggatgtaccttgccctcggcgaccgcgaggacctcaatgagaaggtgctcaacgagatggagctcacccgcaagtgggttctggccatcgtgggtgacaagtggccgctgcagcaccgtcacgtgctcggccaggccatccgcatccgctccccatacgtggacgcgctgtccgtcacccaggtgctggcgctcaagtcgctgcgcaagaaggtggacaaggaagagctttcgcaaagccagcaggcaggattcatctatctgatcctctgcaccgtttcaggtgttgctgccggcctgcagaacacaggctgatccgcgcctgaccgaccgacaaaagcgagcggggaggttccgtgccgattgacggcgcgggcctccccgttcgcgtcgcacggccctagactggccggcgacggcgcgcatagaacgggcgcgctggccgagtgacagactcggatgatcgaaaggggacatatgaatgaggagaaggacacggacggaacgacggacgcgcacgagggggaccacacgcccgcggacggtgccgggacggagggcgaaggcggcaagccggacactaggccgggcgacagactcgcgaccatccgacgcacgctgtggtggataggactggcgctaca

SEQ ID NO: 106 - DNA, 35678 bp, Unknown
  R206_24m  MAG No. k141_20669
aggtgtccaagctcatcgacaacctcgatgacctcgacgatgtgcagaacatctactccaactggaccgcttccgacgaggtgatggcccagctcgacgaggagtaatcctcgtgattatccttggcgtcgaccccgggctcacacgttgcggggtcggcgtgatcgaagccggcgagcaccgccggctttcgtttattcacgtggacgtggtgcggtcctcaccggatatcacccaggatctgcgtctactggccatctacaacggcctgtccgagaaaatggatcgcttcgcacccgatgccgtatccatcgaacgagtgttcgcacaatccaaccgcaacaccgtactcggtaccgcacaggccgccggcctcgccatgctcgccgccgcgcaacgcaatattcccgtggcgttgcatacgcctaccgaagccaagctggctatcaccggtaacgggcaggcgcagaagattcaggtggagcgtatggtgacacgtattttgaacctcaccaaaatgccgactcctgccgatgccgccgatgccttggctttggccatttgccatgcgctgcgcccggcaggcgcattgcagggcggcgaacgcgaacaacatctgaccgccgcgcaacgccagtgggctgaggccgcacagaaatccacgcgccgccgcatcaaccacgaccgaggcatgtagtatactttcgaacagttgttcgagtcttgaatcctggagccctgaaggagtacctgtatgatcggcatgctgaccgggcgggttgaatcggtcgaaaccgataccgcattgattgatgttgggggagtgggctacgaagtgcgcatgtccgccaccgacctgagccgtctgcacgccgggcaagacacccgcgtcttcacctatatgaacctctctcaggatgccattaccctgcatggattcctggatcgggacgccaagaaaacctttctgcaactcatcaaggtctccggcattggacctaaagtggcccaatcgttactctccacactgacgccgagtcagctggcccacgccatcgccgacaacgacgccaccgcgctggccaaggctccggggctgggcaagaagggcgcacagaaaatcatcctcgagcttaagggctctattgatttgagtcagatcgagggtgcttccgctcaggcggcaatatccaagtctccggtggataccggtacggaacaggttgtcgaaggactgatttcacttggctggcgtcagcaggacgcccagcaggccgttgccgaggcttgcgccgaaaacgatattcccacgccgcttgccaccgacgatgtgccgcgtgtgctacgtctggctttggcgctgatggataggggccgctgatgagcgagacaacggattacggtacctcaaacaccggtgccaacgaagagtcgttgcgcatggtctcctcccagccgatcggcaacgagccggtcagcgacgaggagctgcgcccccatgttctcgaaggctttatcggacagccacggctcaaggcccagctgcaactgttcctggacgcggcccgcaaacgcgatgtgccaccggaccatattctgcttgccggccctcctggcttgggcaaaaccacgttggccatgatcgttgccaatgagcttgaagtgccgattcgcgtgacttccggccctgcggttcaacatgccggtgatcttgcttcgattctgagctccctcgacgtcggcgaagtgctgttcatcgacgagatccatcgtctgccgcgcgccgccgaagagctgctgtatatcgcgatggaggacttccgcgtcgatgtgatggtcggcaaaggcccgggcgcaagctccatcccgctgaccctgccgcgattcaccgtcatcggtgccaccacgcgcgaaggtatgctgccaagcccgttgcgcgcacgctttggcttcaccgcacatctcgacttctatccgcatgaggagttggaaaagctcatcgaacgttcggccaacgtactgggcgtaaaccttgatgcgggttccgctcatgagcttgcgttgcgttcgcgcggcacgccgcgtatcgccaaccgattgctacgccgtgtacgcgactgggccatcgtccacgacctgatcgtggtgcggccggacgacgtcaaggaggcgctggccctgtaccagatcgactccgaaggcctcgaccggctggacatcgccgtgctcaatgccatcgtgcgcaacttcaacggtggacccgtgggcctgaacaatctggcggccatggtgggcgaggaatcggaaaccgtggaaaccgtgtgcgagccgtatcttgtgcgcgaaggttttatgattcgcacgcccaaaggccgcgtggctaccgagaaggcatggcagcatttgggaattacgcccaaagatgatgtcagcaagctcttctagactttctcctgtttgcacacttggcggcgtttcgtcaatgtcgctcgtttgaaggagttgtttcgtggaacaacagtacattatgctcatcgtgatcgtcgtcgtgttcggcggcatgatgtggtggcagtccaagaaggccaagcagcaacagcaggagaagcaggacttccgtcgcaacctgcagcccggcaccgaggtcatcaccatcggccaggtgatcggcaaggtcgtcgaagtcgacgagcagtatgaggagatcgtcatcgactccgaaggctccaagctgcgtttcggcttcaacgccatcgcccgtgagtacacccgcccggcctatgtgtccgatgatgaggtcgacgagaacggcaacccgctgcccgacgaagacaccgaggctccggctaacgatgaggctggtcaggttccgatcgaggcgtccgtcgtgtccgaggaagacaccgctgacgagaccggtgacgacaacgaaaccaagacgaagtaagctgttcgattcggtagcaccatccgagtatcgcatcgcaaaggcataaaaggggcgagcactatggcacagtcggacatcaccatcgacgcattgagcaaggtagggcaacaggacgccgaatatctggtgtccttggtgcgttccataccggggtttcccaaggaaggcattatcttccgtgatttcatgccagtgctcgccgaccccaagggcttgaagattctgctcaaggcgcttgaaacggctctgccggtgtccccgagcgaattcgactccattgccggtctcgaatcgcgcgggttcctgttcggcccggccatggccgcccatctgggcaagggtttcatcgccgtgcgcaaggccggtaaattgccgcccgaaaccatcggtgaatcctatgacctcgaatacggcacggccagcgtcgaaatcgaaaccgacgccgtacaggcgggggagcgagtgctcattgtcgatgatctcatcgccacaggcggcaccgccaaagccggcgccgaccttatcgaaaaggcgggcggcactgtggtgggcttcagttttgtgatgcggctcgatggtctcgacggtctggataagctcggcggcaagcccagcagctcgctgatcgcgatgccggcctgagattccgtctcacccaacgtacagttagttttcaaggtccggcatgtactgtgtacagttatatgccggaccaattacatagtcagggaaggatcgatggatctttacgaataccaggcgcgtcagctgctcgaggaacaggacattcccaccccggacgccatctttgcccagaactcccatgaagtcgccgaagcggcggacaaaatcggctatccctgcgtaatcaaggcgcaggtcaagatcggtcatcgtggtcaggccggcggcgtcaagatcgcccataaccgcgacgaggcgattcttgaatccgagtccatcctgccgatgaccatccacgggcacaaggtttccggcgtgcttgtggccgaagccaagaacatcctgcacgaatattacgtgtctatctccgtggaccgcacctcgcgcgacttcgacgtgctggccaccgccaacggcggcaccgaagtcgaggaaatcgccaaggaacatccggaggccgtcaagcgcctgcacatcgatgcactcggcgacttcgacctggccgctgccaccgaaatggcacagagcatcggcttctaccacgcggacgtcgatcaggccgcgcagattctgctcaagatgtggcgctgcttcaaagacaacgatgccacgctcgtggaaatcaatccgctcgccaagatcggcgacccggatgacgaatccaccaagcagctgagcgccttggacgccaagatctccttggatgacaacgcctccttccgccatgatggctgggcgcgtttcgtggatctcatcgttcccgaccccttcgaacagcgcgcccgcgaacacggcctgcactacgtgcacctgcacggcgaggtcggtgtgatcggcaacggcgcaggactcgtcatgagttccctggatgccgtctccggcgctggcgaggaacagggcaccaacatcaagcccgccaacttcctggacatcggcggcggcgcctccgcagccgtcatggccgaaagcctggagatcgtactgtccgaccctcaggtcgaatccgtgttcatcaatgtctatggcggcatcacctcctgcgtggaagtcgccaacggcatcctcgaagcggtcgccaagctcggcggttccaagccgatcgtcgtgcgtttcgatggcaacgccgccgccgagggtctgcatatcctcgcttccgccaacaatccgaatatccatgtgtccgaaaccatggaaggcgcggcagccaaggccgcgcagctcgccggtgaggcgacccagtccaaggaggttcgctgatgctgttcatcgaagacggcgctcccgttatcgtccagggcatgaccggccatcagggcatgacccacacggctcgcatgctcaaggccggcaccaatatcgtcggcggcgtgaacccgcgcaaggccggcacatccgtcaccttccccggtgccaagaacggtgccgacgtggacatccccgtgttcgccacctgcggcgaagcacgtgaagccaccggcgccaaggccagcgtggtgttcgtgccgccgaagttcgccaagtccgccgtggtcgaagccgtcgaagccggcatcgaactcatcgtggtcatcactgaaggcattccggtggccgattccgcatacttcgtcgaactggcgctcaagaagggcgtgcgcatcatcggaccgaactgccccggtttcatcacgctcggcaaccctggcgtcaacttgggcatcatccccgacggcattgtcggccgcggcccgctcggactggtctccaaatccggcaccctcacctaccagctcatgggcgaactgtccgatatcggcttcaccgcatgtctcggcgccggcggcgatccgatcgtcggcacgacgctgctggaagccctgcaggcattcgaagccgaccccgacaccaaggctgtcatgatgatcggcgagatcggcggcttcgccgaacaggacgccgccgcatgggccaaggagcacatgaccaagccggttgtcgcctacatcgccggtttcaccgcccccgaaggcaagcagatgggccacgccggcgccatcgtctccggaggcaagggcaccgcccaggacaagaagaacgcgctcgaagcggcgggtatccccgtgggcaagaccccgggccaggccgctgaaatcatgcgcgacatactcgccaaggccaacatcgactgatcggttccaaccaatcgtgatgaaagccgtgattcgccaatgggtgcggggagccatagtcgccctcgcatccatggccatctatgccgttgcattaggttgctatacagcgctgatgttattggttgtctccatggaagagggcggcgacaatctcaccgtcggcacaacctcgctgacacaggccgttgtgcttctgagtgagggatcgggctctagaaccgattcgttcaccctcaccatcacgccattgatgttgaccatactgctgatatggctgatcaatgcactcaccatgcgaatcaaagcatacgggccgcatgcgtatgttgccggattgaatgtttggctcgggttgaacgaggcattccggcaatccgtacacctaggtcttgtcgatgaccagtggctggtgttgctgaaagcagccaccgtattctcgatcggtttcctatgcgcagccgtaccggaatcagccaagatgcgagcattcagggactggattcgcaagcaggtgccggcggacatacgccactgcctgaaaatcggcgtcgtcttggccgtcgcgatactgggcatatacctggcaattggattgattaccgtcatcgtatggtcggtacgcaaccatgccgctgtcgtatcgttgttcgaattgtccgggatggaaaccggttcacgaattctcaccaccgtcgccatgctgatctggctacccaacgtcatgctctgggctgtttcctggctcttcggcggcggattcgccatcggtgatttggccagtttcacgttatggctcggccaatccaaagagcttcctgcaataccggcattcggtattctgcccgaaccggtcagcagcgaactatggcgtaccgttgccttgaacgcgcctctcgccatcgctgcgctcgtgggcctgctggctgtattcctaccgcaaggattcgcctgcagaccgttgaatatacggaatgcgtccacccgcggcccagtactggtttcgctgatctactccgccgggtcattctgcctgagcgcgatgctgatctcactggcatccacattgctgttcgctctgtccaatggatcgcttggcgatcatcgtctcgctcacattggcgtcgacgtcatggcctccaccagagtcgtcggtcattcgaccgcattgggatttaccgcggcatggctgctcgcgctgattggcacagtgctcgttttttcgataggctggttggttgggaggatcaatgattcccgcaccaccgccgcgaccccgaagaccgtcatcgtccgtcaggcgcggtccctggcgtcacaaccacaagaatccaaggaggaacaggatgacaaacacgaaccgaccgatccgtcgggcactggtctcggtctttcataaggaaggcatcgaagtactcgcggaagcgttcgtgaaggccggcaccgaagtcgtttccaccggttcgaccgccaggaagctcgccgagctgggcgtcaaggtaaccgaggtgtccgatgtcaccggattccccgaatgcctcgacggccgcgtcaagacgctgcatccgtacattcacgccggcattctggctgatatgaccaaccccgagcatgccaagcagctcgaggagttcggcatcaagccgttcgacttggtggtcgtcaacctgtacccgttcgccgacaccgtgcgctccggcgccaacgaggccgataccatcgagaagatcgacatcggcggcccctccatggtgcgcggcgcggccaagaaccacgccaccgtggccatcgtcaccgacccggccgattatgcactggtcgcctcccgcgtggccgatggcaccggcttctccctcgacgagcgcaagtggcttgcagccaaggccttcgcgcacaccgccgcctatgacgccaccatcaacgagtggaccgccaagcactggcccaagccggcctctctggacgccgtcgaggtggacaaggacgatcagggcactgaagtcgattccgccaagttcccggcccagttcacccgcacctgggatcgtgcgcacaccctgcgctacggtgagaactcccaccagcaggccgccctctacattgacccgctcaaccagaccggtttcgcccacgccgagcagctcggcggcaagccgatgagctacaacaactacgtggacgcggacgccgcctggcgcaccgtatgggatatggctcccgccattgccgtggccgtagtcaagcacaacaaaccgtgcggtctggccatcggcgcgaccgcggccgaggcccacaagaaggctcacgcctgcgacccgatgagcgcctacggcggtgtgatcgcctgcaactccaaggtcactcttgagatggccgaaagcgtgcgcccgattttcaccgaagtcatcgtcgcccccgactatgagccggccgcgctcgaactgctgcagaccaagaagaagaacctgcgcatcctcaaggtggccgagccaccgaagggccacgaggccatccgccagatcgatggcggcctgcttgtgcaggacaccgatctgatcaacgccgtcggcgacgatccggacgcctggaagctcgtggccggcgaggccgccgacgccgacacgctgaaggacctcgtgttcgcatggcgtgcaatccgctgcgtgaagtccaacgccatcctgctggcccacgaccaggccacggtcggcatcggcatgggccaagtcaaccgcgtggactcctgccatttggccgtcgagcgcgccaacacgctggccgatggtgccgatcgcgccaccggtgcggtcgcggcatccgatgcgttcttcccgttcgccgatggtgcccaggtgcttatcgacgcgggtgtcaaggccatcgtgcagcccggcggatccatccgcgatgaggaggtcatcgaagcggccaagaaggccggcgtgaccatgtacctcaccggcacccgccacttcttccactgatcgggactctctgaggggagcagctcagccaaaacgcataaaggtgggattccgcctgacccgtcaacgggtccaagcggaatcccacctttgctattcgcctgctattgtggtcacgtaaccgttcgacagaaggaatcgcaacatgcacaaccatccctatgtatccgaagcgcatgagggcaagccatggtttgaatggtgcgtactcggcgtcgtcgccgtcatcacactgctggttgctttcggatatacgatggccgccacggtcatacttgccgtgacggccatcatcaccgggcttgttcgcctgattcttcaggacaaaagcccatggaaagtgcgctcagtggcgttcgactccttcatcggcatcgccttgggaatcggcctgctgattacctacttcagcttctttggactcttcggcaacatctttttccgctgaatcgccatcagacgaggcggcctgatcgaagaattcgccatcgtcgagcgtgtccgcgttcgcatcggcatccgtctgtggaagatcggcggcagccggcactttgggagtggtcatcatctgcgcgatgatcatgaccaacgccaccacagcggcagccaagaccgggctaatccagaacacccacagctgttgcagcggattttgcgtaagaccctcattcatcgcggccagtgcgataccggtggaacgggcgggattgagaccggcaccggtaaccgggtagctgatggcggcggccagaccataggcaagacccatggcaatgacatgacggtccgcggactcgccgtgatcatccagagaagacatggcggtggcaacgacaatcagagaggcaacgacctcgacgacaatcgccagcgtaatcgagaacgtaatgccatactgggtcagcagcgagtaagacacggagccgttctcgaaaccgttaacggccggagtcagccacactttggcagctacctgctcggatgtgggcagcagcttgaccacggcgaagccggcggcgatggcaccgatgacctgagcgatcacatagaggatgccatccaggattttcgtcttggaaaccagcacggaggctacggtgatggccggattcagctggccaccggacacgcgggagaagatggcggtgactgcggcatatgccaagccggtagccaacgcgaagaacacgatattgatgccatacacggccgaaccccatgtggagaaggcgtaaatggcaaagcacagcaggaagctgccggccaattcggcgcacacgcgcagggccagcggctgttgcttggtttcttccatgattgttcattccttttcatctgttggaagacgggcgaacccgcacaaacggttgccagtctagcagcagtcctacgttgcggtatgatatataggttggaattggctgggattccagtccgccaactctgaagtatgtatacaaatcgacagtctctgcgatgacagagtctgtccggccacgttgggagaacgatgccaaacgcatattcccgcgctgcgaaagcgcaagacgattccaattccattcgactccagaagctgcttgcccaagcgggattcggttcccgccgcaagtgcgaggacatgattaccgaaggccgtgtcgaggtcgacggtgaactggtcaccgagctcggaactcgcgtcgacccccataagcagcaggtgcgcgtagacggttcgcgcgtacgcgtcaatccgaaccacgtcactctggcactgaacaagccccgcaaggtgctctccgccatggacgacccgaagggccgctacacgttgcgcgacatcgtgggcgacaagtacgagcgcatcttccacatgggccgtctcgacttcgattccgagggtcttatcctcatgacgaacgacggcgaactctcgcagcacgtcatgcaccccaagtacgaggtcgaaaagacctacgtcgccacactggaaggcaagatctccggcaccgtatgccgtcgactcgtgaccaccggcgtacagctcgacgacggctggatcaagctcgaccactgcgcgatcatcgactcctcacgcgaccacacgatggtcaaggtcgtgctgcactccggcaagaaccgcatcgtgcgccgtatcttcggctcaatcggcttcccggtcaagcgcttggtgcgcacccagatcggcccgatcaaactcggtgatttgaagcccggttcctaccgcgtgctgtcccagacggaagtccgttcgctgtccaaggaggttggcctgtgattcgcgttgccatcgacggccccgccggcgtgggcaagtcgtccacgtccaaggcgctggccaagtatttcggatacgcctaccttgacacgggcgcgatgtatcgtgcctgcgcttggtggtgcctgaagcagggcatcgatctggacgccgaaaccgtggatgagcgtgtcatcaccgaagcggtgggcgagttcttcaccggcgaccatttcgatatctccgtggacccggacaacccctgcgtattcgccgacgacgaggacatctccgaggccattcgttcctccgaagtctccagccatgtctccaaggtgtcgaacgtcatcccggtgcgcaacgtgctcatcgccgcccagcgcgcctacatcgcccgcgaggcgtcggccgactccttctccggggggttgggcatcgtggccgagggccgcgatatcaccaccgtggtgtccccggacgccgaggtgcgcgtgctgctgaccgcccgtgaggaggtccgtcaggcccgtcgcaccggccaggctgtcaagggcgtgggcgctgaggatgtggccgcgcgcgacaaggccgattccaaggtcaccagcttcctgaccgccgccgatggcgttaccaccatcgacaattccgatctggacttcgcccacacgctcgatctgctcatcggtgtggtcgaggacgccatcgagaaccaagaatacgagcagtatgccgccaatctcgaaggctatgagctggacgaaggcgatgaggatctgatttccggtcgtggtttcacggaaggcacgcgcaaggccggtcccaagccggtgggcgtgctggctgttgtaggccgtccgaacgtgggcaaatcatccctggtcaaccgtatcctcggccgccgtgccgccgttgtggaagacacgccgggcgttacacgagaccgtgtgagctatgacgcggaatgggccggcaccgacttcaagctggtggacacaggaggctgggaagccgacgtggaaggcattgaatccgccatcgcctcacaggcacagattgccgtgaccttggccgatgccgtggtattcgtggtcgatgggcaagtgggcatgaccaccaccgatgagcgcatcgtcaagatgctgcgtgccgccggcaagcctgtcgtgctggccgtcaacaagatcgacgaccaggccagcgaataccttgccgccgaattctggaaactcggcctcggcgaaccatactcgatttccgccatgcacggcaggggagtgggcgacctgctggacgtcgcgctcgacaagctcaagcaggccgagaagacttccggctacctcacgccttccggcctgcgccgcgtggctctggtgggccgcccgaacgtgggcaagtcgtctctgctcaatcagctggcgcgcgaagaacgtgccgtcgtcaacgatttggccggcaccacgcgcgaccccgtcgacgaaatcgtcaacatcgatggcgaggactggctgttcatcgacaccgccggcatcaagcgacgccagcacaagctcacaggcgcggaatattattcctctctgcgcacgcaggccgccatcgagcgctgtgaattggcgctgattctgtttgatgcctcgcagccggtatccgatcaggatttgaaggtcatgtccaccgccgtggatgcgggccgtgcaatcgtgctcgtattcaacaagtgggatgcgatggacgagttcgacaagcagcgtctcgaacgcctgtggaacaccgaattcgaccgtgtgatgtgggccgagcgtgtgaacctgtccgccaagaccggctggcacaccaaccgtctgacgcgagccatggataaggccttggaatcctgggatcagcgtattcctacaggcaagctcaacgccttcctcggcaagatccaggccgcccacccgcacccgttgcgtggtggcaagcagccgcgaatcctcttcgccacgcaggcgtccacgcgcccgccgcgtttcgtgatcttcgccaccggcttcctcgagcacggctaccgccgctacatcgaacgctccctgcgcgaggaattcggcttcgaaggcacgccgattcagatctccgtgaacatccgcgagaagaagaagcggaagtgacacgcgcgtaatttgccagatttcatatatctggtagattatctactcggtgcttttgcaccatcgggccgtagcgcagtttggtagcgcacttgactgggggtcaaggggtcgcgggttcaaatcccgccggcccgaccgattagccccggaattccgccacttctgagtggttgctttccggggcttttccgttttcagacaacatgagacaacatgacgacggacttacctttgtaagccattcgtaatggattaaacacggacttcatcttggcgtgttattggaattatcaccgacaattcaccgcctccgccccccgtcgtatgtgtttgccccaaacaggggctagactggttcctattgatttgatgaaagggacccgaattgaccgaaataaacgataaggcccaactggatatcgccgccgctgacgacaccgacgccgtcacctcggatatccccgaagaaaccgtaaacacccccgaagtggatgagactttcgagctttcggccgccaagatgcgcgagcacggcatgagcgaaaccgccatcaaccagttccgccatttgtatgacgtatggcgccatgaagaagcctccagctggattcgtgaggacgacatcgagccgcttggccacgtgcccagcttccacgacgtctatgagaccatcaaccacgacaaggccgtggacgccttcgccaagaccgcattcctcaagctcaatggcggtctgggcacctccatgggattggacaaggccaagtcgctgttgccggtgcgtaggcacaaggccaagcagatgcgcttcatcgacatcatcatcggtcaggtgcttaccgctcgcacccgcctggacgtcgaactgccgctgacgttcatgaattctttccgcacttcggcggacacgatgaaggcgctcaagcatcatcgcaagttcagccagcatgacgtgccgatggaaatcatccagcatcaggaacccaaactcgtggccgccaccggcgaaccggtgagctaccccatgaacccggagctggaatggtgcccgcccggccacggcgacctgttctccaccatctgggagtccggcctgcttgacgtattggaggagcgcggcttcaagtacctgttcatctccaattccgacaatctcggtgcacgcccctcgcgtacgttggcccagcacttcgaaaacacaggtgccccgttcatggccgaagtggctatccgtaccaaggccgatcgcaagggaggccatatcgtgcgagacaaggccactggtcgcctgatactgcgtgaaatgagccaggtccatccggatgataaggaagcggcccaagacatcgccaagcatccttacttcaacaccaactcgatctggattcgcatcgacgctttgaaagacaagctcgccgaatgcgatggtgtgttgccgttgccggtgattcgtaacaaaaagaccgtgaatcccacggacccgaactccgaacaggtgattcagctggaaaccgccatgggtgccgcaatcggtctgttcaacggttctatctgcgtccaagtggatcgtatgcgcttccttccggtgaaaaccaccaatgatttgttcattatgcgttccgatcgcttccacctgacggacacgtatgagatggaagatggcaattacatcttcccgaacgtcgaacttgatccgcgatactacaagaacatccgcgatttcgacgaacggttcccctacgccgtgccatctttggccgcagccaactcggtttccattcagggcgactggacattcggacgtgacgtcatgatgttcgccgacgccaaacttgaagataagggtgagccgagctacgtgccgaacggcgaatacgttggcccgcaaggcatcgaaccggacgattgggtgtgatttacaacacggtcgaacgataaaaaaagatattatttttgtgaaatggcgctcaactgtggaaaaagcctctaagatagagtgagtgtggggaaactcatacgcacttataacgaaacaataactatacgtgaggactaatggcagagggcacaagcggacgtcggcgtttttccgacaaatggggcaagcacgagctggacgtactggctgtgttgtcatccgcgttcccgcaatggctcacatcccgccaaattgcgcagcgcgtcaaggcttacgccgactcgtatggagagctggcagatcaggccgccaaggccgcgttcgccaagcagttccagcgtgatcgcgccaagctcgctgcgatgggcattgccatcgaatcacggcagcctgagtactcgtccaagtcggaaggccaggacttcgcgtcctatcgtctgcagttgggcgacgaaccgcgcatccgcctgatgttcgagccggaagatatgccggtgcttgccgccgccaactatctggctcgttcgatgtcgatttcttccgagccggatcagtcccagctcacccagcatgtgtcgcgcactacgccgcgtgtgccgcagaccccgattcccgggcttggcttggattcgattgcgcctggcttggggacgcagcccattccggattcactggtcaaggttattgattcgcgtcgtttcgccgccaccgttgacgtggatggcgaacacctgaacgtggcatacaccgattccgacgatttggccatgtttgtgcttgagcatccgggggccacgattgtcagcccgcaagaggctgtggacgcttatcatcgccgtttgcacgccgccagccggttcactctggccgacgaatccgccagtcctgtgagcgcttcggtggtttccccgtcgattagtcgcgatgtgcgagagccgggtgatcccgagtctatcaaggctcagaacaagaagaacggctccgctttccaaacgggcagtgaggttgatcgtcgcctgcgtctgatgctgttcctctccgctcatctgggtgaggaattctcgatgagcgagctgggcgaacgctttatcggcaagccaaagaacgatgatgaactcaagaaattcgtcaacatcatccataaggacatcaacaccctgaccaccgtttccgacgatggtgagatggccggcagccagttcttcgatattgactggccgctgctggatgccgagggtattgtttccgccaccaattcgctgggccttgaacgtcttgccggcatttcgccgcaatacctcagcatgctcaccgcctcggtcagctacctggcgcattcgccgttgctgccggacaagcagcgtgggcaggccgaatccctgtatgagcgtttgcgccgtcatgtcagtcccggtcagaccccgtggctgagcctgaccggctatgagctggagccccgaagcttctccatcgtcaagcgtgcgatcaacaccgattcgctgttggacatggagtacaccgacggtacaggtcgtacccgccgcaagctggtggcccccgccaagatcttcattgacgaaggcgtgtattatgccgccgtctacacggacgttggttccgccgcacccaaggacaaaaaggcctacgtctccaaagacaagaccctcgacaaggccaacggcaagccgcgcatctggcaggtactgcgattggcccgtatcgaaaaggcggaactggtcaagcccaccaagcagatcaacatcccgaacatgccggtgagcgaactgcgcaagtggagtttcgacaacggtaccgacgcggtgttcatcaccgatcagcgcgatctggcattcatcaagacattgccgggcgctaccgtcgaacaatgcggtgccggtgaaaaggtgcatctgaccgtttcctccgattcctggttcgtggccttctgcatcgcccacgcgcgtcatatcacggcggtcgccccggaaacgttgcgcaccatgatcgtggcacgcgccgaacgcgaactgagcatcagcgagaacaagtaaggagcctttcatgccttggtggatatggctgattctggccctgttcatgctggccatgattgttgccggactcatctatgcagcccttcatggactccgtgccttgaaagacatgtccgacatcggcggccaactcggtgaacgcgtggccgcgatgggggagcccggcacctctgccgacaccagcgagccacctctgttcactcagccgctcagcgtggcacagaatcgttatgccgaggcccatgcgaacgtgattcgcagcaaggccgccaagcgcgaacgccacacccaggcatgggcccgctggaagcgattcaacaactaacggaaagcagcaatggcacgtcaccaacaccataagggcaatgccgattcccagacgctgagcccttcgcagcggtacgcatcattccaaaaggtccaacgccatcgggcgtccgcagcagcgcgattcgccgaatccctgcctttcgaactggacgacttccagaccgaagccaatgacgcgctcgaagccggcagcaacgtactggtcgcggccccaaccggtgccggcaaaaccgtagtggcggattttgccatttacctcgcccagaaacgcaacgtcaaagccttctacaccacaccgatcaaggcgttgagcaatcagaaataccatgatctggtcgacgtgtacggcccggacaaggtaggcctgctcaccggcgacacctcgatcaattccgaggcggacatcgtggtcatgaccaccgaagtgctgcgcaacatgctctacgagcgttccaccacgctgaacgcactgcgctacgtgattctcgacgaagtgcactatctggccgaccgattccgcgggcccgtgtgggaggaagtcatcatccacctgcccaagacggtcaagatcgtcggcctgtccgccaccgtgtccaacgtggaggatttctccaactggattgcctcggtgcgaggcgacacaaaactggtgatcagcgaacaccgccccgtgcctttggaacagcacgtcatcgtgcaggcggacgaacacaccgagcccgaggtgctggacctctatcgccgcgacggcaacggcgagcagaccaccaaactcaacgccgaactcatcaaccggctcgaccagttggaccgcaaggccgcacgccggcgcggcgaggaacgccccgataagcgcaagggcttcggcagaggccgcggcggcaaaggcgccaaagaccgtgccccgaaagcggaacgccacaccccgcgccgctgggccgtggtggacgagcttaacttcctgggaatgttgcccggcatctacttcatcttctcgcgcaacggctgtgaccaggccgtggaacagtgtatcaacgctggactggagctcaccaccgatgaggaagtgaccaggattcgccgcatcgtggatgagatggtggaggggcaactcactcaggaagacctgaaagccctgcagttctccaagttccgctttgcattggaagaaggcttcgcttcgcatcatgccggcatgattgccctgttccgtcagatagtcgaacgattgttcgaagaaggtctggtcaaaatggtgttcgccacggaaacactggcattgggcatcaatatgccggcccgctgcgtggtggtagagaaactcgaaaagttcgacggtaccggtcatgtgggcctgacgcccggcgaattcacgcagctcaccggtcgtgccggtcggcgcggcatcgacaccatcggccacgccatcgtggtcgaccatcacggttttgtgcccgccacggccgcctcgctgtcatccaagcgtgtctacccgctgcactcgagcttccgacccacgttcaacatggccgtgaacctgctcaactccagcgactacgagaccgcgcgcgtcaccctggaccagtcgtttgcccagtgggaggccaacgaatcggcctggcagctggaatcgcagattaacacactgaagaacgcgctggccggatacgaacaggcgttcgcatgcgaacacggcgacttcaaacagttcatgaccctgcgtatggagctgagcgacatcgaaaaggaaggccgccgcaaactgaagcacgaagtgttcctgaccgatcaggagcgttcacgcgctttccagaacctcgaccagcgcattcgcgatttgcgcaaggcggaacacgagcatccatgccgcaactgcccggacctccagcaacacctcaaatggggccaccgctgggcccgcgagactcgagaactgcagcgcgtcaccgatcgctacgactcccgcaccgggtccgtggcacgccagttcgattgcatctgcgatattctcaccgggcttggttacctcgaacgtcatgtcaatgcggccggccacattgacatgacgttgactgaaaaaggtctgctgctgcgccgcatctacagtgaacatgacctggaactgtgcgaggcgctgctcgccggcacgttcgacaagctcgacgccaacggactggccgctgtgctctcttcactggtatacgaggccagacgcgggggagacggcgaaccgaggcactacccgggcggcatctccgggcccatcgccatcgcttcgtccaagctcaagggcatttgtgaagacatcgatatcctgtgcgaggatcacggtctggacgagatgcagcggccggatttcggcattctcgacatcatgtatgaatgggcggatggcggttcgctgggatcgtgcctgtacggcaccgacatgaccggcggcgacttcgtgcgcactgccaaacgactggctgacgtgctgcagcagattgctgtcgcccagccgttgccgttcgacgggggagagcggctggcaggcctcgcccacgaagcggccgaccgggtcaatcgtggcgtggtggcctactccggcgtggactgacggggctgtttgacgggagtttgtcagccgacgtcggaagcttggaatagcggccaagtccgaactgttgcgtaaattagtagggttaaagatctttcaaggaggatgccgatatggcagaacgtagcctcaggggcatgagcatcggagcgaaatcgctggagtccgacgacaacgtcgatttcgccgcgcgaaacgatgtggcgtatgtatgcccgaagggccaccgcaccatcctgccgtttgccgagggtgccgaaatcccggacgagtgggagtgccgttgtggttccgtggcccaccgtgagggcgacgccgaccgtgagggcgacgaaatcagcaaacccacccgcacccactgggacatgctgctggaacgccgtagcgaagaggaactggccaccctgctcgaaaagcgcctgcaaatgcaccgtgacggttggattcccgactacgagtgatctcctactgaacaacacgtgaacttgatgcccagtcatcccgactgggcataatcattgttggaacaagtcgcattgtttgacgaccattcaaagcagtcgacatgaacaagggggagtggaatctcaatggcacagcatccgatgaaagtggtcctgttggatctcgacggcacgcttaccaagtccgacggcggcattatcggctccgtcatcaagaccttcgaagagatcggtcgaccggttccggacgccgccgaactgcgacgcttcatcggaccggcgattattgaatctctgcgtcgcaatcatgtgcctgcggaagatctggatcgggccgtggacatctaccgcagctactacggagaccgtgccgtgttcgacgatccgaacgagcccggcaacaaggtgcccggacgactggtgaacgtcgtattcccaggcatccgtgaacagctgctcaaactgcatgccgacggttactacctggcactggccagctgcaagcccgaataccagtgcatgcctatctgcgaccatttccacctgaccgaactgttggacggcatctatggtgcttccaaagacaattcccgtctggacaaagatcaggtgattcggtactgcttcgacaaaatcggttttgatgctgcagcgggggacagggccgtgatgatcggcgaccgctacaccgacattgacggcgcccacgcctgtaatttggacgctatcggctgccgctggggctacgctccggccggtgagatggaggaacacggtgcctacgaaattattgagcaacctgagcagctcgaagacgccgtaaaccgttatttccaaacgcactgaaacacaacggcgaggacttcttcatgatgggatgcgatggagcctgcgccgcgggcttcgacctggttttcatcggtttgccgttgctgtcgctgtatgagattcccatgctgatatggttcatttggcgagcattccactggaaacgagatgacaaggattggctgaaaggcacggcgattcttgcaattgcggtggtcgctccggtgctcctttggctgtcggccttttggctgtcggcctggtatgcgtggactagttgatacaggcgactgaatcctcgtcaaggataactaatctgacataacgtacgttatcggctattatggcttccatgtttctcggtaccatatttgtcatcaaggcgcggaatcagcgctccgacgagacatctgcaaacacaaatacggtgtgtcctataaggcaggttcgatgaacttccagcacgggatgcaccctgacgaattgcagtatccatcccctgaatttgacggtgtgaggccgctgcgttgttgtgttttagtaatatcggatgatgtgaacaccatccagtgggttccgacaatcgtaatcgttcgtattggctgaacgcattttattaaggtacagcaaaggagcgtatcatgaagcgttccagatctttagcggcgttcactcggaccaagcgtagactgatcgtcaccattgcgactgctgccgtgctccttatatcgagctgtgcggcagtcgcaatggtgcaattttaccaagcggattaccaagctttggagcaacgtggggcaacgcgcaagacccttgattcttttcgtgccctcagtactgcggatgggcttttcgatatgcccgagttagacactcgaaacactgaggaatcacgaatcaacgccacctacatggtgtctcagatggtgggcgagaatcatgacaaggtatctactcaacgcactctggattccctatacgcttatgccaaggatgaacggaatccgcttgccatgagactaaaagcctatgtggccttgaagaacttcaaggatacgcgatgggaatccagcgatggaattgtgaaacaggttgagcaatctttcccgaagaatgttgcaagcgacggtctggcggagtatctttcactcgcggaaccggtagctgttctggattccgacttcaccccgacaaccatgctggttcccttcaacccgcttaccaacgagcagaccgagagactcgcgacttcggccatgataaccagatacctgtttggtaatggaagtcagataccagagtatttttcggatctcagtccagatttgtgcgcatgggcgtccggggactctccgtatgtgcagcaaacactcctggccgccgacgctctgactggcaccgagcaaagttcctgcatatcccgtccggtgatcaagaaactcttcggttgcaagaactcgactcaaatgatcgcgatagatggttcacggactggcgtgtgcagtctgacactcacctattacgcctatagatcgggggcagcgccattatgatgcgggacatcgaaagcagcgttctcgtcttcgaccacgtgtcgaaacgttatgcaagggacaaaaaccgccggttcgttctcggaccgatatccttttcgctggagtgtggggaagttcttagaattcaaggcgattccggttccggaaagacaacggttctcagaatcgcgggtcttcttacggtgccggatcgcggcggcgtacatgtgtgcggcgaaaaggcgaccactgagaaatcccgcgatcggcttcgcgccgcctgcatcggaatcgtttttcaggatgcgaacttgtttggtcatctgacagtgttacagaatcttcttgttgcggatcaggggaaagggaacagcgcagaatgccttgagttgctttcccggtttggaattcggcggctggcgaatgtgaaggcgggcaggatttccggcggcgaacttcaacgtgccggaatatgccgtgcgctgattaacaggcctcggctgcttttgctggatgagcccacggcatcgctcgatgacgcggccgccgatgaggtggcatcggccattcgcatgctgagggaaaggggtgtggcgattttgctggccagccacgatcctcgtctggatgggttggagtcccaatcgctgcgtcttgaggccgggaaggtggttgtgagctgatgagaaaggttctacgactcgcgtggtttgagcgaacgcatacgttcagaacatcgcgggcgttggttgtcatgctggcgatcgttgtcgccgtatgctattgccttcagggttttgtggtcagtgcggttcggtcccatgcaagcaatgtcgagaagcactccaacgtatccgtcatcgagctcagcacgattcgtccggacgcacgcgtcttggacggggaatcactttccgaagtatcaggactgggacatgtcgtttccgtggttccatggatgcagcacgatctggatttggccgacgaaggcgactggccatctccaacggtcagccccggatcgctgtgggccaccacgtatttcgaaccgaggcttccgaaaatgatcaagggagacaggcccgtctccctgcaggacgacgagattctcctacccgattccgttcccggaggcagcctcaggcatctgtacggcaagaccgtcatgttcgggtacacgcatatcaacggtaaatatcaaggatcgtatagaaccattccactcaaggtggtgggaatctacgacaactccgtacccgacaaggatggcgagaatccgtcctatgtctccgaaaacacaatggatgccctgttcgacgggaatgtccaggaatcatacacattcgcatacgttcaagtcgattcgggcgataatgtccccttggtccagaagaaactcgccgccatgggattcggagtggccggtgccgcggggcagcaggatgtcacgggcattcttgccgcacttatgagcataggcaggttcatgttccccattgtgcttgtgtgctccctggtgttcggcttatttctgagcgtgatatggatgaagcagcgcaaacgttcgttggcgctgctccgatgccttggatacacggccgggcaactgagcgcccttgcactcgtccaagtcgtccaacttgtcgtcgcagcgggcatcgcgggcatcatcttgggggcgggtttcagtttgctgctggcgcattccgttgattccggcgatctgttgaatctcacgaatctggattcggtggttttcgatccggtactggcgcttgaaatgctcgccatcaccgtcgctggtgcagtcatcggggcccttcccctgagcgtaaggattgcacacacccagccggatgagctgatgcgcgggtagttcagtacccggcttttatggcggtgatggtgagctcgccgcggttggtgtatccaagcgcggcgaaaatctcggaaatataggagcgcacggtggcttcactaagacccagccttctggcaattgtcttgttcggcaacgcctggatgagcagatcgaatgtggtgcgcagatggttcggaagctgttccacccgttcgcggaagccatcatacccgggatcgttcttcccgaagctcaggtagctgttggcgaggattcgagttggacgaggtccgaacaccagatatccgtcatgggcttgtctgattaattgggcgagttgcgcggacgggatgtccttggtcaggaatccccgcacgttcagggccagcgatctggccagcgattcctcatgctcgaacacagtgagcatgaccacagcgaccgagggacgcaatctcgccatttccttcgcggtcgccaaaccgtcgagaaccggcatatccacgtccagcaaggccacgtccacggtttgtttggagagctcgcgcaatgcctcgcttccgttttcagcgactgcgaccacgtcaatgccgtcctgttggttcaacaaatcggccagcccctcgcgaacgattacatcgtcatcagcaagaagaacacgaatcgtttcactcatcaggggtctccttccctgggttcggtatgaccgcattgataatccaccgatcggaatccgagacgaaggagagtcttcctccctcagcttcgatgtgggattgtaggttcacaagcccgaaacctcccgtcaaagcgtcattcaatgaacgctcgccgatctcgttgaccatcatcagcgacagctcccctccagcgacctctataaacaaattcacggacgttccccgccgcgcatacttcaaggcattcgtggcggcttcgcgcacgaaaagagagcctatgagaatcgcctgcctagaaagcaggtcatcgatgtcatcagacatatgtacggtcaaattaagttccctggaacgcagcatcaacgtcgattctttcacggcggttcgaaggctcggagcggaagcttccaagttcatctccgctatcatgggcttcagccggcgtgaggaaacgcgcgcgagatcaactaccggcgcgatttcttcggacagttcaggatgcaccgcgacgaggctttccaatgaaatggagatgcgggcgaggtctctggcgattgtgtcatgcaatcccgcggcaagtttggcgcgaacggctgccgccgctttggccgtttctaccttggattcctccaactcacgtcgggatcgcgcggcgccatctatgaaatttctgagcgcaaacgcaatagcgaacgtcacggcggacaacagaacatcgctgaaaatgcgggaaggctgactcccgtcctgcagaagcatcagcaggatgtaaccggtgagcagcaacgaggcctggggcgtccgatgatggatgatccatacggtggcaatcaggaacataccaagagctggaaatgcgagcgagacgctgcaggaggtcgcccccgccgcggcgaacgcgcccacgtacagcaaatcccccgccctgttcaaccaaggggccattgccagcgacacgcacaatgccatcaatagcaggaaggagggcacatccaacggtgttgaaatcgcgtgggatacaacctccagaaccgcgacagataccgatgtaagcacataggccaatctgtagccgcgcgaatagggacgcacgagatcagtgaatctctccctcagggacttgcgcatcacttcgtcttacaaaaaaccaaatcagggaataacttacataacagattgccatagccgagcgtgtccacgcgggaagacgaatctgaacccgactgggcggcggaagcgctgccgacaggaatcagagatacccccaaagtcaatacgcacgttgtcagcaaaaccgcaccccgggtagccaaaatcctcttgcacctcatcattctcacaccccttcgattcgccaacgcaatgtctttaattccaatactatgaggcaaagttaaatgacgataccgatatatgtcagggtctcccttcacccaacccggtcgacggttgcatgttcctcccccgcatcagccatccaatcagtcttcgccctgtttgtccatgtctccctcattcccgctcctcgctctatcgggcacgattccggcatcgtcatcatcccggcgggcggcgacgcccagacggccgtccatcgcggattccgaagcgttgcgcgcctgcagatacatggcgatgagttccagcagcaccagcacgaatatgatgattgctccgggcaattgcgcgtggtcgtagaacgcgagcatgcgagcatccatcaaatccgctgtaaacgtcaacacgggaaacggaatcagcgccgccgcaaacgacatgaaatgcgttttcaccatcgaccagtcgaccggatcgaccggcggtcgccggcgtttcggcgtgaacagatggcctcggctgaccgttatagtgatgatggacacagcaaatatgacggcgaccatccacagaacgcccggcaacaatccgacaacaatcccgttcacccggtcctccaatcagtcataataatcaccgcaacatataaaaacataagatggcaggcaacaaaagcaacacatacaacaaagcgacctgccggccaaagccggcaagtcgccaacaaccatacatgtatcaggcggttgcgcgttgcaagcgctgtgcctcgagcttcttgcgcatcctcatggcagtcagttcatcaatcggacggcccgtggcaatcgtcagcggcttagcctcaagatcaatatattcttcctgttccaaggccgtctcaatctggtgccacaacgaacccaccgacacggcgaacactgccttaccgctttgcaacagttcgagcatctgttcgctggtagtgcattcgtgcacgttttgaccatcgcacatgatggtcacattggccagctgatcggtgctgcgttgagtcaagaatccgatggccgccgtcacgttctgcagattcacaccggcatcaagcagcttcttggatacagcgagaatcaccacatccttaaacgagtacagtcggcgtgaaccggagccatgagacggcgtgatggacggctcaacaatctgcttgcgtgcccaataatcgagctgtcggtacgtgatgccggccaccttggaggccacagtgccacggtagccgcgcttgatctcctcagtatcgacattggagaacaactccccctgaatcgcgtcagcgttcagattctgacggtcctcaagcgaaacatgaagatgcagccctgtctgtcccatggcactcccctaactcatgcgtgtctcgcatgtgactcacactggtgtaatcacatgattgcaattctgcaatcagtctaaccccgtgctgggtgtggactattgggaaataatggcggatttcgtgaagaacacgaggcggaatttaccgatcatgatttcgtcgccgttcttcagcgtcgcctgatcaacacgctgacggttcacgtaggtgccgttcagacttcctgcgtcaaccacaaagaactgaccgttgaccctgcggaacacggcatgctgacgggatacggtggagtcgtcgagcagaatatcagctcgcggatcacgaccgacggtgatttcatcctcgtcaagcaagtaacgagaacctgagaccgctcccctggcggaaatcagcaatgccgttccctcggacaatctggtgatggtgtccagatcctcttgagtcagcggtcgatcgccggtggtggtaatgggcagtacattaatcgcgggcaggccgataatggtggtttcgcctgcgctaggaatcgggttggtcataatcccctattctaccgtctttgcatactggttttgcgtagcttcgcgtacttcgtcgataatgatgctgtcagaaggctgcacgttgacgttggatccgtatttcacctggagctgagcgcccacaccgccggcgatatcgactgcgttggacagctcctgcggattgccgatggccttcaccgtgtatgtgggcttgatggtggtgccatccacgatcaagccttcctcggcgtcctgaatgtaggtggaggtgatgacgcgcacgttattgatggcgattacctcggcgccggcattgcggagttcctcgatgaggttgaacatgattgaggcgtccactttagtcgtcgagcctcgtccgatccggatggtcacgccttggcccttcgccgggagtctgccggagatcaagccgctggtctcttcgttttgcttggcgatcttacgcgcctgctcctgctcgttagccgccgatttcagtgagttgagctggctgttcaactgggttttacgctgctcgagattcgagatttgcgtattcgactcgttcagcagccttaccagttcgctctcgtccatcgtttcgtacgtggatttagtgttattgatctggctcatgtaggcgaaacccagcagcgcgcacatcagagcaatgagaatcgaggatagtagccgtgatttgttgctggcccggttgagatccttccggggcttcttgcgcaccgtggggaacgacccggtttccatccggtcgttgaccttgtcttgtgcatgctggtcgcgcattttctccagcatgttgtctgattgtgctttacgtgccatacgtcagtacccttgtcagcctcggaagatgaagcgtctgatcgcggacacgttggagaagatgcggatgccgagtacgacgatgacggccgtctgcagctgcgaaccgacgccgagctggttgccgaggaacacgagcagtgttgccgtcaccacgttggcgaggaaggagatcacgaacacgcggtcggagaagctgcgctcgaaataggctcgcgcggcacccagcagggcgtcaagagcagcgaccaccataatcggcagatatggctgcacgatgatcggaatgtccggcttgacgaacacgccgatgacgacgccgatgatcagtcccagaacggctgccattattcattcctttccgcgtacttcacttcgccagtgactgctgcctcaagtgtaatcgaattggatttgctcacctgcgggtagataccggcttccttgaaggaatcgtaaagacttgcaagtctcttctcccccatcgcttcggccaaggcgctcttatcgcctatggcttcaatggtataggggctttgtatcgcggtcatgccgatgagaatatgcccgccggccttgcgtatcgaggtttgcgcgccgagcctattaccgttgatggcaatggcttcggctccgttttgaaacatcagggagaccagttgttgcagatccagatcggtgatgactcggatgttcgtggaggtgccgactctcgtcgaggaggattgatccgactggcttgccgcgattggatcggccagcgtcatggtgattccttcgccttcgaccaccgtggcaccattgaccatttcgtcttggataagcgtgtcgcttttcacgctgccggagattttcttggactgttcgtcaacttgggatcgcaaattattgacgtccgtggtgagttcgtctatctgcgagttgcgattctccaattgcgtggccaaagtctgccgtacctgcttacgcggatcggattgcaactgttgcacgaataggctgcaggcaaagccaacgccgacgcagatgatgaatacgacgatgcgattaaaccagatggagaaggtcgaacgatgctcatggaccagtcgtgagtcggagaacatcggatccatcggacgattgacaagatcatcgatgagctgaagcgaatcgtcgttggttttacggcgacgtctggtgcggatggcggcggcgtcatccggggaaagcgcatgatgcgattccgcgcctcggactgagtgggagaacacggcgcggcgtcgtaccggctcattctccttgggtatggggaacgagaccggggccatggcctcaagcgccatacttctcccccagttccttgcgtagcaatccgacgccctgcttggtatagatatatccggcgagccaatacatggcgatgccccagatgccggcggccagcgcggcgatgtagagcaagtggaagaacgtactggtgcccaaatcggcgaaaataagactgacgatggaaatcatcagcagcgcggtaccagccttgcccacgaaatgcacgggcagcggaccataaccgtactgggcaagccatagcacctgaatcgccatccacagatccctcagtcccacgataatcagcatccaccatgggatgatgccggcgacgctgagggccagaatcgagcagaaaatgagcagtcggtcggcgatcggatcaagaatctgaccgatcttgctcacttggttgaatctgcgcgcgatgatgccgtcgagtccgtccgaagccgaggaaatggcgatcagggctagcgccgcaatcacctcatgcttggagatcagcacgctgatgaaaggaatcgagatgattcgcagcgcgctgatcaaattgggcacggtgaaatagatgtcacgtgcttccggactgtatctggcgttgactttctggttggtcatatcgactaacagtctacatgcgggaggcttgcagagcggtaacgatgatgccgcgtgcgccgacttcgtacaaatcatccatcagctggttgaccttggccttgggaaccatgactcgcacggcgttccactgtttgtcgtgcagcggggagatcgtcgggctttcaaagccgggggtcacggccacggcggcggcgaccttgctgatcggaatgtcatagtccatgagcacatactgatgcgcagtgagcacgccttgcagacgacgggtcagcacggccagacgcggatcctgctcgttcagacgcggcgagcgaatcaggcaggcttcggagtgcatgagcggttcggcaaacacgcgcaggccggcgttgcgcagggtggtgccggtggagaccacgtcggcgatgaggtcggccacgcccagctgcacggaggattcgaccgcaccgtccaggtggatggtctcggcctggatgccgtgctcgaccagatagtcgtgtacgagcttatcgaatgtggtggccacgcgcttgccctgaacatcctccagggtggtgatcggggattcgttcggtgcggcgaaacggaaggtcgaggcaccaaagccgagcggcatgtgctcgagcgcggcggtaccggagttcttgagcagatcctggccggtgatgccgacgtcgatggcgccgcggcccacgtatacggcgatatcgagcggacgcaggtagaacagctcgatgccattgtcgggatcttccacgaccagctggcgagggttggtgcgcagacggtagccggcctcggccagcatgttccacgcgggttcggatagcatgcccttgttgggcactgcgattctcagcatttgcgttcctctcacaggtgcgtgtagacgtcctcaagcgtcaggccgtgcttgatcatcatgacctggacgtggtagagcagctggctcatttcctcggcggtgcggtccgcaccctcgtattcggcggccatccaggtctcgccggcctcttcgatgatcttcttgccgatgaagtgggtgcccttgtcgagctcgtcgacggtcagggagccttcggggcgggtctgggccttttcggacagttcggcgaacagggattcaaacgtcttcatgtgattcagattcttttcttgcggttatggatgaaaggtggattgcggttcaggcttggagctcaggccttgaacgcggcctcggccttggtgcggatgtcgtcgatggcttgggcgggattctcggcgccgtacacggcggaaccggcaacgagcacgtcggcgccggcctcggccacgatgtgcgcggtcttggggctcacgccgccatcgacctggatgcgggtcttcaagccgcggcgggtgatctcatcgcgcaggcggcggaccttggccatctggttgtcgaggaacttctggccgccgaagccgggctcaacggtcatgatgaggaccatgtcgaactcgtcgaggatatcgaagatcggctcgaccggttcggccggacgcacggcgaagcaggccttgcagcccatctcgcgcagctgtcgggccagacgcacgggggcgtgggtggcacccatgtggaaggagatggaggcggcgccgagcttggcgtattcgggagcccaacggtccgggtcctcgatcatgaggtgcacgtcgaccggcagatcggtgacctggcagatgcggccgacgatcggctcgcccagggtcaggttcggcacgaaatgatggtccatgacatcgacgtggaccaggtcggcgttggcgatggccttgagatcacgttcgaggttgcagaagtcagcggacaggatgctgggtgcgattgcgatattgctcatggtttcctaccttatctgtgcaatgggacttggggtcccgtgtttcgcgctgtttcggcgctgtttattgtggtgtcacttagtgcgcttggcctgcttcttctggcgaagctgttcctcttcgatgctctggcgttcgagctcgtcggcggtgaccgccgcaagcccgcgcgcctgcgccttggggtccggaccgtactggtagagcacgacgaacaggatgcagccgagcacgaagacgatgatcgcggtccacacgttggtcctcaggcccaggatcaccgtggagtagttgatgcgcacgttctcgatccaggtgcggcccaggccgtaccacatcaggtacatggcgaactgctggccggccttgagccggtcggcgagcttgtggccgaggtagatgatgagcacggcgccgatgaggttccagatcatctcgtagaggaacgtggggtggaacagcgtggttctgtagtccgggcattgcgcgccggaatagcagatttcggatttgccgatggcgtccgcgtcgttgagcttcaggccccacggcaacgtggtgggccagccgtagagttcctggttgaaccagttgccgagtcggccgatggcctgggccacgggcagcgcgggggcgatggcatcggcgaagatcgcgaacggatagtgcttgtggcggcaccacaggaacgccaccaaggtgccgacggagatgccgccgaagatggccatgccgccttcccacaccttgaggatgttgaccaagttgccggtgggcgggaagtagtcggccggcgtggtgatgcagtggtagaggcgcgcgcccaccagcgcgcagggcacggtgacgagcgtggtgtcgagaatctggtcgaaggtgccgccgtaccgcttccaacgtgtggtgaggatccatacggccacgcagatgccgatcaggatgcagatcgcgtacatgtggatagtgaacgggccgatctcgaacttggagaagatcggcgagggaatataagccagattcatcgtgcctctacttgctggtgctcatggtgtgtccacgcgcgggttgtgcttgatgctctgtgactaccctaccgtgtcacggcacaacccgcgtgaggcgcaccgggtgttcaccgggcgttgtggatgccttcggccagttcctcgctcttggcggcgagcagcttcaagccttccttcgggtcgcgtgcggtcttgttgtcgtccgcgagcagggtgtgcacgagcgcggagccgacgatgacgccgtccgcgtaggagccgaccttggcgccctgttcggcggtggacacgccgatgcccacgcacacgttctcggcaccggcctgacgggtgcgctccacgagcagttcgggcgaggcgtcgatggtggcgcgttcgccggtgacgcccatgcgggcggccgcatacacgaagccgcgcgcgttgcgggccacggtttcgaggcgctcggtggacgagtccggggagaccaggaagatgcggtcgagtccgtgacggtcggaggcttcgatccactcccccgcctcgtccgggatgaggtccggggtgatgaggccggcgccgccggcgttctcgaagtcgcgggcgaaacgctcgacgccgtagtggtacacgaggttccagtagctcatgatgagcggcacgccgccggtgttggccacggtttcgacggcctcgaacacgcgcttgatggtctcgccgttgttcagggcgatggaggcggcagcctggatgaccgggccgtccatgaccgggtcggagtacggcaggccgatttccacggcgtcgacgccgtgctcgaccatcgtcttgaaggcgtcaagcgagacgtccgggttggggaagccgtagggcaggtagccgatgaagacgggcttgttctcggccttgaacttggtgaacatagcgcctgacttgctgggcttgtggctgatgcccagcggctggccggacggcgtggttgcttcgttggtcataatcaacaatctcctcttcttgttcaggcgacagtattgccgtgggcgccggccacatcgagcgcggcggcctgatcgtcggtcaggtagccgaaccacttgccggcggtggccatgtccttgtcgcctcggccggagatgttcacgatcatcacggccttgtcatagcccttggctttcagatcggcggcggccttgtacgcgccggccacggcgtgcgagctttcgatggcggggatgatgccctcggtctggctcaggtcgcggaaggcgttcatggcctcctcgtcggtggcccagctgtagttcacgcggccgatgtccttg

SEQ ID NO: 107 - DNA, 16385 bp, Unknown
  R206_24m  MAG No. k141_21275
ccgtggccgaatagtccgaaggaggtgggtgatgtctgcgcacaagtacgaactgatgttcatcgccgatcctgagctggatgagcgcggtctgaagaagctgaccgagcagtatctggaactcgtcaccaaggaaggcggctctttcgatgagcccgattactggggccgtcgcaagctcgcctatgagattgccggtaagaccgaaggcaactacgtcgtggtgaagtacaccgccgagcccgctaccagcgatgagcttgaccgtgttctgaacctcaacgaatccgtgatccgcacgaagattcttcgtaagggctgaatcaagcgtttagtcagctgaacagctggtattcaaggtaagtaagaaggaccgttatggcaggcgaaaccgtcatcaccatcgtgggcaacctcactgcggaccccgagctgcgcactattggcagcggtgcgaccgtggcgagcttcacgattgcttccaccccgcgaacctggaatcgtcagaccaaccagttcgaggatggtcaggcgctgttcatgaggtgctccgcttggcgtgatctggccgaccactgcgcccagtccctgaagaagggcatgcgcgtgattgccaccggtcgcctccagcagcgttcctatcaggcacaggatggttcccagcgaaccgtcgtggagatgcagctcgatgaaatcgggccctccctgcgctacgccaccgcacaggtgactcgccagtcgtccggtcagggcggcttccagggtcgttccggtggtttccagggtggtcagcagcccaatcagggctatggcaaccagggtggccaaggtggttatgccggtggccagggcggttacaacggtggctatcagggtggtggcgctggatactcccagcagtctgccgctcccgccaacccgtccgctcctgcggtcgacccgtggagtaatgccggtgcatctgatgccggtagcttctccacgttcggcgcttcctccgatttcggcggcgacgattccgacccggagttctgattagtacttgcctccccgctgccagcagcaatcaatatcaagatttataaggagaacatcatgtcacgtaagaggccgcaaccgccggtcaagccgttcaagaagaagccgaacccgctgaaggccgccaaggtcaccgagatcgattacaaggacgttgcgctgctgcgtaagttcatttccgatcgcggcaagatccgttcccgtcgtatcaccggcgtgaccgtgcaggagcagcgtgagctgtccaaggcgatcaagaacgcccgcgagatggccctgctgccgtacgccacctcgggtcgctgagttagggaggctttgaacaatggctgaaaccaaggttattctcaccaagaccgtgtccaacctgggccattccggtgacgttgtcgacgtgaagtccggctacgcccgcaactacctgttcccgcagggcctcgctttcgcgtggaccaagggcgctgaggctcagatcgtcgctatgaagcgcgctcgtctggccaaggccgtcgctacccgcgaggacgccgtcgccgctaaggccgccatcgagggcactaccgtcgagatcgccgccaaggtgtccgagtccggcaagctgttcggtggtatctccaacgaggccatcgccgtcgctctgtccgacaaggccgcggtgaacccgaaggccatcgaggtcgagaccatcaagaccaccggcgatttccccgccaaggtggccctccacccggagatcaccgcttccttcttcgtgaaggtcgtggccgagtgagtcattccggcctagtgctggaatcacacagaccaagagtctgagcttaagcatcatcccccgtgcggttcgcgccgcatgggggatttttgtattagcaaaaacgccggaaataggcgcgacacgccgagagttgcattcgcttcaaatctgagtatatttatcacctgttgcaaggaatacttcaacatctaaccaagcccctgtagctcagttggttagagcagctgactcttaatcagcgtgtccagggttcgaatccctgcgggggcacagacaaccggaatcgaaagattccggttttttgtttttttcagcatcagtccgtagctggtgcggaaaggccgtcttcgcgcgtgacggccggacgtgtaaggagcaacgtcatgcctcagatattcacgttcaccgtatccgaccccgaaggcatgcacgcccgcccggctggccggttggttgccaaagcgcaggaatatgaatcgagcatcaccgttgcctacggtggaagatccgtggatgccaagcgtatcttcggtgttatgggacttgatgttcaacaaggtgacgaggttacggttcgggtgcagggcaacgatgaagctgtcgctgctgcagagttcgagcgattcctcaaggagcacctgtaatgagaacgatacagggcgtcggcgtatccgctggcattgctatcggcacggtccgcgtgctcgccgccgtagattatgccgtagaacgccgcttaatcgacgacccgcaggccgagatggatcgattccgcgcggcccgtgacacggccgtcgctcagctcaagcaactgcgtgacaacgtcgccgctgagttcggcgaaaacaaggccgaactgttcgacgcccatcggcttatgctccaggacccggactatgcggaatgcgtcgaaggtttgattgcgcaagacaaggtgaacgccgaattcgcggtgaagagcgccgccgaacagttcgccgccatgttcgctgcgatggatagctcgaccatgcaggctcgagccgctgatgtcaaggatgtttctcgccgcgtgatgaacgtgctgcaaggcaaatgcgatagcacggcgcaggatggcagtgtacaaggcgatgctgtgcagaacggtattgtgcagaacgggatcgcgcagaatggcgaaagccacatcatcttcgccgaagatcttgctcccagcgataccgcgcagctcgaccgcgctaaggttttgggcctcgtgaccgccaagggctcagcgaactcgcacaccgcgattctggcgcgcacgatgggcctgcccgccatcacaggtatcggcgacgcctttgacccggccgatgatggtcacgttgccgtaatcgacggcgccagcggtgcggtattcgtcgacccggacgaggccacgttgaccgaataccggcgcaggaaggccgaggctgaggagcacctaagcctcctgcggaagctcaagggcaagcccaccgaaaccaagtccggtcagcgggtccacctgtacgccaacatcagccgtccctctgacgcagccgccgtgctggccaacgatgctgagggcatcggcttgttccgcagtgagttcctgtatctggaacgcgaggactggccgaccgaggaatttcagttcgatgcatacggacaagtcgcacaggagatgggcgaccgtccggtcatcatccgtacgctcgacatcggcgcggacaaacaggtcgactactttaatctgggccacgaggataatcccgcgcttggttaccgggcaatccgtatctgcctgacccgcccggagattttcaaagtccagttacgcgcattattgcgcgcctcagcatacggcaacatcgccattatgctgcccatgatcacctctgtgcaggaggtacgcgacgccaagcggattcttgaagaagccaaaagcgagctgcgcggcgagcgcatcgacttcaacgagagtatccagatcggcgttatgattgagacgcctgcgtcggtcattatggccgacgagctggccgccgaagtcgatttcttctccatcggcaccaacgacctgacccaatacacgctggcctgtgaccgtcagaacccgagtctcgaacgctttgccgacccgcattcaccagctgtgctgcgcatgatccagatgactatcgaggctgcccatcgtcatggcatctggtgcggcatctgcggcgagcttggcgcagacttgagcctgaccgatacgttcctgcgcctaggaatcgacgaactgtccgtctcgcccaccagcgtcctgcccctgcgcaacgtcattcgcaaccactgagattcaaggtcgcttcggctgattccgatggctttttgggcattgcattcggctggacattcgacatcgcatcttgccggcatttcgtcgtggggcaaagtgtacaatcaccacgtttgctttcgcgcccagcgtaaatcgcgtcgccggctccgcgaacggatttccagtcacacagaatgccgtgaacagtcagccatgcctgttgcgcggcgaagagaaaagaagaagcagtggattatcctctctttaccaagctggccgccgagttcttcggcaccgccattctgatgatcttcggcaacggctccgtggccaacgttgagctcaagaacaccaagggccaccacgccggctggctgaacatcgccatgggctacggcttcggcgtcatgttcccggtgctcatgttcggtagcgtctccggcgcgcacatcaacccggccatgaccatcgcccaggccgtcaacggcctgttcccgtggagcgacgtgctgccgtacatcgtcgcccagctgctcggcgccctgctcggccagctcatcgtctacatcacttactacccgcactacaaggagaccgaggacgccgaggcgattctgggcaccttctgcaccactgacgcggacaaccagaaggccaactacttcctcaacgagatgttcggcaccctggtgctcgtcttcggcgccctgtgctgcctgtccctggcttggggcaagcaggattacgccgccgcctccatcgtcgtcggcttcattgtgtggggcctcgtgacctccatgggtggcccgaccggccctggcctgaacccggcccgcgacctcatgccgcgtctgctgcacgccatcctgccgatcccgcacaagggctcctcccgctggggcgaggcctggattccggttgtggccccgattgtcggcgccattatcggcgcttggctgttcgtgttcttcttcgccagctgattcgttgattgattcatatatgcaaatggcctccgctcgttttgggcggaggccattgtcgttgaatcaggtaaacgcagagactactgctccaggaacacctgcggggccttcatgaagttcgtggcacagtgttcgccgcagaagtaataggacttgccctcatactcgcgcgtgatcgcgtcggcgttcaccgccacggtcatgccgcacaccgggtcggtggcggtttcgccgtccgcgggggcggtgtggtgcatgtgcattcccatatccatagtgttctccttgttggttggattattggattggtcagatgcgtgattggtgtgattcagcgtggtgcgatcgtcgatgatgacggttggctcgtgaggcgcgttggatgtggcggagccggtgatgttggcggcgttggctgattcggccgatccggttgattcgacatccgccgtgctgctgcccgagccagcggtgccatcgacaacacccgcgttgatgttcgacccatgcagcctgttcgcgttcagcaccaggcacactgagctcaacgccatcgccagacccgcgatcatcgggctcaacagccagccggtgaacgggtagagcacgccggcggccaccggaatgccgatgacgttgtaaccgaacgcccagcccagattctcccgaatgttgcgcatcgtggcgttggacaggttgatggtcttgatgacgccgcgcaaatcgccgctcatcaaggtcacgtccgccgactgcatcgccacgtccgtgccggtgccgatggcgatgccgagatccgcctgggccagcgcgggggcgtcgttgatgccgtcgcccaccatcgcaatcagagtgcgggattgcgcggccgtgcgggaggtgccgtccgcggacttggcggcggcctcgtcgcgttcgcgctgcagtttggcgatccagtaggccttgccgtccggcttgacctcgcagatcaccgtgtcgatgccgacttcgcgggcgatgcgcccggctacctcggccttgtcgcccgatagcatcaccgtgcggatgccgcgtgcgcgcaacgccgcgatggcctcgcgcgagccttccttgactgtgtcctgctcgtagctcggcttgtcccagtcggcggccgcgtccaccacgccgcgcgtgatggtgccggtcttgtcgaacaccacggtgccgatgcgacgcgcctgttccagcgccttggcgctggtgaccagcacgccgttggtggcgcccaagcccagtgagaccgtcaccgacagcggcgtggccagtcccagcgcgcacgggcaggcgatgatcagcacgctgaccgcggtgaccagcgcatgcgccagttgcggcaccgggcccagtgacacccagatggcgaacgtccagatggcgatgatcatcaccgccggcacgaaataccgggcgatcttatcggccagctgctgcaccggcgccttggtcgcctgggcgcgggccaccatcgccgcgatctgcgagagtaccgtgtccgcgccgacttgggtggcgcgcatcacgcagtcgcccttgagcagcacggtggccccggttaccggatcgccgacggttttggaaaccggcttggattcgccggtgatcatcgattcgtcgatatgcgcctcgccggccacgatgatgccgtctgtgggcacgcgctcgccgttcttgacgaccagcaggtcgccggtggcgatggcgtcgatgtcggtgtcggtgaagttcgccggattgcgccattcgatgccgtccacattgtctgcggaagtggcgttgagtttgtgcgcggtgcgcgggcgcagtttgatgagcgactgcaccgccttgccggtgccttcgcgggccttggtttccagaaggcggccgaccagcaccaaggtgatgaccacgccaaccgattcgaaatacggttcgcgcgagccttccgggaacacccacggggcgatgcaggtcaccagcgaatacaggtaggcggccgaagtgcccagtgagaccagcgagttcatgtcgggggagcgatgcgccaacgcggggaagccgaccgtgtggatcggacgcccgcagtagaacatcaccggcgtgatcaggatggcctgcaaccacgggttcaccatccaatgcggcaccagcgtgggattggccatatgcagcatggtgacggcgaataccggcaacgtcagtaccgcgcccacaatcaccagcttcgtcagtgccttgatctcattggcgcgttcagccgcctctcgccgatcggcctccgccgcatccacggcggtaggtgccgtatacgaagcatcaggatgaggaaggggcgtgttctcatccgagccgtcctctccctcaaccttcaacatcccatgcaccatattcatgccgcacgcaaacggatactcgcccggcggcaacgccggcagttccacgtcggtggtggcgttgcccggcagcatggcgtcaagtcccagatcagcaaacaccacatgcgaggtgcattcgccggtctcctgccggtcgaaggctagtgtgatcggcgtacccgcacgcatgctcaccacggcgggggagtacccgcccttgacagtgattgttgcggattggcgttcgccggaagcgtccatggccccggccgttgccttctgcgttccgaagaagaatcgcaggaccagccatgtcaatgcggccgccactatcagcgccgcgacggtcgagaagatgctgaactccataactgttccttcccactcctgatgtactgaacaacagtgtataccctatacccctagagggtatataatggggtgtgttcagctgacggataagtatcagggggtttgcgatgcatggttatgacgaagacaaggccaaggtcatcgcacgattacgccgtatcgaagggcaggtgcgcgccatcacgcagatggtggaggatgacaaatactgcatcgatattctgacgcagatttcggcgtcgaattcggcgctgaaatccgtggcgttattgctgctggacgatcatctcaaccattgcgtgcggcaggcgtcggtccagggcggcgaggtggccgatgaaaaacttgcggaggcttccgcggccattgcgcgtctcgtcaaatcgtgacgagttctgccgcatgatgacgcgcgctggcaaatcatgaaaggccgtctgacgctcggatacgacacagcataataacggttgatgctcgactgtgataaggccaagcgtccaatgtgggctgctgagcgtccgtttaacggcttgaaatcgtcgagttcggtaaaaatttaccgtcattcaccatcgatgacatactgggtaccatgtttgagcaaataggaaccgtgattatcgtcatcgtcgtgctagtggttggtgcagggcttggcctcttcgccggcttcgtgctggggcgccataagggtcaggagatggctcgaggcgtcaaaagcgaggagctggaggaggccaagacctcgctggagaatgcgcgattcgagaatgctgagctcagtgctcgcaatgctgccgcacaggctcagattgaaggcgtgaaccagcaattggctttcgccaagtcacaacttgcccaggcgcagcaggctgagcagattcgcattcagcaggaacgtgagcgtgcggctgcggaggcggaacggaagcgtcaggcggatgctcgggacgccgaggccaagcgtgctgaacaggaagcacgtttgaaagaacagagcaaggtactcgaggcgcttgcgccagtggccaaaaatcttgataccttgcagaacaaggtcacgcagatcgaagagggccgcaagagggaaatgggcgcattgggagcccaactcaaggggctcaacgaccagcaggcccgtttggacaaggaaaccagttccctgtccgccgcattgcgcaacaacaaggtgcgtggcgcgtggggcgaggcccagctcaagaacattgtcgagtccgccggattgctggaacatgtcgatttcgacattcaggtggtggtcacggatgccgatggacgtacgttgcgcccggatatgatcgtgcatctgccgggaggcaagaccattccgattgatgccaaagtgccttatgccgattaccagcgtgcctgcgagatcccggacaccgccagccccgaggatattgcccgccgcgatgatttgctgcgagcccatgccaaggcgttgcgcgagcatgtacgtgctctcggcgaaaaggcctattggaatgcctttgatgtggcacccgattttgtggtggccttcatccccaatgaggcgctgttgcaggccgcgctcgaagccgaccccacactgatggatgatgcgttctctcgcaaagtggcgctcacctcgccggtcacgctgtgggccgtgctgaaatccgtggcctatgcctggcagcagcagtcgctcaccgatgacgccaagcagctgttcgatttgtcccgagaactttacgaacggttctccacgttgggtgattatgccatcaaattgggcacccagatcaccaagacggtcagcgcctacaacaagttcgcgtccagcttggaacgccgtgtgttgcccaccgctcgcaagctgcaaaaaatcgaaccgaccaagatcatcgaggaagtaccgatcatcgaatcagacaaaggcaatgtgagcgaactgtccgcccctgaagtggtgccggccgatgaaggtgatactcatctgactgcctcaggcgatagtctggagtcatgactgaatctggattccgccccactggtaccccggacctcgccgtcgcgaagagccacaatgactttgccatgctggagccgcgtgaacagctagccaccttgctgagggagcatgtggtgggccgtccgttctccgaacttgccgcggtgactttcgaccaccgtgccgccaccgtcatgggccatgtactgattgacgctttggaagatgcgggctattcggttgatgacttcgatgctgttggtgccttgaccgcagcatctgtgcccatggtgtccgccatgatccaggccgccgcctctcgtggcgaggacctagacggattcgtgatggacttcgtctacccgtccatcaagggcccctccatcgaaggccgccgtgtggtgctgttggatgcttggctgtccgaaaagtcgtacgtgcagaccagctcgctggtcaccctgcgcaacggcaatgagctgagcctcgactttggcatagtggagcagctgggtgccaaggtcgtggccatcgcctcgctggtcggtggcggtgccaaagacatcaatgtggtcaacccctccaccggcgacgagcaaacgctccccttcatccaggtcttcgacgaatccgaactgcggtaaatccacctttgacttccctcgcataaagtcagccgggctgagccgcgaagttgactaagaggaaccggtgaatagcgttatcgaggagaaagattgcacgcacccaaccagatttctttggctgccaaagcttcaggtgaaccggaattccgtgaaatcggccttgggccgtggtctgagacccatcccggcgagcctcgtcccgacgatccgacttctccgaattatgacggtcgtttcgactcggtgctgttgaatgacggcgaccgccgcaacgtattggatcgttaccgctactggaccgtcgctgccattaaggccgatcttgacgctcgagggcgtcatgacttcgaagttgcggtggaaaactggacccacgatttcaacatcggttccatggtccgcaccgccaacgccttccaggccaagcgcgtacacattgtcggtccacataagtggaatcgcaagggcgcgttgatgaccgaactgtaccagcacgtcgaacaccacccctccatcgccgaactggtggaaagctggcatcatcgcatcgccggtgaaatcgcctatgaacgagccaaggccggtgccgccgccatccatgcgcatgatgtggctgtggatggagacaacaagcaccttcatgagctgctggccgaaatcgatgcttgtgatgcgcgcatcaaggagcttcaagccgcccgcgtcatcgccctcgatatcattcccggcgcagtgccgatggaaacctataccttccccaagcggtgcctgctgctcttcggtgcggaaggccccggattgagcgagaaggccctcgaattggccgacgatgtggtctacatctctcaattcggttccgtgcgctccattaatgcaggcgctgcggcggccgtggccatgcacgcatggattgcccaacacgccgtatcaggcgtgtagccatgcgccgacaatcctgccgcatctgcccaatatgggccacattagaggcatgatctacgccaccaaatccatcgccgcggcattaattcgcatttgccgccggcatcgtcggcatcctgctcgccgcaggcatcagcagctccgcgcagtccacactggccgaagccgttaaaccggactactggattcccgaatggtggcagtccggcctgattctcatcgcctgggctgccgccgcatggatcggcggtctcatcatcaccggaaaagcggatatcagatatcaaataacgcgggttactgctttggcagttctgccggttcggccatggtcctggcagtttgtcatggctatggctttggcggttctgcagtgaccatggttctggtgactctgaccccatggatttgaccaccgtggttcactgcgcttaaccagctcccatcactgttccagcatgaggtatgccggctgcccgcagcttattgagtaaaggatgttgttgcatcacctcctcataggtgaatcggacaatggtgtcgactttggcccggtacagtgccgtctcccgttctttctccgcctgaactgcaccacgaacacccttgcggtcattcatatccgggttcacatatttttcatagccatcgaattcgcccacaataagccgattctcaggtagccgccagaggaaatccacgcgatacagagcaccggtttgcgggtcggtgatgttttgttgcagttctggggctaataggccgcctgcgatgatggtgcctcgtccaagtgactcgccaccattctcactcgccggattggcataatgcagtaggcggaatatcggcgtgcaatcacgtcgcatagtgctgcacacattcagaatgtccgtgatggcgacgccgttgcgcagcgccgaatcgataatgggcagtgcaaatcggaagtcgacggacagcccgcaatccaccaccgttctggctttgctggtcaccgggagtccattggcatattctggcgtgctgcttgacgtgaagatgcgtttgacctttgcactgctggcgttggggcctcgtgatgttgtggcgagagtgatggtgccagcatgaagatgccattggtgttcaaaatcgtggatggccgctgccgtgaccccggcgaacacccaatccggatgtctgttatgaagagttcgtgcaatatgtctgatacgttcgtcgggttgcagcgaatcccagtattccgaagcggcgtacatgttggggaatacacgtttgagttcgcgcgcctgcacgcgccgagccagcgccgagcggtgtgccttggttgttccataagcgcactgttgcgttgcttcagccttcgtgatgagtatgtccactgctttgtgatgtttcatgattcgacggtatgccaatggtgaacacggtgtctatctgtctggggttatgtggttctagcttcggtgcctagatgtgtgtttttgcctgattatcaggcatctgaccgtattggactgattatgtggattcttttgggtgggtatgcaaaatgtggataactggcgaggtgcgcagggcgattgtcgttcatatgttcgatgtaggtgtgtttgggctcattgtgagcttattagggtggccatgcagatacttcagtggggcacatttgcggttgggccgtggcgttgcctcgctgcggggcgtctcagcggggcgttttattggttggaccgcggttttgttttgctgggatggctgagcggggcgtttcatcggtcagctcgcggttttgctctgctgcgagtcgtctcagtaaggtgaacttgcggtccggcaacggttttgccccgccgaagaagccagcagcggggcaaatgctcgaccggcttgagcttctgattcgctgaagggctccagtaggcgggaaaatgaggcttcccgacaactgcgtgtcacatacggctcatatagttatggccatgccaacattttcacgtgaagaaatcgtgcatttgggcgatctggcccgaatcgcgctcaccgatgaggaaatcacccgtctgcagggcgaactgaacgtcatcgcagactccatcaacaaggtccaggaagtcgcctccgacgatgtgccgccgaccgccaacccggttcctctggaagcctacctgcgcccggacgtcgccgaaaccccgctcacacaggaagaggcgctcgccggtggcccgaagaccgaggccggcatgttcgtggcaccgcgaatcttgggaagcgaggagtaatcgatgagcaacgaaaccgcaactctcgtcaaactgtctgctgccgagcaggccgctgccatcaagaagggcgacgtcacctctcgtgagctcgtcgaagcccacctcaaggtgatcgaagccgccgagccgtccatcaaggccttcctgaaggtttccggcgatgtggctctcgagcaggccgacgccttcgacgccaagtccgccgaagacaaggccgccctgcctgagctggctggtgtgccgatcgccatcaaggacatgatcgtcaccaagggcattgagaccaccgccgcctccaagatcctcgaaggctgggtgccgccgtacgacgccaccgtcatcgaaaagctcaaggccgccggcatgccgattctcggcaagaccaacctcgacgaattcgcccaaggctcctccaccgagcactccgcctaccaaaccacccacaacccgtgggataccgagcgcgtgcccggcggttccggtggcggctccgcctccgcagtcgccgcattcgaggcaccgatcgccctcggcaccgacaccggtggctcgattcgccagcccggcgccctgaccggcaccgtgggcgtcaaacccacctacggcggcgtctcccgtttcggagccatcgccatggcctcctcgctcgaccagatcggcccggtctcccgcaccgtgctcgactccgcactgctgcaggagatcatcggtggccacgacaagcgtgactccacctccatccccgaaggcccgcgcccgatggtcgccgccgcccgcgaaggcgccaagcgcgatctgaagggtatgaaggtcggcctcatcaaggaactcggcggcgacggcttccagcccggcgtcgaggcccgcttcaacgaggccgtcgacaagctcaaggagatgggtgccgaggtcgttgaggtctcggttccgcacatcggctactcgctgggcgcctactacatcatcatgccgtccgaggtcagctccaacctggcccgttacgatggcatgcgctacggcctgcgcgtgatgccgccgaccggcgtgcctcagaccgccgccaacatgatggcctacacccgtgaggccggcttcggcgacgaggtcaagcgccgtatcatcctcggtacctacgccctgtccgccggctactacgacgcctggtacggttcggcccagaaggtccgcacgctgatcatccgggacttccacaacgccttcgagaaggccgacgtactcgtggcccccaccagcccgtccaccgccttcaagttcggcgagaagatggacgacccgctggccatgtacatgaacgacatcgccaccattccggccaacctcgccggcgtgcctgccatgtccatcccggccggcctgtccgacgacggcctgcccgtcggcttccagttcatcgccccgcagcagcgcgacgaagtcatgtacaagccggctgcggccctcgaagccgcgctggaagacagctggaacggcccgatctggaacgacctcaagaccccgtggcttgacggcctgggcaagtgagcatcggaaggaaagaaacaacatcatggctgaaaaactgatgaagtacgccgatgccaccaagaagtacgatgtggtcttcggtctggaaacccatgtggagctgtccacgaacaccaagctgttctgcccggcccacatcgagttcggcggcgagccgaacaccgagctgaccccggtgagccttggcctgccgggctccctgccggtgatcaacaagaccgccgtcgattacgcgatcaagctgggcctggccctgcactgcgaaatcgccgagtggagccagttcgcccgcaagaactacttctacccggacatgccgcgcgactatcagatctcgcagtacgacaagcccaccaacggcaacggctacctggatgtcgaactggaggacggcaccgtcttccgcgtgccgatcgagcgcgcccacatcgaggacgacgccggcaagaacacccacgtgggtggcgccgacggtcgtatcgaaggcgccgatcattcgctggtcgactacaaccgtgccggtgtgccgctgattgagatcgtcaccaagccgatcgagggcgcgggcgatcgcgctcccgaaatcgccggtgcctacatgcgcgccatccgcgacatcgtgcgcgcgctgaacatctcccatgcccgcatggagcagggcaacatgcgcgccgacgtgaacgtctcgctgcgtccgagcccggacgccccctacggcacccgttccgaaaccaagaacgtgaactcgttccgcggcatcgagaagaccatccagtacgagatccgccgtcaggccgcccgtctggacgacggcaaggagattctgcaggagacccgccactgggatgaggcttcgcagaccaccgccggcggccgtctgaagtccgatgccgacgactaccgctacttcccggaccctgacctcgtcatgctccacatcaccaaggagcacatcgaggagatgaaggcccagatgccggaaatgccgcgtgagcgccgcaaccgcctcaagtctgagtggggcctgagtgatctgcagatgcgcgacatcctcaacgccgacgccctcgacctgattgaggaaaccgtcaaggccggtgccaaggc

SEQ ID NO: 108 - DNA, 20015 bp, Unknown
  R206_24m  MAG No. k141_21440
cggccaatccacgaatgcgatatctccatagatgattgcgttctgtgcgttacgcagtactagggaaatcttgatttgctgtccatcagatggcttgaatccatctgccacggcgcggacctcgccattgaacgtcgtgccgccgtccctgttgtctattttggatattccactgatggggaaggcggcggttccctgagccttggcgacgttgtatgtatccggattgagcacagtaaaatcaaccgtttctggggcggtgccttcgcctgcttgaccggcgtcatatacagtctgattcgggaatgccatattcagtgcttgcgtctgcgagaacacgatggaaccgtctttggcccgccccgtaatggtaatctgcggatactgcacctgctgggtcttactggtgttgcgcagggcgaaagcgtagtggacatacccttgctggtccgccgaccagccggattccactattttcagaggattgtcggtgacggtgtcttgattgtctccatcagcgccgtcagtgccgcctactccgcccgtgccattggcattgtcggttcctgacccgttcgaggagtgcccgccatcggccttatcggttgattggctgctggattgtgtcgaggaatcgggtgatgttgccgacccgataatgccaagttggcctgccaacacaatgcctcccgcaatggcggcgattatcagtgccgctccggcaatggaccacagcacgatggcgcgtttgctcaagtgcagacgccggaatagtcgagacgccgacgcgctgccgttcgttgttctcgttgatggcggatttgccgatgatgcgttcggtatgggcggattggactgggagaacagcgcctggcgaaactcttggacgctctgtggccgtttgctgggctcgaatgcgcacgcatagccgatgacggcgcgtagtcgagccggtactgcggcatcatcggcaagtcgctgctcgtagtcgctggcatcgggatatacgccggtcagcatgaatccgagtagccggcccagcgagaatacgtcggaacgcgcgtcggttttggcaaagccatattgctcaggcgaggcgaatccgtaggtgccaagcgccgtggtatcccgtgaacggttgcttgcctctgaccggatgcgcgcgatgccgaaatcgatgagatgcgcgccatcctgggccacgatgacgttggccggcgtgatgtcgcggtggataacgccgtgctggtgaagctcctgcacggcttcgcaaatttggtcgataagctgcacggccacattcggtgcaagccgcccgttttcctccgcaatttgcgcaagcgtgctgcccggcacgtaatcgtagacgatgacgaaccggtcgggcagctcgtacgtcgcttccacacgcggcagacgattactctggcaggcgctgagcgccgcccacacattgcgttgcgctaggggagagggaatcttcttgcgtacgaacgggccgttgccgtcaatgctcaccagttcggtgacgccggaaggtccgcgagcgagcgtacgctcgacatggtacgcatcgtcgatgctcatcgcatgcatcgcctgcttatcgtccatgtctctccttgatgccctcttacttgcgtctcactggtgagtgttgttgggccgaatgtcgtcaatcggccggtagcaacgtcgcctctcccatacgatacaactcgtcgtccgtggcaatgcggtcgaatccattgcgtatacaccagatgataatcgcgtcgcgtcgctgtttgcaccacagttcggaaacgcctgcaagacgaagtagccgttgggtttcacgtaatgtgcacttgagaccaaaagccagcataatggcgtgatctcggccggggcggcttttgccggagaaaatgtcataaaccactgtggcgttgaggccggatgcccgcaccacgtcggctcgtctcaggtcatgggcttccatacggtcgaacagatagtcggtcagcgtgcgtgcgctgacgagtccctcatcgagatactgctcaatgctggcgctggcgagcagccgatccaacagttcctcggtcaaatgttcttcggggatgtctgccattgcccatgctccttgtcgctgtgttgcgggtgctgtgctgcgccatcgtacgcggttgctcgattcccagcgtacaggacgccgacttttcggaaacacgccgaaaaattcagttgtcagctgatgtatggcccgcgcgtgtcgccgacaatggtcgatgccatccgtgtaggtgcggtggcggaaaggatgttcatgcgcggtatcaagcatcgacaataaagctaatatgcatacaaaatgctaatttgcgtacataataacaacgccatacactggtttcgatgtatcgcagagcaaagcgagcaataagaagggacgcaatgatgagcgaacgataccggcttgccatggcagtcggattgaccgtaacggttgccgggcttgcctcttctgtgctggtaatgctgctgcttaaggaaagaagggcatcatgacaacgccatttgatcaacaacctcagccggttccaccgtccgaaggcacgaatgacgcaccggaagatcgcgcgaatgcgcctaccgtgccgaatactgtaccggctggccaaccgaacgtagcgtctgatggtgctaccaccactccgatgactccggctacggcatcgcagcggcccgccggcgcgccatttgatcgtgtatatgcggtcagtccgcaacagctgttccaagttattcacgaccagctgactactggcgccacgtttaccttggataacgaaaacacccagaccggagcgttttccttccactcctatgatggggtgaactgcacgctaaccgtagtcccgcagggtgcggcaggggccgccattcgtctggaggcgactggaaacgaaagcgccaagcgcgttgatgagttcctcgccgctctggacaagcgtattggtgtggctcctgcacccgccacacatggtgccggtgctgccactggttttgctggtgccgctgcgcctgccgtgcttgctccgaatgcacaaggggtgaagaagacttccaagctggctgtgttcgccattatttggggagtgttgttcgtactcgcccaatttgtggatgtttctggccgatcctggggcggactgctgttcgccacggtgattccggcactgctttcaggcttcgccgtatacgtgacccgcccgagtggcaaggtgcaaggccgagtgctggcctgggtggcagtcggtatcaccgttgtgggtctggtaatcggtggcgtgttcgtaattcgtgacgatgcgaaggccaaggctgatcgggcggaattggaagcatcgctcgccaccaagtgcgaagcatattcatggccggagtcggatatcgcggcgctgctgccgcagccgaaatccacaaagggtgaaattagaagcgagtcttcggactatttctccatcgaggtgtgcggtaccgacgccaagcagtatgccgactacgtcaagtccgtgcaagacaacggtttcaccgtggactatagcaagtccgctgacagtttcaatgccaagaacgccgatggatacagtgtgagcgtttctcgtaacactgacgacgagaccatcatgtccatcactatccaggttccggaaaagaaggaagatacgtctacggacggcgacgccgcgaagcaggatgataagagcactgatacgggcactgattccagcgatgccaacaagcagagcgaccagtcttcggatcagaaggcgcagcagaacaccaatgacagtgctgacttcaaggccacgatggacagctacgaggcctttatcgatgagtatgttgccttcatgaacaaatatcagaaatccgataacgtggtcagcatggctaccgactatgccggcatgatgaagcgttactctgagttctcccagaaggtagacgccattgacgaaaactccctcagcagtgaggattcggcctactacaccgaggtcatgactcgatgcgcgcagaagctcgcatcggtgggccagtgatcagactggcgtatcgaggtgacggttttccaagaaaggaacgatgacggtatatgggtatacgcggcagacagtatacgccaatggatgagccggccttcaacaaggccatccccggaacggaggctctggccggggcgctgaaggacacttttggcgcattccgtagtgggcttggtattaccgaacctgtggtttcggtgaattgcgaaggttgtggcgctccgctttccggtcatcgcaaagaagtcgttcgatgcgaatactgcgatcgcgaaacgcagctataaccaacatgccagcataacggccggtcttgcgattgcagagtcgcaagatcggccatatgcatgagatatcgaggaaaaaacagatggcagttattaaggcgttcgccggcgcgctcggcggtacattcgcggacctgtggcgtgatatcatcaccgctggtccgttcacggaacacaccgtcgttgtgccgggcattccccgcggaagcaacaacgatcgcggttcgaatgaatacggttccgagggaataatcaccaatggttcgcgtatctatgtgccagagaatactgcggcgttcattttctctgaaacaggtatcgaaaacgtcatcaccgagtcgggcggttatgaatatcgcaacggggagcagagcgtactcgccggagacggcatcggatcgttcttcaatcaggttgccgatcgattcaccttcggaggtcagcctggccgcaccaaatatgtggccttcgtcaacctgcgtgagattcgtggcatcaaattcggcacttctgcgccgctggtgtataacgaccggttctatggcgtcgatttggaaattcgcgcacgcggatccatgtcgctaaaggtcactgatccagttcgattcgttcgtaactttgtgcctgccactaccgtgtcgtattcattcgatgatgaagggccacgtaggcagattctgtctgaattcgtacagtcgtttattgtggccatcaattcgttgtccaatgaatatcgtatttcgcaattgcccggcaaggcgaatgacatcgcggcatgcgtgcgtggcgatcgggccaatgcaggtacgtggaatgatcgttttggctttgaagtgtccagtgtgggcatcgaaagtatcgagttcaccgagcaatcacgtcaactcgtgcagcagttcgcctcgaataagatgaatgttgccgcatacgagggcgtttcccaacaagctggcaatatggctgcccagcagcgcattgcgcaaggcatccaagacaacggctttggcgatggtggcatgttgcttggtatgaatatggcgcaatccatcaatcctatgacggccgccccggttcaagcgccggcacttgcgccggcaccggaagccgctgctcccgccgctcacacgacatccatgtctgtggaagaacaagtcgaggcgatgaagaaattgaaggaattggttgatatcggcattctctcccaagaagaatttgatgcaaaaaaacacgaaattcttggcctataaacggtgtattcacgcaactcgagacagttgataatgagggaaacgttggtgcggtatatcggccgccaagaaggcagctgaagaagaggctgcaagaaaggccgctgaagaacaggctgccgcgcaggccgaggcccagcggcaagctgaggaggccgctcgacaggcacaacagcaacagcaagcgcagcaaaatgtgcattatgcgaattgctctgaagtccgtgcggctggtgctgctccgttgtatcaagggcagcctggatacaacggcaagttggaccgcgatcacgatggcgtggcccgcgagtaacggattcgatatttcggcgactcagcgcttgttcgggccgccgtccgggaacatcaagtaggtgatgatgccggcggcggttccactggccaatgcgccggtgatgacggcaagagcctgcatcgccgtgctgagcgtgggcttgcccgttgcggcagtctttgcatccttcaatgtggcggcactgggcttgcgtttctcggcaatggcattgtcggcagcgttgccaccgtccgtattgactggggcattgtcggcaacggcctcgccgtcctgctcttgggcgcgccgttcgcgaatgcgttgctcaatgggatcgtcgaccaaagtcttgatgatgcgtgccagatcgcggtcttcacgacgtgcgatctcggcgctgaacaccgtacgtaaagcgagatactgcagcttggtcatcgggcttttgccggtctccaagttagacaccgtctgtcgcgcgactcccagctcgtcggccagttgctgagtcgtccatccggctaccttgcgaatcggacccaggttctcctgaaacttatcaatccaccattgttcgatttcagacgccgccattacgcacctccttccacgctgtcaccagtgtacgtcacctgtaccgaaatcaatccaaaaaacagtgttcatgtgaaattcactgcgtatttgcgctttcgccggcttaccgagattagccttagacaaggaataacagagtagaagcagaaggtatgcgcgtattcgatttcgacggaaccatctatgatggcgaaagcctgttcgacttgtacctgtattccgcccgccacgacccgaaagtgttccgctatatcgcccccgtgctgcggtacgcggtcaaatacaagcttggccgggccacgcttgaacaaatggaatacggcgtgggcaagatgaccgaaggctatctcacggaactgagccgatccaaacgggtggcgagcgtcgaacagctcgtggacgatttctgggaccgatattacgcacgtatcaagccttggtaccagcctgagtcggacgatgtgatcctcaccgcatccttcggtctgacggtgggggaggcctgccgcagactcggcgtgaggaatctcgtggccagcgaggtggatgtggagacgatgaaggtcacgtacctcaacttcaacaccaacaagaccaaacggttccgcgaactgtacggtccggacgccgtcatcgacgagttctacaccgactccaagttcgatcagccgatgatcgacatggcccggcatgcgttcatggtcaaggggaacaccattacgcaggtcaagtaggaaacagcagaaaacaacacaacgtaaccaataacgaaagaggaatccatatgagcatgccgctcgatctatacgtaatccggcatggcgaatccgaagcgaacgtcatcgtccaggcgggcgaacagggcgacaactccctgtatacgcaggacaacgtcaccgtacccgaccgctcctggagactcaccgccaccggacgcaagcaggccgactgcatcggacgctggctcgtcagccagcagcagctgttcgaccgttacatggtctcgccatacgtgcgcacccgcgaaaccgcagccaccatggccctgcccaaggccaaatgggaggagaaccgtgtgctgcgcgaacgttcttggggtgaaatcaacaccatcaccaaggacgaattcaaaaacaactacgcacgtaactggaacttcaagaataccgatccgctgtactggcgtccgccggcaggcgagtcgattgccgatgtggccgaggaccgtgtgcataacatcctgacctcgctgagccgcaaatccgattcggaatccgtggtcatggtcacccacggcgacttcatgctcgccctgatgctcaccatcgaggatctggccgacgaggaattcctgcatcgcgccgactcggacgactggaagatcaccaactgcacctgcctgcactacacgcgccgcgacccggaaaccggccgcacctccaagcgtgtgcgctgggagcagaccgcccggcccgtgctcgacgagacgaccggccgctgggaggtcaaggtggagccgtggcgcgaattcaagcgcccgtacctgtccaatggcgatttggtggatgtggtgcaggccgtcgatccgcacctgctggagtattacggcaaatagcctttcccggaagagagacttcacaaaatcttcgtgagctagaatggcgcgtagtgcggctggttgtgaatgccgtgccccaagcgagagcgaggagagtagtaatgtccaatatcttccaatggcaattgcatggcgacggcaagacgctggcgcccggcgaggtcgtcgagcccgatgaacgtctgacttgggtgcgcaccgccggtatcggcgcacagcacgtcatcgccatgttcggtgccaccttcctggtgccgattctgacgggcttcgacccgtccaccaccctgttcttcacggctatgtccaccgcactgttcctgcttatcaacaggaacgtgctgccgagctatttgggctcgtccttcggcttcatcgcaccgatcaccgcggtcaccaccgccaacaagggcattgcggtcgccagcttcggcatcatggtcaccggtattctgctggccctgattggcgtgctcgtgcattacgccggctccaaatggatcgacatcatcatgccgcccgtggtcaacggcgcgattgtggccatcatcggtttcaatctggcaccttccgtgtggaccaacttccaagccgcgccggacaccgcactggttaccctgctggccgtgctgctcgtggccgtgctgttcaagggcttgctgggtcgcctcaacattttggtcggcgtaatcatcggctatgtatatgcctgcatccgcggccaggtcgacttctccgccatcggtgacgccgcatggatcggcttcccgaagttccacctgccgcaggccgatttttccatccttcccatgttcgtccctgttgtgctcgtgcttgtggctgagaacgtcggccatgtcaagtccgtggcccagatgaccggccgcgactacgacaaccagatcggcaccgccctcatggccgacggcctgggcaccacgctcgccggcttcggcggcggctccggcaccaccacctacggcgagaacatcggcgtgatggccgccaccaaggtgtactccaccgccgcctactggtgtgcagccgccttcgccctgatcctgagcctgtgcccgaagttcggcgccgtgatcaacacgatccccgccggagtgctcggcggcgtgaccacgctgctgtacggcatgatcggcatgatcggcatccgcatctgggttgagaacaaggtcaacttcgacaagccgctgaacatcatggtggcagccatcaccatgattattgccatcggccaattcgcgttcactgttggtggcatttccttcaacggcattgccattggcacgatcgtgattcttgtggcctaccacggcctgaaggccattggcaaggcaactggcactatcgccaaagacgatccggatattttgtagtgtgttttagggctactgggccgtattgtggctcagcccttttgcacaatggcttctaccttcacgggtaggggccatttgcgtgttccatggggcggtgctcgccttacgtggtggtagaacccatgggggcggtaattggcccatggggcggcaaacatcccatggggcggtaaaaccctcatggggcggtaggtgaaaatggctttattctgcggtttcacaatttcttcaaaccgcctcatgggcgagttaccgcctcatgggcgagttaccgccccatggggtcatcagtaaagagtgggatgacagcgtggcgagcatcaagcaaagtagggggcttacgctaagctcggaaagcttgcgtaatttgcgtaacctttgacatgaaaggccactgtgccccgtaataatttcgatgatcgtgacgattccgctgatttccagatgaacgacagcgcggaatcccgcccccttacctttggcgaacttggcgtacccggaccgctggtgcgcgtacttgcggcagatgacaagaagaccgcattccccattcaggccgacaccctgcccgattcactggccggccgcgacattctcggccgagggcgcaccggctccggcaaaaccctcgccttctccattccgctggtcacccggcttggctcctatgattcgcttggcgaaatcgcgatggaggagttccgcaaggaaatcaagcgtcgcaagaaggccagcttggaagagcgccgcgctgacgatttcctgccgcacccacgcggcctggtgctggcccccacccgcgagctcgcgaaccagatcaacgacgtgctgatgccgctggcccacacgttcggcatgaacaccaccacggtgtacggcggcgtcaagtacatccaccagatccgcgatctgaaggccggcgccgatatcgtggtcgcctgcccgggccgccttgaggacctgctgcgccagcaggcgctcacgctctcgtccgtcgaagtcgtggtcatcgatgaggccgatgaaatggccgatatgggcttcctgccgccggtcaagcgactgcttgagcagatctcgcccgacgcccagcacatgctgttctccgccacgctcgatcacggcgtggatgaagtggtgaacaccttcctgcatgatcccaaggtgcacgaggtcgattcggccaccaccgaacctgacctgatgacccaccacgtgttcgagaccacgcgcggcgacaagcacgaactcgtgcgcgtgctcgcctcgggcgaaggccgtcgcatcctgttcacccgcaccaagttccaggccaagaagctcgccaagaacctgacgcagaacggcattccggccgccgagctgcacggcaacctgaaccagaaccagcgtgatcgcaacctcgccgcattcgattccggcgacgtgcgcgtcatggtggccactgacgtggccgcccgtggcatagacgtcggcggcgtggagcttgtggtgcaggtcgagccgccggctgacccgaagtcctttgtacaccgctccggtcgtaccgcccgtgccggcaaggcgggcgacgtggtcaccctcgtgctgcccgagcagcgccgcgagacgcgccgcttactgaaccaggccggcatcaaaaccaagatgatcgaagtgacccacgattcgcccgaagtgcttgagcttgtgggcgaccgcgccgagcgcgtggatggttggagcctcgacaagtcgcagcccgtgggcaacccgcgcaagggcaagaacaggggcgccaagaacgcggcgggcgatgagtccggccgcagcggcaggcgcaagcacaatcgcaatcgcgaccgcgccgagcagaacgttgccgagaccggattccagcacgagaacgcaggcggcgagtttgttgccgaaggcgagccgcagcgcaagcacggcgacaaggccagcaagaaggccgtgaagaagaaccgcaaccgtgcggaacgccgcgccggcatgagcgaccccgaggccgagcgccgcgactatctgttcgagcatggcgatgaccgccgtaagggcggccgtcgcggcggatacggcaaaaaccgttacgacgagcgccaggacgatggccgcaacgagtacggcaagaaccgtcgcaatgatcggtacggcaagggcggaaaattcgacaagcgcatccatcgcaagaacgagaaccgcatcgtacgcgacgagcgttcagaaggtgccaagcgtcacgaacgccgcatgatcgccaaatacggcaacacggaaggcccgaaccgccgccactccaagaagaatcgcaataatgcgccattccgtatgaagtccggacgccgttagtccgacagcgcgtatgaatcaggcccgacgacctttgatggtcgtcgggcctgatcgtgttgtaggtcggtgttttcgatgcggatgcctgttcccgacatgatgtgtatcattgtttcataaatatgttatattaatacacaacttgatgggagccacgctgccatccatcatcgggttgttcgacggatcgcctatgcgtgggctggccgtcggactgcgggtcggcacatccggggtgggcatagtgctcggcccggtcatcggcggcatcctgctgcaacggttcgcatgggatagcgtgttctgggtgtgcgccgtcatcggcatgttggccatttgcgccgccttcctgtgcctgttcggtttcatcttcctcacaacccaatggttccaggcgctgcgtgggtattcggcgctcgagacggcgattgccacactgccgttcgcggtcgtcatggcagtgatggccgcaggcatcgccctcgtccagggtcccgccaccgacgcgctgatgacggccgtgccggtcggcgaggagggtatgggcagtgccgtcaacgacacgatccgcgaactcggtggaacgctcggcgtcggcatcatggggtcgctgcaggccggtgcgtacaccaccggcctgacggacgcgctgcgaggatcccacctgccccagggcatccttggcgcatccaaggaatccgtgatggctgccgaatccatttccggctccctgccgggcaccctgcgcagattgctggatgactcggtcgcatccgcgttcatggacgggctgcacagcgtctgcctggcggccatgacgattgcacttatcgccgcggtcgttgcgatcgtggccatgccaaaacggcggtaatggcctgtacgcaccctagaataacggatatgacgcaatcgcagccccgatccagacgcacgcccacccttgaaatccgcggaagaatccttgacgcggcgaggcggatcgtggaacaggacggcgtggacggtctgaccatccgtacgctgtccgcgcaggccgacgtgtcgcccaccagcatctaccagcacatcggcggcaagcaggcggtgtccgatgcgctcatcgacgcatacttcaccgatctgcgcgaacagctcatcgccattgacgaatccgaccccgtgctgcgtctgcgcagagcgggcataatctaccgcgaacacgcgctggacgcccccggtatttacacgctggtctggatggggcaggcgtcggactcggcccagcattgcctggacgccatcacgcagatcattcgatacggccaggcggcgaccgtgttccgtgacgatgacccccacctgattgcatcctccatctgggtgtccatacacgggttcatccaattcgaactgcgttccgcccaaccccgcacacgtggccgcgaacgggtcgaccggtcgtacggttacctgctcgacctgctgatccgaggcattcggcggtaaatggtgagctccctctgatgagggagctcagtattgatacgctgcactgccgtcggcgttgcggatggtgaaagtgggggattgctcgatgttgaggtccacggtcagggaatgctgggcgtcggcgctcgtcgaacgatagacgaagtgcttgttttccagcttcacggcctcggtacgcgcatccatcagccatgggttgcgacggcgcagcgcgatcagcgcctgatgcagccggtatgtcggctctcccagcgtggacagttcggcaggggagtcggggaacttcggacgtacgtcgtcatcgccgccgaaacgctcctgcttgacgcccacatagccctgctcgtcgccgtaatagatgcttggcacgccgccgaccgtcatgagcaccgccaatgccaacgccgccttggccgggccaatctgcgatgcgatacgcgtcacgtcatggttgccgatgaacgtctgcggcacgaaggaattcaggaacgcgttgtgccgcttgagattccaatccagctcgaagaagttctccgtctccagcgcatgctggatcgacttccatagctcgtattgcgtgatcgaatccatcgtggattcctcgatgatgcgcgggtaatcgccatggatcacctcaccgaaaatccacgaatacgggtgtgcggctttgacctgcggcaacacgcgcgcccagaacgggctcggcacggcatacgcggcgtcgaggcgccagccggcggctccgcgatccagccaatggctcatcacatgggccacatagtcaacggtctcgtcagccgaatggtccagcgccaccagatccccgtgcccctcgaacacatccaaagcgggttcgtcattatcaccgacatgcgcgcggaccagaccatgccacgggttgtcggccggattcaagcgtccggtggtctcgtcaagcgccgcccggacggccggatgatcgcggctcacatgattgaacacgccatccagcaccacctgcaatcccatgtcccggcaggccgcaatcagctggtcgaacgcggcatccccgcccaatcgcacatcgatgtgcatatggtcgagcgtgtcgtatccatgcgtcgccgactcgaacaccggacccagcagcaggccggacgcgcctagatcgtgcacgtactccagccaagggatcatcgcgtcaaggccgcggccatggaactggcgcgggccggcgggcctgatatcggcaccgcagaagcccagcggatacacgtgccagaacaccccgtacttcacccaatcgggcattgtgcggctcgaatccgtgcttacaaccactgtgcacctcctgattgacaccgtgtccattttcgcacacgtatgaccgaatcctcggtagatggcgggaaatgtcgacgagcatatcgaagcaaagtatgagcctgcccccgttccgttggttggtgtgcaaggccgtgaccctgatctgcgccggcatggaccgccgccgcaccaacgggttcttcacctacgcgcagatcgtgggcgcggcggccatgagcttcatgcatggcgcgcaggatggccagaagttcatcggcgtgctgttcctcggcatggcgttctgcaacggccaacccagcgtgaccggtgtgatgattccggtctggctcatgattctgtgcagcaccatcatgggcgtgggcgcggtacgccgcctctccgccatcaacttcggcgtggtgcgcgacatgatgctcacctgggtgttcaccttccccggttgcggtctcatcagcttcgtaatggccaaactgttcatggtcgtgttctagaaaggattccacccatcatggcgagacaaaaagacgtgttctacttcgacggattcctccgcagcgcggactacgcatgccaggccgcgaagctgctgtccgaggtcatgcacgacttcaatccaggccagctgcgcgaacgcatggacagcatgcacgcgattgagaagtcggcggacgaggtgcgccacgacatgatggacgaactggtgaccgcgttcatcacgccgttcgaccgtgaggacatcgacgagcttggccacgtgctcgacgatgtgaccgacagcatcgaaggcgtactcaaccgcatgtactacgacaatgtgaccgacatgcgtgacgatgcagtccagatgtcggatatggtggtgcgcgccacggaaagcatctgcgagctggtcaacgaactgccgcgattccggcattccaagacgttgcgcgaactggtgttcgccatcaacacgatcgaaacggacgccgaccacctgttcatcgagtcgatgcgcacgctgcacaccacctgcaccgatccgctgcaggtgttcgcctggcatgacgtgtaccgtcacctcgaacagtgctccgacgactgcgagcgcgtggccaacaccatcgacagtatcgtcatgaaaaacagctgaggttggtttttcataacctccctctgatgagccgagccgtgaagaaaacgccggaggtgtttttaggcaagggtgagtgacaacgagcgaataagaggtcagctgcaagctgtcctgaatcgcgttcgaggtggcatcgcgaagcgatggcggagggagagacctacttgaccaaaggcccctcaccgatgggcgttgagccagaggatggcgagttgggtgcgattggtcaggccgagcttgtccagtatcgcgctgatgcgattgcggaccgtgccttcgctcaggaacagtctggcggcgatgtcgcggttatcgaggccctcggcgaccagcgcggtgatctcacgttcgcgctcgccaagcaggccctcgatggaatcggcggtatctctggaatcgtcggaatcggcaggattcggagtccgttcggtgagcttgccgagcacttccgcgccgagcaccacctgaccggccatcaccgcctgcagcgcaggcccgaccgccgccacatcctgtttgatgagatagcccttggcgccaagccccatcgcctgcgcgatatacgactggtccgcaaacgtggtcaggaacagtatgcgcgcggccgggtccgtggccagaacctcgcgcgcggcatccaaaccgctggtgcagggcatctgaatatcgatcagcagcacgtccggtcggctcgccggcgtctcgaaataacggcgcacggcggcgtcgccgtcatttgccgtccatagcacctcggccgtgccggtggccgtcagaatcgtctccaacgactggcagacgatcggatcatcatccacgattgcgattctcatcaatccctcgattccatggtccaacgcttcttcggcacggatacgaacacacgccagccgtcctcatacggcccgcagaccgcggtgccgccaagggcgcgcacgcgcgattcgatatccgccaaacccatgccgcgcatcagctcatcggccgaaccacgcatatcggcaacgccgtcggcggcgagtcgcgagccgacgcgcgtggcgcacatcgcacgcgggcgggcagcggccgtccgggacccatcggactcggacacggccggccccggatcctgaatgaccaactgccagaacgcggggaagtcgcgcaacgtcacgctcgcctcgtgcgccgcactatgatgcaccacgttcgacaatgcctctcgaatcacggtcgcgaaacagcgcgagaccggcgcgggcgccttggcgatgtcgttggccagcgtcacggcgaaaccgggggagatgccgtcgaacgacgtgacggcatcatcgatctgcgcggcgaaatcagtgccgtcatcctcaagatcatgcaccgaacggcgcaccatcgtcatcgcatcatccaacgtcgcacccaacgtggcgaacccttgcgcggcgaccgtatcgttcgtcgcctcggccaccgtcctgccggcctgcgcctgcatgatcgcgcgggtcagcagatggcccacattgtcgtggatctcccgggcgatacgcgtgcgctcgccgagggtcgccatgcgaatcgactgggcgcgttcctcatcgatgtcggcgatgcgcgaacgagtggcccgcgaggattcgcgcgccctgtcctgcgcgtgcagcaacgcgcgccgcgcctcgtccgaggaggcgcgggcccggcccagaacgaatccaagcagggcgaccatcgtcatcaccagcgtctggagacggtcggtgccacgggcgaaccagagcgcgatcggcggcaacagccatatccagcgcgcggcgaccgaaagccacggggccgaacgtattgcatcggcaagggaacggcgagaggccgcggtccgcgagacactgggggagcggccgcttgtcgcagtccgtgccccagttcgggctccggccgaggcgagggccggcagctgtgcagtatcgtaggcgatgagcggcatgaacgcgcaccatgaaggcactgccacggcgatgacgagatacgccgtacacaagacccaagaccattgcgcgggacgcagccattccaccaatccggcgacggaaacggccaacagcaggccggcgatgaacacgccatcgagccgcactccgacaagccaggccaaagccaggcccaacacgagcagcaagaccttttcggccaacacacgcatggcacctccccggctcgacgctcttccaccaccagtctagcggtgcgcggaacacgacgaacttgacgggcgtgcggaattacccgcatgacggtccaagacaacgggcttacacttcccgaatagatgaggcacaagcgtcggatgtcgtcgacacaaccgtaaagggatgataccgatgattacgcaaagccacagggcgtccaactattcgatggacgagatcagcctgatgccggtcgataaggtgtacaaggccatgcagaccgacgccgaaggactgtaatgacaaatgtcacgcctgtacggccaagtcgtgacgtttgcctgtggcggcgtccggccccttcttgggatgatggaatcgccaaggaagggagtgactatgacaaccgacaacagagcttccgaacacgactcgacaaccaacccggctctggccgtgcacgtcagccaactggtcaaacgctacggcgacatggtggcgctcgactattttgaccttgacgtgaaccagggcgagattttcgggctgcttggaccgaacgggtccggcaaaaccaccgcgatcaactgcatcctcgcgctgctcacctacgattcgggcacgattcgcgtgttcggccagccgatgacgccgacctcctacgcgctgaaacgtcgtatcggcatcgtgccgcagaacgtggccgtgttcaacgaactgaccgtcaccgaaaacatcgactacttctgctcgctgtacgtgccgaagaaaaccgaccgcgcgccgctggtcgaggagtccatcgaattcgtcggactccaggacttccgcaagttccggcccggcaaactgtccggcggtctgctgcgacgcctgaacatcgcctgcggcatcgcgcacaagcctaacctgatcttcttcgacgaacccacggtcgccgtcgacccgcaaagccgcaattcgattctggaaggcatccagcggctcaaccaggccggcgccacggtgatctacaccagccactacatggaggaggtcgaacagatctgcgaccgcatcctcatcatggaccacggccggcacctggcgctcggaaccgccgacgagctcaagaacatgatcgacacgggcgagcgcatcaccatcgaaacgctcgatctggcggattcggcgatggccgaggtccgtgcgctgccgtgcgtgatcgaagccacctacgacggcaaggaactcgacgtgcgatgccgtcgcggcgaacacaacctgaccgacgtgctcgacgcggtgaaacgctccggcgccaacatcggccacctgaccagtcgcccgcccaccctgaatgacgtattcctggaactcaccggcaaggcgttaagggactaacaatcttgcccccgctggcgggggctcccgcgaagcgggcgggggcggtcccgtagtaaccaccctcagtcagcttcgccgacagctcccgccagcgggagcaggtaaggagacatcatgtggaccacatttctggtcgcattgaaagcgaacctgcgcaatcgtcaggcactgttctggatgattgtgtttccgatcgtgctggcaaccatgttcaacgggttcttcggcggactgtccgagggatacgagctcaaaccgataccaatggccgtcgtcgaagatagccgctggcagcaggcagacggagcgcgtacgtttgtggatgccttgtctggagagacggcctcatcgtcggagtctttggacggcacggcatacgccgatatcaatcagcaattgctgaccatcaccgcagccgacaccgtgcggaaagccgaacagctgctcgccgatggcacagtccgcggctacctggctgctgacggcaacgggcgtttggcgataaccatcagtcgggaaacggtgaccgcggccaatgacaccacaggaagcgtcggactggatatcagcctatcggcattgcgcagcgccatcgacctgtacaaccgcaccgacg

SEQ ID NO: 109 - DNA, 27206 bp, Unknown
  R206_24m  MAG No. k141_21454
accaccacgacaggcaatcaggcgaggaatgaactggcaatcattgactataaagaagtagtacaaacacgctcttgagttctcaaaccaccaccacaccagcaagacaggaaaccaaccagaagaaggaacccgccgcgctgagcggcaacaggtgaataacttacacgcaaccacgccacaacgcaaatcaaagcgcacaagaacccaaggaatcggcataacagcgcggttccttcggcgtgtcgcacagagcccaatttgctctgatagggctagcgtaacccctcgaatgtttccggaaaacatcgaatccattattcggctggcgtgtcgcacgagttttcggactgtcagctccatgttcatcgttcggcaaccacaccaccggcgcacaatcaatgcatggcaacaacgctccatcatcggatttcgttcatgaatcacgggtatacctgtagttatgaccaagaagattgctgtattaaccggggcgggcatttccacgtccgctggcatccctgatttccgcggtccagacggtgtgtggaccaagcatcctgaccaaatgagcgtttacgacatcgatctgtttctgcgtaacaaagaagaccgtgagtactcctggcgctggcagaaggaatcaccagtatggaacgcacagcccggcaccgcgcataaggcgctggtcaagctggaacaagccggcatgctgacgctgctggccacgcagaacttcgatgcgctgcatgagaaggccggcaacagcgacagcgtcatcgtgaacctgcacggcaccatcggcacctcgcattgcatgaagtgccatcaggaatatgccacggcggacatcatggcccgtttggatgaagaacccgatccacattgccatcgcaaactgaagtatcgcggcgatatgccatgcaatggcattatcaaaactgatgtggtgtatttcggtgaggcactgccggacggagcgatggagaagtcgtacagcttggccaccaaagccgacgaactatgggtaatcggatcgacccttgaggtgtacccggcagcgagcattgtgccggtggccgcgcaggcgggcgtgcccatcaccatcatgaatatgggtcacacgcaatatgaccatcttgcgagccgcttgattcatgaggatatcgccgtcgcgctgccgaagttggtggacgagacgattgcggagaacaagtagtcctcagcataacgaaagcgccggtgggtggttaagcaactgatgattgttggttaaccacccaccggcgctttcgcgccacctcccgctagcgggaggtattggagcacacttctgcgcggcctcccgccagcggtattggaatcagtagatgcgcttgggctggaatccagcttccctgagtgccacgaggatgcggtcgatgtgctcggggccgttggtctcgaccgtgacgccgagagacaccgcgttggtgtagtggccggatgccttgaactggtcgtggtcaagctgaatgacgttggcgcgctgctcggcaagcagggtggccaccttgacgagctggcccggagtatccggcagctcgacctcgaagttcatgatgcgaccgcgggcgatcatacctttctgaatcaccgcacccatggtcacggtgtcgatattgccgccggacataatcggcaccaccacgtgcgggccggtggcggcggcgaacttgcgcgaacgcaggttcaggtgttccagcgcggccagcgaaacggcgccggccgcctcgaccaccagcttatgcttctcgagcatgagcagaatcatttcgttgatgtcgcgctcggtgacggtgaccagatcgtccaggaactcgttgatcagagcgaagggcaggtcgccagggtgcttgactgcaacaccttcggcggaggtgaccacatggtcagccggagacacacgacccgcggccagcgagtccttccaggccggggagccctccggaatcgcaccgattacgcgcacttcaggcttgaacgtcttgatggcgagcgccacgccggcacccaagccaccaccaccgagcggcacgaccacgtcagtgacgttcggcacgtcttcgaggatctccagaccgatggtgccttggccgcaaatgacttcgtaatcgtcgaacggcggcacgtaaatcatgccttccttgtcggcgagctcagcagcgtgggcggcggattcgtcgaacacatcgccgtacagcaccacatcggcgccgtaggccttggtggcatcgaccttcagcggcggggtgatctgcggcatgcagatggtggccttcgcaccacgctcacgggccgcataggccacgccctgggcatggttgcctgcggatgcggtgacgatgccacgggcgatctgctcttcggtgagcgatgcgatcttgttgtacgcgccgcgaatcttgaaggaaccggtgacctgcaggttttccggcttcaggagaatctcatgaccagtcatctcgctcagcaccggcgaagggataatttccgtatgacgggcagtccctttgagacgtttggcggccaacttcagttcggctgcatgatcacgctgcagcgccttcaaaacatccttttgttccatagcttttaattgtatggcgcggggacaccgaaaacagtggcttatctcgctaacgagcgctcatttacggtaattcccgttcgtaatcagctttcgaggggctgatttggcttcgcggggaggtctatctcctcttcgaggggctgcccgatcgtgcaatgcgtgagtatgacacatcatttgcagcggtattatgcggttttcggagcccggctattcaggcaccaaccccttgaaacggagatagacctccccgcgaagccaaatcagccccttgaaatgaagataccgcctagcaacacttataggctgacgacgacgccctcccatggtgcaagctcacggccggcaagagcggccacagcgtgcgcggcgtcatacgtgctgatcaccacgttcgactcggtgattccggcggcggccagttcggcggtttcgcgcggtagatcaacggttcggccggacatgttgaccacgaccagcagcttctcatcgccgagggtgcgggtgaaggcgtagacatgcgcgtcatccgcatcgagcagatgccagtcgccggccgccacgacaggcatgtcgtggcgcagcgcgatgagctgcttgtagaaggcatacaccgaatccggatcgtcgaattcgccggccgcgttgatcgccgcatggttgggattgacggagatccatggctccttagcggcatccggcgcagtgaaaccggcatagacagagccgtcccattgcatcggggtacgcgaattatcacgaccgcgcgcggcgatacccgccaacatcgattcgggcgactgcactttggcttcctcaaccctttgacggtaagcgttcagggactcgaggtcacggtactggtctaggcgcgtgaagtgggcgtcggtcatgcctagctcttcgccctgatatatgtacggggtgccgcgatgcatgtgcagcatcaggccaagtgccttggccgaacgcacacgagattcctccgaggagtcatcaccccaacgagaaacgacgcgaggctggtcgtggttaccagtaaacaggcttgcccagcctgcattcttcacggccgcttgataaccggccataatgctcttgagcttcggcaggtcaagtggcagtggcttccatttgacgccttcgcagtcaaaatcaacgtgctcgaataggaagagcatgtccagctcgccgttggcggggtcggtgatgtattcgttgcgctgtgcggtaacgccgggagcctcgcccacggtgaggaagccctcacggccttcgaacacttcacggcgcatttcggccaggaattcgtcttggcgagggccgtccgcgcagaacggattcgggttggaatagccttcctcacccacgggcagatcgtccagctcggaaccgtactcgccgggcagcttgccagacaggtccgtgcgcttggaaatcagcgtaatcacatccatgcggaagccgtcaacgccgcggtcaagccaccagttcatcatgtcgtataccgcacggcgcacagccggattttcccagttgaggtccggctgcttcttcgagaactgatgcaggtagtattcgccacgctcagggcaatactcccatgcagaaccgccaaagtaggagccccactggttgggctcggcaccgggctcgccggcagtggtgccgggacgggcgggacgccaccaataccagtcggcgtgctcatcatccttgtttttggacgcttcaaaccaggcgtgttcatcggaagtgtgattgacaacaagatccatcacgatcttgagcccgcgcttgtgggcctcggccagcagctcatccatgtcgtcgagtgtgccgaacagaggatcaatgtcctgatagtcggaaatatcgtagccattgtcgtcttgcggagacttgtataccggggatagccacagcacatccacgccgaggtcggccagatagtcgagccgtgacgtaatgcccttgagatcgccgaggccgtcgccgttggtgtcttggaaggaacgcgggtaaatctggtaaacgaccgcattggaccaccacggatttggggtggcaccgttggtgcggatggaatctggaattactgtgcgttgtgaagtggtcatcgttggctcctccattatttatggtctacattgcctgttgctcatagtctaaaaagcgctgaattacatttccattggggaactgcgttggtgtgccggaaacaaaaaccgcaaagagccggaaggcactgctacggctcaattctcataagctgcacatgctatttagcaacatatgggccctttcgctgtttgtggtgggtgactgtgccgtggggtgatgttggtcgggtaggttggaggcatggatgcctctcacctgttcaccgccgcgcttcggctgcggtcgccttggagggtcgggtctgcggacttccgtgacgccgacggcgacgggcgggagccgcacatcacgatcggcttcgagcccggcagagggttcatgatcctgttcgaggcgtgggtgtggctatatcgcctgtgctcgtggatgatgcactcgaggctcgaacctatgaaggagctcgcccgcttgttccgccgccataatctacctgacctgcggcagctcacatattaacggttcttctgattgcgacgcgcaagagcaacttcgggcgcgcttggattgcctgcttgaacccactggtgcggggatagatgatttagttgacacgcctgcgggaatctggtggggatttcgctggcacaccggatttcaagcaaaccccgcctcgggaaccgctccggacttcggcgttggcccggttcgtatgtcaatcgattgccgtctgaaccgggacagaatccgctgtcccggttcgcgatttttgtccttttttacaaacagggacaagccaatctccgcagttcatatgctccgtaatacaaaatcggcggaatagagccgatcccggaatcaacatgttgtcccggttttcacataaaacgattgacattcataccgggacaatgaaaattgtcccggttcgtgaaaatcgcccgaaaccgcgaaccgggacagcggattctgtcccggttcgcgcgtcaaacggttgatatgtggaccgggacaagccagtggcacggcgacacagcagatgcgctcaattgcaccgtaagccgtacggtttcgtcactttttcattcgcacaacgagcaaaaccacatgacctttgtgcgccaccgccacatcaaccgaccgtcgcctttattgtggcggtttccagtatggcaacaggacagaaaagcctcctccggtgagagccggaggaggcttgggtggaagcggacctttacttcacagagtcctgcaattcaggactggcctacggccagacccaacatgacctcgcgagtacgcgacctatccggccgcccgggccgggaaacagcccacggggctgtttccttaatcggctcgtctcgctcgacgcggtgaagtaaagcagcgctgcgctgttttacttgaccgctcccctcatcacaccaccgacgacccacttttgggcgaagatgtagacgatgaggatcggggccatggccatcaggtagctggagaaggccatcgggtagttggtggcgaactgcgagctgaagacgtactgggcgagcgggatggtctggttcgactggtcggtcaggatgatcaacggcaggaggaagtcgttccaggcccacagtgcggtcaggatggcgatggtggcgttaatcgggctcatcagcgggaagatgatggtccagaaaatgcgccacgtggatgcgccatcgattcgggccgcctcttccagcgaaaccggaatcgaacggatgaagccagtggcgatgaacaggttcgtgcccaggccgagcaccgtgtacaggatgatcaggccgacctggttgtccaggtgcagggagcccatctgcttcgcaatcggcagcatgacgaccgggaacggcacgaacatggcggcgatgaagaagtagtacaggaagcggaagaagcgcttatccatgttgcgggccacagcgtaggccacgaaggtgttggtcagcaaggtgagcaccacggcggccaccgtgatgatcgcggagttgagcgcggccttcgggtagttgaccttggcggaggcgtcggcgaagttgtgccactgccacgaggtgggcagggcgaaggtgccggcttcggccggagtcttcagcgcggtgacgatggtgaagtagagcgggatcagaatggtcaggctcagcacggccacggcggcggtcagccaccagttgatcttgtggtccctgcggaacttggcgggcttgccggacttggacggggtaactgttgcagtagtcatttcttatcctcccctaaatcagatctgttcctggctgcgggagatgcgcagctgtacgaaggcgatgatcgccagcacgatgaagaagagcacggcgtttgcggtctggtaggcgtactcgccaccggtcaggccacccttccagatgaggtaggtgacggtttcggtggaggagttcggaccgccctcggtcaaggcgacgacctgatcgaaggtgccgagcgcgttcttcatggacagcacgaggttgatggtgaagaacggtccgatcagcgggaatgtgatcttccagaacttctgccaggcgttgacgccgtcgatggcggcggcctcgtagatttcgtcgtcgatggtctgcaggccggcgaggtagatgagtaccgagtaggcgatgccctgccagacggcgaggaagacgattgggatccagctgagttgctcattggtcaacagcgaggtggacagccacttgatgcccagcgccttgccgagctcgggcagcgggttcatgaagatgtacttgaacacgtagccgatgaccagcacggagagggtgtaggggatgaagaagacggctcggaagccattcttgaaggcgatcttcgagttcagcagcaccgacaggaacagggcgatcacattaatcagcaccgtgatgagaatggcgatgaggaacgtgaacaggtaggcgtggcccacgcggttgtcttggaagagggcgatgtagttcttcaggccgatgaacttgtaatcgccgtagccctgcgagttggtgaaggaatactttacgccgtcaagaaatggcaggtacaggaagaaggcgaaaatgatagccgccggaaccaccatccagtagtaggcggggtccaccttgcgggtggagaaggcggagaccttcttcttggccggtttcttggcagcggtcttggttgcggttgcgtgtgacatgatgttctcctctcctaccgatcactcgaaggtcctggcttggaccttgtcccattcggtctgcatctggttcaggaagcggtcggtgttgccggaggtcaccatggtctgcaggtagccgccgatgttgatggacgaaggaatgtagtggtcgcagaagtcggccagtcggttttcctcgaagaacgggcgcacggtttccagcgcatcgttgccgaagtaggtgtccttcagcggcgtgatggcggactgggcgtcggcgtaggcgtcaagctgatccttctgcatgaggaactcgacgagcttcatcgcttccttggggtgcttggtgttcgcaccgatggtgagcatcacgtcgtcgccggcggtgaggatctgctcgctggcgtcatcggtggccggcatctgggcgaaaccaagttcgatatcggggttgatcagcaggatctgcgggatggcgtaggtgccgagcgggatgatcgcggccttgccttgggcgaagttctgcgtgccctgctggtaggtgacgccggtgtccgcagtggagtaggtgaagagctcggattccttctcgactgcggtcttccacagttcctggaacgtggtcttgccttgcttgagctcggtgtacttcgattcgggaaccagcgtgccggccagggaggcgagcggtgcctgggtggtccaggcgtcggccacggaaccctgcagcgggttgatgccggcgtccttgaaggtgttgagcatatcggtgaactcgctccaggtggtcggcggattctccgggtcaaggccaaccttgcggaacagagccttgttgtagatgtagccggaggcgttacccgcgaagggcaggccatacaggcgcttcttggaggaatcggtggtctgcaccagattcttggcgatctgcaccatgccggggttgagggtgtccacaatgggttcatcggtgaagtcgtagaacacaccggaggcggcgaagttgccgaagctgatgtcgccgttgaaggtgatcacgtccggcacacgattcttgacgaaacgggtgcgcagatcggtctgggcgttggcggagttgttgatgttgaccttgatggtcgggttctgcttctcaaagtcggcgaccatggacttgaactggtcggcggcctcggacttgaactggaagaaatccagcgtgacggtgcctgcggtgctggagccgcagcctgccaggccgaacccgacggcgatcgcgcacatcacggcggcggtgcgcacggccagacgcttcagtctaggcgttgcatgtggggaatcggacagcataattgttgactcctttatctttcttttcctccggcttcggtgccggcggttcttccactttccaaggtaacggttcggccatttcattcccagcgccagcgagcccacttgcgcaagcaacaaaaagcgcggtattttgtgattaacgcaataaatacagcgaaggggcttgcatgtctgatgtcaacgcgattccacagtggttttccggatccgagcatacgcatcgcgtggcggcggcaattgcccaatacgggccgatagcccgcactacgttggcacagatgctgggactgagccaaggggccttgtcccgcatcaccagcgatctgatctacgccggggtgatcgaggagcttccggccgaggccggcccgtcaggcaagctgcccgagcgattcacgccaagggaaagttcggatcgtcgcggacgcccgcagacttcgctggtgttgtgttcgaacgcacgcaccttcattggtgtcaaggttcatgggatgtcgattgtggccgctgcggtgaacgcgcatggcgaggtggtgtccggccggcacgaggtgccgatcggggcggatcagtcggctgagtatgtggtgtcggccatcacgcggctggtgcgcgaatgttccgccgatatcgcctcttccggactgccctcccccactgcggtgggcgttgcggtaggtgggcatgtggtcgacgattcgattgtgacgttcgcgccgttcctgcattgggacggggccacggacttggggacgatggtcacagaggcgaccggcctgccgtgcggggtgttcaatgatatcgattctctgctggtggatgcctcctggttcgggccgggtgtcggcgtggatatgttcgccgtggtgaccatcggcgtgggtgttggttattcgctggccgtgaacggcaagccagtgcagtacccggataagagctatggtctggtgggccacgtgcttatcgatccggaggggccgcgctgcaccagcggacatatcggctgttcacaatgcttgactgacgattcgatcgccgaacagtactctgcgattgtgggtcgcgcggtcagttttgaggactttgcgcgcgatgccaagggacgcgtgccgcaggccacgcagttggtgaaccggacgtgtttccggttgggttcgctggtggctacggtggcgaacatcgcgatgcccggacatgtgatgattgccggggagtccgcgtttttggccaagctcggcaccgattcgctgcgcgatggcattcgtttctaccgtcacagccagacccagccggtcaagttcacgattatggaccacgactggcagctctgggccaaagccgccgccagtcgcgtaatcgtgaagcatattgggtaggccgttcttggctcccctcagagagggaagccaagaacgttgcttcgccacagttactccgccacgaccagccattacggacttgcctatcggcaaggctcaatcccaccttcgctcagctgtcgcttcgctcaggccgtggctactgacagcctactaggctgtcagcttaacgccacagccttgagcaatactgcctgctgggggtggagggacgggggacggatgccgtaacgctgcagggcttcgccggtcaggactacgccttcctcgttccaccagccgagagtgctctggccgttggccagaccggtcaaatccaagctcgggtcgagcgggctgacgcggtaggtgcgctcggggtcaagtccgggcaggtgcacgggcgcggccggataggtctggctggtggtcagctgggtgaagcggtagatggcggcgtcgcggttcggcatcaccatgccatccaagcgcacggccggatcgttggagtcggcgtgcacgcaggtgtcgatggcgaaccagtcgcggtgcttcttgaattcggccacccacacggccagcttggcgagcgcctcgtccggctccttcaacaggttccattcgatgcccatgtggccgaagaacgccatggccatgcgcagttcctggctggtggcacgctgggtggagtgcgcgggactggcacccacgtgctcgcccatcatcgccggcggcaccagcagcgaggtgtagcgctggatgtccgcgcgctcgaccgggtccacgcagtcggagacccagatacggtcagcgtgctctaggatgccgaggtccacgcggccaccgccggaggagcagctttcgatctcaaggcccggatgtgcggtcttgaggcccttgaagatgttgtagacggcgagggtctgcgcgtgcacggccgggcggccggagcggcgggaaccgggctcggtgacgaacttgttgtggtcccacttgatgtagtcgataccaagctcgccgacaagctggtccatgcagccgtagatgtagtcgaacgcatccggattggtcagatcgagcacctgctgagtgcggccctgcagcggcagtcggccggtggtgggcgaaagaatccaatcggggtggttgcgggccacgtcggaatcggggttgaccatttccggctcgaaccacaagccgaattccatacccttggcgtgcacgtagtcggcgagcgccttcagggacttcggaccatcgggccagacgtcctgcgcaatctgccagtcaccgaggccggaggtgtcgtcgcggcgggagccgaaccagccgtcgtccaccacgaatcgttccacgccggagtcggcggccttgtcggcgagcgccttcagcgtatcgaagttgtggtcgaagtacacggcttcccaggtgttgaggatcaccggacggccgtgcgagaacaggcgcgggtgcagggagcgcacgtaggagtggaagcgggcggcgatctcgttgagaccatcgccataggagccgaacagccacggggtgtcgtaggagttctggccttcgccagggccagcgagcgtcacttcgccgccgaacaggagttcgccgccgccgatcacgccggttgtgtagggcagacgttcggcggacagcacggagttgccgctccagcccacgtgcaccgaataggcgtcgccatgctcgaagctgaaaccgggcacgccggcggtcaggagcagggatgcgtcgaagtcagggcggccggcgagctgcggcttttcgaaacggccgacggtcagcggctggcgctgcggactgcgttcacgtagatggtgaccggtggtggtgaggatttcgccggcggattcgggcagcgggaagccgagctcgatcttgccgatctcgagcggggctccggcgtctgcaccgaacaggttggttacggtggccttctgacggaccaggccgccggggagcagttcgaggtgccattcgacttccacgccctgctcctcatcgcgcgcggtgactatgacgccgggcacgcggaccggaccggtggcgtgggcatggccggccacatcggtgtagctttcgccggacacggcatcgagggtggcttccagcacgccgccggcctcgatattggtcacagtgaacttggggaagagctcgacgccggcgcggcgcagcaccacgcgctgctcgccgatccagctttcggcctgggtgggcaggatagacggccaggcggtgtcgtcgagcgcgccggacacgcgctgcggcttcagggcgtcataggcggccagcagggtgtcgggcttggccagcgggcggccccagtggacgatgtgcggcaggtcgctgccggcaaacaccagaccgatcgccacattggcggcgggctgggtcaggtagacggcggtgagtgcggtgccgtcagcggcggcgccggtgaaagtggaggtgttctcggccatattgtctccttcgacgtgtgtggatttgcattgcactactggtttcgatggtagaagaaatggaatatgttgccttggtgccgcgtgttggttgcgtgaggtaagtaatgcgtccgtgtctatcgccgctgggcgaagaaatcagtcaggatggactgacactcgccttccagcacgccgccgtgcacttcaggactatggccgatatgcggatcgcgcggaatatcccaaatcgaaccgcatgcaccgagcttgggatcccaggcaccgaacgcgatggtgccgatatgggtctggatgcaggcacccgcgcacatcgggcacggctcaagtgtgacggccagcgtgcaatcggcgagattccaagcgcccaaggcttgggccgcctgacgcatggcgatgatttcggcgtgggcaagcgggtcgccatcagcctcacgcgtgttgtatccgcgcccgacaatctggccggccgcatccagcaccaccgcaccaaccggtacgtcaccagcggctgcggcctgaccggccagttccagtgcacagcgcatcgcctcgtcatattccataccaacgagtgtatgcctttttctcatatcgtctcatgatgtgcataatcggccgcaatcttaacgttttcttcatggttcccatatacttttggtggagaaaaaatacgagaaggcggcaacatggcggtatttgagctcatcctatgcatcattgcggcggtggtggtgagctcgtttgccagtcgcttcgtaccgaaggtttccacaccgctggtccagattgtgctgggcgtgctggttacgtatctgccgtttttcccggatgcaaagctcgacccggaactgttcatggtgctgtttatcgcgccgctgctgtatctggaagcgcacgaaatcgataagtcggcgttgctgaaaacgctggatctgagcctatcgctggctatcggactggctatcgtcacgatggcggcggtcggattcactttgcatgccgtctggccgtccatcaccttagcctcagccttagcactcggcgcggcactcggcccgaccgatgcggtggccgtcagctccctaggtaaagaagcctcgctgacgcagcgtcagcgcagcgtgctgaaaggcgaatcactcttcaatgacgcttccggcatcgtcggcttccagttcgctctggccgccgccttcactggcgaattcgccgtgggacaggccgccggcgaattcgtgatctccttctttggcggcaccttatttggcctggtgatagcagcagcggccaactggctattcgagaccgtgcgatccctcggttgggaaaccaccaccacacgtattctgatggaactgttcctgcccttcctgctgtatttgggcgcggaggaattcaatgtgtccggcattctgtcggtggtggccgctggcctgttcatccgattcgaccgtaccggcgtggggccgaatgtggcacgtacgaatatcgtttccacttcagtatggggcgtgctgagtttctcgctcaacggtgcggtgttcattcttctgggcatgcagcttccgcgcgccatgagggccagctggtctgacccgtatatcagcaataccgtgctgatcggcattattctgctggtcactctggtggtaatcgcgcttcgattcttctggattgcggccatgctgcgcgttgcgcgagatacaatcaccggccagcgccgcaaaatgacacccgaacgctggcgctcggccgcagtgatgacctttggcggccccaagggaaccatcacgctgtcattgatgtttaccatcccgtattacattgccggcggtgcgccgttcccgatgcgtgacgagctgattttcattgcgtcaggcgtgattatcgtgaccttgctgctggccaacttcctgttaccgctattggccccgaaccgtggcaaggatcccagcgcggaaatgattccggtgaccatcgatgtgttacgcgccacggtggaggaattgaccggacgcatcacgccagagaatcgccgtgcgattctgatggtaatcgaccaatacaccaagcgcatcggacgattgcagcagcgcatcggcgataccgatcctcagggattcgagcaattgcagatcgaagcgctgcattgggaaaaggaattcgtgcgcgaccgacttgccgacaccaaggcgcatccggcggcggatacggccacgcaagagctgaacgtcgaagcctgcgagcgcatgcttgaccagattatgaatacgctgcgtcacacttccactgatccgacttcggggcatgcggtatcgcagattcgcggtcgcttacgcatgttccagcggcagatgagcaattacgccaaacgcacggtgtccaagattcgccataccacaccattggtgagcgaggatcagattttcgcgcgcacccgcgaactgcaggtcgaggcgattcatcatgttatcggccggcttattgacgagatgggccaggatacgtacaacaccgagcattgttcggcgctgttgctggattatcgtcgcgctgaggcttcattgcaggcacgtccgaatatgagcggcactacggaaaccatcacgcaggtcgaggacgtaaagcgcgagagctacggtatcgaactcggtgtgattcaggacatgtacgaagccggcgacatcaaccgagcccaagcccgctccctgaggcgcaacatctacgttatgcaggtcgatgccgattccggcatctagtttccttggctcccttctctgaggggagccaagttggggattgctatttccgtatgattctcttcagtatgtgcagtagtgcttgcagtgctcacttcgctcatgggagaacagtctatgaccgcgccggccacaagcgccctcgatgtccgattgctgtgacggccacgccaattccagtgatggcggctgactacagcacgccagaggtaatgtcgttgtcgagcagccactggcgcaaatcggcgaactcctcaagactcacattgtgatccagaccgtggtagctcttggttttcagccacgtatgctcttccaaccaagcggcggtggcgaacagttcgtatttcgggattacgccatcgttcttgccgtacgtatagaacacggggatatcgtaatcggccaggcgagagtcggcgggggccgtgccgggcacctgaccgggtgtgttgaagccggacagggagacgacggcccggtaccgctcggggttgatgcgcaacaaatgcacggcgaccagtccaccttgcgaaaacccaagcggcaccacgtcacggtcggcgggaatgttgtcggccacccatcggtcgactgctgtggcggcggcatacgcgtcgtagtcacgatcatcgccgataggcagggcatcgtgaaaccacgcgtagttgccggggtcgggactgccttcacgggccggcgcgagtgtcagcggcccgcgcaatgccacgaagtcgttatatggagcgatgaggcgcatgatgtccgccatgtcttcttcgctggatccccatccatgcaggcacaggaacagcggatgcgtggcatgctggtcgaagccgccgcgcgaggtgacgctgtgttccacggtgagtggctcgccaaaacgtccgggcacagtggtggattcgcggccgatcagaggctggctggcattcgcttctttgctcataccaatccaatatagaggtcttgcgcgctgtgcggaaaacgatggaccatgatttcagtcacattgggtaatccgcgccgaatcgccttgggactttccaggggataccggcaatctgtcaggcattaccgctgtttgcggctgcggtgtctgtggctgcggtgattgtctcaagttcaccgccccactgctgctgcagtgcggtcatcttgctgccctcgccgaacaccatccagcgtttgccgttcagcaatcgccaatcgcctttcgtttgctcattatcagcgtattggctcagcagttcggaaatcttgctttcgataggtgcccggctgatggctgcggacgtttccgattcaaaggacacgaaggccactctcggatcagtgcacatctgtacggtggtgatgcctggcaaaccgcccgtatcaagcccctgccatccttctttgcacgcgccggcagcttgttctatgccttgctccatctgtgcggtatcttcgacgggtgccttgtcgttcgactgctgaatcagtccttccgggaacaatacgcccatggccacgccgataaccaagcaaactatggcgcacaccagtgcgatgatgccgcccgcgcccactcccccgtgagtggcgtaccgaggcatggtgactcgcgcagcgatgaccagaatcagggtgatgctgataagcaccgccgccgtcaacgcaatgtatcgtcctggcactgccgtcataaaggaaatggcgtaaggcgcgatttcatgaaccgccgaggtggccgataccacgacggctagcagtccgctgacaacggcaagtctgcggcacaacatcgacgttgggctgctggcttttgtagcggcgaatcgccggccggcattccgcctggatgggcgtcgattctgtgcacgacgtgagctgcgcgaatcgtcatactgaccatcgccgaagaaatcgtagtcctcatcgttgcgggccatcggtgcccccttcctgccgattacacagccagtgtaccgctatggcttgggaatggcggtcattcgggggaatgattcagggcaaaaaagaaccccggcggttgcccgccggggagagaaaggagagagaagaagaaagggggttcaattgtcgggaactgctgcggctcctgatcagctttccgctgacatcatttatataaccactgctttctgggtctacctctaagtttctctgagaaaaacctgagaatacttgcgattgatggaccgcggaagcgtgaggagcctctcacgtttccgcccaaggcgctagacttgaaggcagtatttatttgcccaaggagtttttcacatgctgctgtccgatcgcgatattctcgccgcacagtccgcaggtcatatctcacttgatccgtggacccccgaaatggtgcagcccgcttccatcgacgtgcgattggatcggtacttccgtttgttcaataaccacgcctacacctatgtcgatccggcggaaaaccagggcgcgctcaccgaacagttcgaggtggatcccgacgaaccgtggattttgcaccccggcgagttcgcactgggttccacgtgggaatacgtcaagttggacccgtccattgccgcccgtctggaaggcaagagctcactgggtcgattgggtattctgacccattcgactgcgggcttcattgaccccggtttcgaggggcatattacgcttgagttgtctaatgtgtcgacgctgccggtcaaactatggcctggcatgaaaatcggccagatgtgcttcttccagctgagctcgcccgctgagcacccttatggctccaagggcaccggctcgcattatcagggccagcggggtccgacgccgagccgttcctacgagaatttctaccgcgcgcacatcgacgactgagcgttgcgacgtaccattcggccggcggatgccggccatttgcttaatcccaaggagatgtcatgaccaacagcgatggtgggttccagttcgacttccagcagcacgaaaagccggtcaagccaacggttcctccgattcccgggcaagagacggcagcatatggcgcgcagccagcgacacaagccacaccggctctgcagttcccgcaatctgtgcaggcagcacagccgacgcagcccatcgatccggccatgacgcaaccgttctcaccgcaattcccagctgcggttgccgcacaagcaccacagccggcggcagccacgcagccagtagtatccgaaacaccaatcgccgctgcgcccggccagcagcaatacgtttgggatcagacgacgcaaagcttccgcccggtggaaccgacagcgccggtgacgccagccgcaccagcggcaccggcgacatcgcctgtttcggcagcttcaaacgccgcgacacaagcgttccagcccagtcaggccgagcagcctgcggtagatgccgaagcaacacaagcattccggcctgatcaggtcatggcaacacagcttttcgaagctcaggccatgccgaatgccgaaaccgcggccacacaggcatacggcgcatcatccaccgtatccggtgagaccgttgccatgccggcaacgcaagtagcgtctgccgatgatgctgcagccacacaggtgttccaaccggccgccctggctgcttcggcacaggctcagcctgctgtgatgcctccctccattccgttgaatcaggtctccgatgaggacgattccgatggcgccgagcctcgtcacggcggtagcggcaaaaagaacacccgcaaaatcgtcggcattgccgtagcagtagtcgccgtgatagcgctggttgtcgccggcctgctctggtggcattccaacagcagcaaggcgagccaagccgtggcactggccgagtgcaaggtagcggccaagcagtacacgaatgcgcagaagaagctcaccaccgccatatccaatggccaaaccagcgcgcaaacatccaccagtgatgtggccgatgccaatacgctcaccacgctgaatcaggcgttgcaagacgccgacaatccgaccgacaccgccaagtgcgattccagcctcaacgccactgagctgaagtctcacactaaagagctgcagaatgatgccagcgacatggctgacaagacggatgccatcaacaatgcgatcaaggccgttaatacttcaaaggcgacggccgataccgacacactgaaatcgaacctgagctcggctatttcgcaggcgcagggcacactgaataattccgcgggcagtgtggccgatgagaacacccgcaccgcgctgcaaaacgccatcaccgaagccaatacggtgatgaacgggaccagtccgtccgaatccgacgtcaacaatgcgatttctagactgcagaaggccgagtccgacgtcaccgcctcgatacaggccaagcagcaggcagatgccgccaagcaagctcaggaagaggctcggcagaaggccgaccaagaggcacagcagaaggccaagcagcaggcacagcagaagtctcaagacgggtccacctctactgacgaccccgacggcagccacaactgaggtctgcagcgttctcccgtttcccatggggcggtaacttccccatggggcggttagcgcattttcctttttcgcggaataacgccgttttcagcgaccgccccatgggataatcaccgccccatgggataatcaccgccccatgaggagccgtttggatatagcagtgggccgggccctgaataccagagcccggcccactgctatatgcccacaatcagggctattgcgatggcttaacgcttggctatcgcgcgtagcacaatcttgcgtagctcggaggcaatcagcacgattgcggccaggcagatgcattccacccaagccatcgggctcaatgccacggtgccgaacggaccgttaaggaacggcacgtaaatcaccacgagctgcagcgccacggacaaaccaatcgcgccccatagccacttgttggagaacagacccacgaatgcggactgcagatgcgaacgggaggccagcgcgttgaacagctgggcaaacaccagaatcgtgaagcccatcgtacgggcctcggtcatctgcgcttcatggccgatggcatccaccgagcggtcggtgaacaagccgccggataggtgcatgtccataccaatcagcgtgacgatggccataatgacgccgacgaagatgatgtcgccccacatggaggcgtcaatcacgcggtccgtcaccttacgcggtttacgacccatcacatcgtcggtctgcgggtccacgcccatagccaacgccggcgcggcatcggtcagcaggttgatccacagcaactgtgtggcgagcagcggcacggtgacgcccacggtttccggctggcggatgccgaggaagccagcaaacaccacaccgaggaacacggtgaacacctcacccacattggaactcagcaggtagcgcaggaacttgcggatgttgtcgaagatcacgcgaccctcgcgtacggcggccacaatggtggagaagttgtcgtccgccagaatcatcttggcgctctgcttggtcacttcggtgccggtgatgcccatggccacgccgatgtccgcggacttgactgccggggcgtcgttcacaccgtcgccggtcatggccacgatgttgccttgacgctgcaaggattcgacgatcttgagcttgtgctcgggggccacgcgcgcgtacacggacacttcggacgtggccttgtcgagtgcggcctcatcgggcagctggtcgagctggtcgccggtcagggccttgccgtccttggcgatgatgccaaggtcggaggcgatgcgggcggcggtcagcgggtggtcgccggtgatcatcaccgtgcggatgccggcacgatgggcctcggtcacggagtcgcgcacctcagtacgcggcggatcgataatgccgaccatgccattccagatgagatcggtttcgatggcttcggcctgatcggcgatgtcggacacctggcctgcggcgttgacgcttacaccgggcacatcagccaaagaactggtttccagcggacggcaggcctcgccaagcgtacggtaggcctcggaggagagacgttcgacggtggcgagaatcgactggcgatcgccttcggtgagcttacggacctgaccacccacgcggatgcgcgtgcagtagctcaacagcacgtcgggcgcgcccttggcgaacacggtgagattgtcggcatcggcgctgtccttggcgatgatggacatgcgcttgcgttcggaggtgaacggaatctcgcccacgcgcgtgtatcgcgtgatcttgcgatcggccttgactttgcgggcggccacgataagcgagacttcggtggggtcgcccacgatctcccagcggccgttctcctcgcgtagttcgccgtcgttcgcgagcgtgccggccacaagcgtggcgacgacttcatcggccacaatctgggcctgctcggattcaggactgacgccaccggtcataaccatgcggccttccggcgcgtaaccggtgccggtgatctgcactgcgccggacggggtgaccacgcgctccacggtcatctcgttgcgggtcagcgtaccggtcttatccgagcagatcacggaagcggagcccaaggtctccaccgaatgcagtttcttgacgatggcgttgtgcgcggccatacgctgcacaccaagcgccagcaccacggtcaggatggcggccaagccttccggcacggcggccacagccagcgagacggccaacagcaaggaatcaatcacgtcatggacgtcgtcgaagccttccagtacggcgagcgccaccagcaccacgacagcgatgacgcacaccgcaatgccgaggatcttggagacgtaatccatctccttttgcagcggggttttctcatcttcggtggcggagagcatgtcggcgatcttgccgacctgcgtgttcataccggtgccggtcacgattgcgcggccggtgccttgcgtcacggaagtgccgttgaagatcatgttggcacggtcgcccagcgccttggcttcggtgagtgtgtccggcttcttaccgaccggcacggattcgccggtcagggaagcctcggcgatgcgcaggctggccgcgttgaccagtcggccatcggcggagactgagtcgccttccgcaaggacgatgatgtcgccggggaccacgtcggcggtgttgatgcgcatgactttgccgccgcgcagcaccgaggtctgcggggccgtcatttgggcgagcgcctcgaccgcggcctccgccttggcctcctgcatgtagccgagcacggcattgacgatcagaatcaaaatgatcacgatggcgtcgaacggcagcacttcaccgccttccgcgccgggctgcgcattggccttttcgatgaaccatgcgatcaccgagatgatggtggccgcgatcagcaggtagaccagcgggtcctggaactgggccaggaatttcttccatttcggtacgggcggggcggtggcgagctcattcgggccgaatttggccagtcgacgcttggcttcttcctcgctcaggccctgggatgggtcgacattcagggctttggccacgtcgtcggcactggtcagacttggatcagcttcccccaatagcgcttcctgcgcgcgcacttcttccgattccacgacctcgttcgttgcggtcgcggacactgcggattgatctttgagatcatccataatgttctccttggtattgccgcggagtagtcagccttgcggccgctgccgggttttctctcccggctggacgcacaggactgcgcggttatggacaccggcgcaactgctgccgatgcatacgattgctattattccataactgcgtggcgcacttggcgcacagcgtaatagcgttttgcctagaacaggcgacgcaaccaggcttcagccaaatcaggccaacactgcacgcattcgacgatgtgcgcatagaagccgttgccagcggtttccgcattggccagggacaggccgtggctgccttcggggaacaggtgtgcttcgatgctcacgccggcggcccggcaggcctggatgagcattagcgtattctccacgggctcggcttcgcggtcggaggtcatggcgtagccgccaccaggcaaaatcaggatggccgggcgtatgcggtccggttccatctcctcgctgttgtcggccacatagccaaagaatcgcgcctcgttatataacttaagaatcgtgagaatcaaagcaattcataacctaggaatagtgagttttacggcattatataacttaggaatcgtgatataatagctcataaatccttgaaaatactaggaatatgagcttaacatgtataagagaaaaatatacgaccatctacggcgatggaaagcagcgagcaagggtactactgcgttaatgattgaaggagcccgccgcgtcggcaaaagcaccgtcgccgaggaattcgcgaagaacgaataccgctcatacatccttatcgactggcagaaggctccgcaggcggtacgagactcgttccgcaacaatctggatcatttggacacgctgttcatggacctttccgtctattacggcgtacgcctgcatgagcgtgacaccctctttattttcgacgaagtacagctcttcccctttgcccgcagcgcggttaaacaactcgttgcggatggtcgatatgacttcatggagactggctccctgatctccattaagaagaatgtcgaaaacatcttgattccctccgaggaagaatcggtgagcatgtttcccatggattttgaggaatttctatgggccagaggagaagaactactcgccgatgcgatacggcaatcttttgcggacaggcgagcaatgtctccgctgctggacaacaaggcggaacgcctgttccgtgaatacatgctggtgggaggtatgccgcaggccgtagagcgttatctgggaacatccgatatgggcaatgtcgatcgagtgaaacgccaaattttgcacctgtacgctcaggacataaagaaatacggcggagattcgaaagaacaggtcaaacgtatcttcgatgaaattccagggcaactttccaagcatgaaaagaagttcacactgtcgtctttaggcgaaaacgcacgcgaacgtgaatatggcaatgctttcttctggttggatgaatcgttcctgatcaaccgctgcatgaatgccacggatccgcatgtgggcctgcgcctacaccaagaggactccacgatgaaatgctatatgggagacaccggcttgttagtaacgcaagtgtttgccgaccgcgcatacacgtcgaatgagttgtaccgcgatatcctgttcggcaagctggaagtgaatgaaggcatgctggtggagaatgtcgttgcgcagcagctccgggcctcaggccatcgcctgttcttctattcccgatattcccgtcaggcgaaggaccgcatggaaattgattttctccttatcggggagtattcaaatgccgccatgaaggccagggtctgccccgtggaggtcaaatcgacaaagagatacaaaacctcatcgctcgataagttcaagaataaattcgacagccgggtcggcatgcaatatgtgctgcatcctagaccaatgcgcgttgaaggagaccgcctatatctgccgttgtatatggcgcattgcttgtgatgattctagaacgtatcgcagagaatgattctcaataagaaaagcgtgaggattacgatgcctcaatcgcacatgcagagcgtcatatcagtgagatcccgccgttgcggaccatgtttgattgtgcggaaaagttcggatgcctcacacttttcttgacgggaattatttactgtgaggcattgcgcaggttggcggccatggcgcggtcgcgcaagcctttggtgagcttgagaccgagggttacggcgatcaggactatcgtgcaggcgatccacagcgttcgaccgccgaagttgctgatggtccagccaccaatcagcggcgccagcgcaatcgataccgaccacactacgttgtagacgccctggtacgtgccgcgtgccgacgcgggtgccatggcggcaaccgtagtggtggcgatagggaatgtgcccagctcacccagcgtccacagcactacggcaagcgcgaatccgccccaggaatgggccgcggcctgcaccgcatagccgatgacggttacggcgaggcccatcaccagcacgcgtgaattgcccatgcgcgagaacagtttcatcgcgggaatctgcagcaggcacaacataccgccattgatggtgagcagcaccgaatactcgcccagccctagaccaaggtccgtcatggcaatgggcaggccggaggtgctttggaagtacacaaggaagtagccgaacatcagcagggagaagccgaggaatggcgtatcagtgagcacgcgccgccaattgcgagacatggagcccttggcactggcagccggtgcggcatccgagtgattcggcccctcgacgccggcgaattccgcatgcgtaacactgcgttcgtcttcatggcgcaccgcacttggcaccgatacagtaatccccaaatgccgcacctcgcggaagaacgcaatcagcaatatcgtgacggctatcatcaccgccgcttcaacgtagaacatcattgaatacgagatcttgaccagctggttggccacaatcggcccaatcgcgtacccaaaattaatcgcccacgattgcagtacgtacgcacgttgctgacgttcggcgggcaccacatccgcgatatacgcggcgatgaccgggctgggcagtgaggcgaacgcaccatagacaaacagggccgcgcctaaagccacggggtcagtgagcacggaaacgaccagcagggcagccgctgcgccgatttcgccgatgataatcatggattggcggccgaatctgtcggacaaggtaccgccgaacaggcagccgatgattgcgccgaagccgtacatggccacgactgtgcccaccacaccctcatcgaggcgcagcgcggaaaccaaatatatcgacaagaatgaggtcacgaagcgacccatccacagaatcagaatcgccaaccataatccccaatacagcagggacagtccgaatatcatgcgctgcttcttcactctcaataccttaccggctaccgacggcggaatagccgcgttttggcgc

SEQ ID NO: 110 - DNA, 5661 bp, Unknown
  R206_24m  MAG No. k141_23130
tacctgatcagcaaccagtactacaaccctgcggtcttcaaccagtactccgctgaattcctcgaccgcatctacgagcacgtggaatccgccggctttgagttcggcactttccttggtgcgttcaagttctacacgtcctacgcgctcaagacgttcgatggtcgcctctatcttgaggacttcccgcagcgttgcgccgctgtggccctggagctcgccgccggcaatgagcagcaggccatcgaatacgccgacgaaatgcttgccggccgcttccagcccgccaccccgaccttcctgaacctcggcaaggcccagcgtggcgaaccggtcagctgcttcctggtgcgcatcgaagacaacatggagtcgatttcgcgcggcatcaacgcggccctccagctctccaagcgcggcggtggcgtggccctgctgctgagcaacctgcgcgagctcggcgccccgatcaagcacatcgagaaccagtccagcggcgtgattccggtcatgaagctgctggaggactccttctcctatgccaaccagctcggcgcacgtcagggcgcgggcgcggtgtacctcaacgcccaccaccctgatatcctgcgcttcctggataccaagcgagagaacgcggacgagaagatccgcatcaagtcgctggctcttggcgtggtgattccggacatcacgttcgaactggccaaacagaaggcccagatggccctgttcagcccgtacgacgtggagcgcgtgtacggcaagccgttcgccgacatctccgttaccgagcattatgacgagatggtggccgacgaccgcatcaagaagacctacatcgacgcccgtaagttcttcaccaccatcgccgaactgcagttcgaatccggctacccgtacatcgtgttcgaggacacggtcaaccgcgcgaacccgatcgaaggtcgcgtgaccatgtccaacctgtgctcggaaatcctgcaggttcaggagccgagcgcatacaacgaggacctcacgtatgcgcatgtcggccgcgacatctcctgcaatctgggttcgctcaacatcgccaaggcgatggatggcggcttgggccacacggtggagacggcgatccgcgcactcacctcggtggccgagcacaccagcatcaacgcggtgccttcgattcgccgcgccaatgaggagggccacgccatcggtctcggccagatgaacctgcacggcttcctggcccgcgaaggcatccagtacggttctgaagagggcctcgacttcaccgacatgtacttcatgaccgtggcctaccacgcctaccgtgcctcgcacgcgctcgccgtggagcatggccgcacgttcgccagcttcgctacgagcgactacgccaagccggccggccagggcaactacttcgacaagtacaccgatggtcgtcgttcgctcactccgcgcaccgaacgggtccgtgcgctgttcgaacagtacggcatcgcgatcccgactgcggccgactgggaggccctgcgcgacgcgattctgaaggacggcatctacaaccagaacctgcaggccgtgccgcccaccggctcgatctcgtacatcaaccattccacgagctcgattcacccgatcgcctccaagatcgagattcgcaaggaaggcaagatcgggcgcgtgtactacccggccgcctacatgaccaacgacaaccgcgggtactacaaggacgcctacgagatcggctggaaggccatcgtcgacacgtacgccgaggccacccagcacgtggatcagggactgtcgctgacgctgttcttcccggacaccgccaccacccgcgacctcaataaggcccagatctacgcctggcgcaagggcatcaaaaccctctactacatccgcatccgccagcaagccctggaaggcactgaagtccaaggctgcgtctcctgcatgctctgatcgttcgagggagcgtataccgcctttcttcggcactcgacgtaccttcgtacgccttcggcctcagacggcggtctccgcacgcattgaacaaccagagagccgttgttactcccctcactcggctaacgccgacagctcccctcagagaggggagctggccgcgaagcggactgaggggggctccaccatctaaggaaccaacaatgtcacgaaccatctatagagcactgctccggctgaccgcgccggaggagttcgaaaacaagtccaacgacgataacgataacgacaacgacaacgagtaataaggaacactcatggcaccgatttccattccgcgcaaaccgctgaaactcatcgaccgcgtctccgcaatcaactggaaccgcctcgaagacgagaaagaccttgaggtctgggaccgcctgaccggcaacttctggctgcccgaaaaagttcccgtctccaacgacatccccagctggcagaagatgaccgaggacgagcacacgctcaccatgcgcgtcttcaccggcctgaccctgcttgacactatccagggcacggtcggtgccgtgagcctgattccggacgcgctcaccccgcacgaggaggccgtgtacaccaacatcgccttcatggaatccgtgcacgccaaaagctactcgtccatcttctccaccctgtgctccaccgaacagatcgatgccgcattcgactggagcgagaacaacgagtttctgcagaagaaggcggaaatcgtgctcgactactacgagggcgacaacccgtacaagcgcaaggtggcctccaccctgctcgaatccttcctcttctactccggcttctatctgccgatgtacttctccgcgcacgccaagctgacgaacaccgccgacgtgattcgtctgatcatccgcgatgaggccgtccacggctactacatcggctacaagtaccagaagggcatcgcccagctgagcgatgccgagcgtctggatctgcaggactacacgtacgacctgctcaacgagctgtacgacaacgaagtggagtacacccagtcgctgtacgaccgcgtgggcctgaccgatgacgtcgagaagttcctgcggtacaacggtaacaaggcgctgatgaacctcggctacccggctttgttcccggctgagatttgcgatgtgaaccccgcgatcctggccgccctgagcccgaacgccgacgaaaaccacgacttcttctccggctccggctcctcctacgtgatgggcaaagccgaagaaaccgatgacgacgactgggatttctaagggtttcgcggtccgcgaacccgtagcgccgccgcgttcgcacgacggcgctacgctggaggcatggaacaggagccgttggtcagcatcatcatcccggtatataaggtcgagaaattccttgatgaatgcgtgaagtctgtggttgcgcagacctatcgcaacctcgagattctgctggtcgacgacggctcgcccgacaattgcccggccatgtgcgacgcctgggccgcccgcgacccgcgcatacgcgtgattcacaagcccaacggcggcctgtccgacgcccgcaacaccggcatcgccggggccaccggtgcgtacatatacttcgccgattccgacgacaccgtggcccccacgttggtggaggactgcctgaatgccatgcgtgaatacgatgccgatctggtgatgttccagttcgacaccatctccgagaacaacaagccgctgctgtccaactatcgccacaacgacttcaccgaggtgcagatcctgaccccggtcgaggccatcaaaaagcaggtcaaggctgagatcgacggctatttctgggccttcctggcacccgcctccacctatcagggcaccggattctccttcccggtggggcgcaaaatcgaggatctctcccgtatctgcaacgtgatcggcgaggccacgcgcgtggtccgtctgcccaaggcgctgtaccactaccgcatgcgcgagggatcgattaccgccaactgggatccgcagctcacccgcgactggacccgcgccgccgacgaccgcgaggaatacatcgtccaccgattccccgagctcaagggcttcatgacgctgcaacagctgaatttctttgccaacctcgattacgagaccatgcgccagtcgctgatcgccgggctcaagatcgatcccgaggacgccgacgcgcttcgtcgtcgcatcgagggcctgacccagtccgccgatgagggcgatgagcccgtaccggaaacgttgcgtgagttgctcggactgctcaagctgggcatcaccaaggtggccgatggcacgttcggtaaggccgatggcagcggtactgatgacgatgccgagaacgatgacgtaacgctggccgaccgtttccgcgacatgcgtgaggactggcgccagctgcgcatccagcgcatcgaaaacgccgaggagcgcaaggccgagcgcaaagccgcccgcaacggcgtcaccttcgagtctgtgttgcattagtcggcgactgatggaatccgtcagttcgggaagagcaggcctgctctacgccgggcgtgccggttcgcacgttcgagaaacaggcgtgtcatgggccgaaccacacaacacccccagaaacgcccataaagttaactacattttcagacacgccacttgccttggtccacggtccgtgtatagtagttctcggctcaacgaagagaaccttcactgaaccggaaaaaagtaaacgctgaagcttgcagtttccgaaagcaaagttgtacgtcggtggcgagggcggaagcgcagtaaagaacaaatccctttacaacggatcgtgaggcacgtacctgcctctgaaaggattagtaattatggcagaagtcgttttcgaccacgtcactcgtatctacccgggcaacgataagccctccgtggatgatctgaatcttgatatcaaggatggcgagttcctcgtcctcgttggcccttctggctgtggtaagtctacgacccttcgtatgctcgccggcctggaggaggtcaacaagggccgcatcctcattggtggcaaggatgtcaccacgatgcagccgaaggaccgcgacatcgcaatggtgttccagaactacgccctgtacccgcacatgaccgtggccgacaacatgggcttcgctctgaagatcgccggcactccgaaggaagagatccgcaagcgcgtcgagaaggccgctgagatcctcgacctgaccgagtacctcgatcgtaagccgaaggctctgtccggtggtcagcgtcagcgtgtggccatgggtcgtgcaatcgtccgtgagccgaaggtcttcctcatggatgagccgctgtccaacctcgacgccaagctccgtgtccagacccgtacccagatcgctgccctgcagcgccagctgggtgtcaccaccctgtacgtgacccacgatcagaccgaggccctgacgatgggcgatcgcatcgccgtcatcaagctcggtatcctgcagcaggtcggtgctccgaccgagctgtatgatcgtccggccaacgtcttcgtcgccggcttcatcggctccccgtcgatgaacctgaacacccacccggtggtcaacggcaaggcgaagatcggtgaggacaccgtgga

SEQ ID NO: 111 - DNA, 31851 bp, Unknown
  R206_24m  MAG No. k141_24808
cccggtgccctgaacgaaagagagggaggtagacatgggagcgattgattccggtaacaccgcatggatcctgacatccgcgtccttggttttcctcatgacgcctggtgtggcgttcttctacggcggtatggttcgtgccaaggccgttctgaacatgctgatgcttgaggcggccgcgctgtcggtcaccatgattatttggactttgtggggttggtccatcgcatacgccggttccgacatcggcggtattttcggcgacccggccagcggcttcctgctcaaggattccatggtcgcgcaggacggcgtgttcaccgccaccggtctgaacggcaacaactacccggtttccgtggacgttgccttccaggtcgctttcgcgatgattaccgtcggcctgatctgcggcgccatcgccgagcgtgtgaagtacagcacctggatgatcttcgtggcgctgtgggttaccttcgactacgctcctatggcccacatggtctggaacggtggtctgctgtctgctgacggcgccatctccaaggccatcggcgcggccgcccacgatttcgcaggtggtaccgtggtgcacatcaacgccgcagtcgccgccctgattatcgtgctcatcatcggcaagcgtaagggcttcggcactcagccgttccgtccgcacaacgtgccgttcgtgatgctcggcgccttcctgctgtggttcggctggttcggcttcaacgctggttccgccttcgccgccaacggtactgctggttacgcttgggtttccacctccgccgccaccgcagccgcaatgctctcttggggcttcaccgagaagattcgctccggtcactacaccgccatgggtgccgcctcgggtatggtcgccggcctggttgccatcaccccggccgccgatgtggtctccccgctgtgggccatcgtgatgggtgccatcgctggtgtcctgacctgcctggcctgcggtctcaagttcaagttcggctacgatgactccctcgacgtcgtcggcgtgcatggcgttggtggtttcaccggcaccatcctcatcggcttcttcggtgaaggcaccggtctgctggctggtggcgactggaagcagctcgtcgttcagctggtcatcgctctcgtcgccatcctctactccgcagtgatcaccgcgatcatcgccttcgctctggagaagaccatcggttggcgcgtcaccgaagctcaggaagtcggcggcatcgatcttgccgaccagggcgaacgtgcttacgattttgctggtactgccagctccgttctcaaggaggtgaagtgaaatgaagctgatcaccgctatcattcagccccataagctcgacgatgtcaaggaggccctcgcggccgccggcgtgcacggtctgaccgtgtccgaggccaacggctacggccgccagcgcggccacaccgaggtctaccgtggcgctgaatacactgtggacctgattccgaagattcgcgttgaagtgctgtccgatgacgcggatgccgaaacgctggttggtgtgatcatcaagtccgccggcaccggcaccatcggtgacggcaaggtgtgggtcgctccgctggactccgtggcccgcgtgcgtaccggtgagaccggttccgccgcgatctgataacacagacgtccatgcttagaaggggatggactgcataggaaaggtccccgcacgccgcgaattgacgccgtgcggggactttttttagcaatgaaagatgaagcaatgacttcagcagtagatggcttgaaacaacgattcatggatatgagccagccggatgacgacggcgtttaccggaatggtgcgaccaagcgcaaagcccgcacagaactggccatgcaatgcctcactgagctgtggaatgcggcctgcaaggatgtctctttccccgtgcccgactccggcatcggcttcgccgcggtaggctcgctggcacgtggccaactgggccccagctccgacctcgacctggtcatcatctacgagcctcgcacgttgaacgaccagcagctcaacgagttggccaacaaactctggtacccgctatgggacagcggtctggacctcgaccactccatccgcacgcgcgcccaatgcgaggaagtcaccgaccatgaccttcccgccgccatgggctggctggacgtgaagcccatcgccggcgacaccgctctgatcaccaccaccgccacgtccatcctcgaacgctggcgcaaggccgcccgcaagcgcctgcccgaactgctcgactccgccaaagcccgactcgacgaattcggccggctccaatacgtcaatcagcccgatatcaaggaggcccgtgggggtttgcgcgattcggtgctcgtctccgcgctcgccgcctcatggctggccgaccgcccgcacggcatttacgacgaagctgtggaacgtctgctcgacgtacgcgactgcatccatctggtggccggcaaggataccaacctgatgctgacgccctatcaggccaaagtggctgccatgcttggccttgccgatccgacttggcccgaaaacgagcgtgccgcctactcgatcgacgatctgcagacactgcttgcccgtatcggtcggcgcatctccttctcgcttgattccaccgcttcccgcgccgaacattcgctgacccacgaaaagccgcgattcgcgttcttccagatgttctctcagcgctctggtggcaagcgcgaagccccgcaattcgacgtggtggctcccggcgtggccaagcacgaaggcgaattggtgttggcgcccggtgccgagcctgccaaggatgccaagctggcgttgcgtatggccgtggcggccggcgaattcggtcttcccatcaacccgtctaccttggttaatctgaagcgctgcccgattcacgacaaccagtgggatgacgaatcgcgcgagctgtttattcgtctgcttgcgtgcggatcgaatcttatggaagtgtgggagagcatcgatttcgtggacattccgggtcgatggatgccggaatggctcggcgtccgcaaccgtccgtccgcctcggccgcccaccggtacaccatcgatcggcatatggtggaggtcacgtcgcgtctggggcgcgagacaccgtccggtggacggtacgatgacgatcatttcgaggcattgctgttggccggtatcacccacgacatcggcaagcgcgcgttcgtggccgatcacgccgccgagggtgcccgccatgtgccggtgattctcaagcgtatgggctacgcgccggacatcgtcgactgggctaccgtgctggtgcgtgagcatttgacgctatccgaatttgccacgggtaaggacccctatgatccggccgtggcggaggagttggccgaccgcttgcaccacgacaagatgctgctggatatgctgttcgacctgacccgggccgacggctcctcgctcggtgccaccgccggtgagaccatcaccaagcaatacggctggtccaagtggcgcgaacaaatcgtccgcggcatgtattccgccgcccgcgccgctatgtaaacggaatcgcccagcgcttcgcgcggccgatacctacctcatccatgcgtccgagcgcacgcgcagcccgttggacagaccgcgcccacccatgagcaccacgttgaacgcggcccagagtacggcggtacgcatcaggtcgctcgtcagcgccggcgtcaccatattggccagtatgagtatgagcgtcacatacaccacggcggtcagcgtgcatgtgacggccagatagcggtagtcgcgcgcgccgataagaatgccgtcgattgccatcatccagccttgcagtgggaagaagatgcccatcgtcaccatgcccacggcgatcagcgtctgaatatgtggcgtaggggagaagaagtgcccggcgaacaggccgactaccgcaaaagccgtgccgattaccgcgccggtgaccagtcccgcacgcccggtcgcccgcgtcagccgccgcgcctgctgcacgctgccagcgcccagcgctgtggccaccagcgtctggccggcgatgcccacggaatccagcatgttcatcgcaaaattccaagaggagttcacggcctgaaacccggccaacacggcagtacccatgcgcgcggcacaggcgaccgtagtcaccatggccgcacgaatcgccaatgtgcgaatgaacaatggcagtccgtcgcccccggctgccgcaataccggccaaacgaggccgcagactcgcaccatccgcccgggaccacagaatggcggggattaccaggaacagccccatgaaccactgagctaccagcgtcgccactccggagccggcaatgccccaattcagcacaataacgaacaacacatcaagcaccgtgttcaccaccgcgccgcccaccgcagcgatcagcgtgatacgaaccttctgcaatcctcggaaaatgccgttcgccgcatataccatcagcatgcctggcgcacccagcacgattgcgcgcgtataggtcacggcttgttccaatacttcgccctgaccgcccagtgcccggcataatggctcggcagccgcgaacaatcccaatcccagtacggtgccgatgctcaaggccagccacaggccatcaatgcctgcctgcagtccctcgcgacgacgacccgctcccagcagatgtgccacctgcgcagtggtcgagtaggccaggaatatgcatagtccgactgccgtgaggatgatggtggagccgattgacaggccggccaacgccgcatccccgatatggccgacgatggctgtgtcgataaggatgaaggtcggttcggcgatgagctggccgaaggtcggcagggccagcgccatgatccggcggttggtggagcgggcgtcggtcgggccgttgctgacgtttgtgtttgcgccggcatgcggggtgccgaagccatcgcggcgtgtagtatcgccggaactggtggctttggcgtcggaagagtctatgggcacgctcacacgcatatcacgcctgactgcgttgcgcaagcacctgttgtgggcgcggaatgttatccccagactatccaccaagttatccccagtatgtggataacttagtggattatccccagaattatccccaaaatgtggataactattttttctatccacatttgacgcttcagcgtgtcgccgcgctgaccgcaaggtgaaccaacgatgaaattggtgcgcgatgattcggcacgacttgcactttcatgcgttcattaggtcgattgtgcattcattaggtcggtggactttgagagatattgatcgagcgcctcagaatgccgccattccaagcgcatggtttgtggtgttaccaagcacagtgacctaatgagtgaggaatcgacctaatgaacgtagtcgtgcgatatcttccgctcgccacgccacctcctatacttgaaggctatggcagaaggaagtgaacactcgtatcagaatgggttcggcagtggctcggatcgtggcgaccgtggcgaccgcgcgggccggggcggcgcgcagacgtcggcggcggtcggcgacccgattttcgaccgagtgcccccgcacgatgacgacgcggaaatggccgtgctcggcggcatgctgatgagtaaggatgccatcggcgaagtttcgcagaccattgacgtcaccgatttctaccagcccaagcatcagacgatctataacgcgatcatcgatctgttttccgccagtcagccggtggacgtggtgctcgtggccaaccagctgttggcggatggcaacctcgacaaggtcggcggcgcggactatctgcacagcctcgtcgcatccgtaccgaccgccgccaatgccatgtactacgcggagatcgtccatcagcgggccattttgcgcaatgtgatcgccgccggcaccaaaatcgcccagctcggttattccgccgagggatcgcaggctgaggatgtggttaacctcgcccagtccgagatctacgagatgtcgatgggcaaggtgcgtcaggactatgccgccatcggcccggtggtccacgacgcgctcgaccagctggacaaactgcagcagggtctcgtcaacaagggcgtgccgaccggattccgcgacatcgacgacgtgacccagggcctgcagcccggacagatggtcgtcgtcgcaggacgtccggccatgggtaagtccacgctcggcatcgacttcgcccgcgccgccgcgttgcaccacaacatgacttccgtggtcttcagcttggagatgagcaaggtggagctcgctcagcgtattatctccgccgaaaccaatattccgatggccgccctgcgccgcgccgacgacatcacccccgaacgctggaacaccctgaaccagttctggaccaagatgcagaacgcgccactgttcattgacgacagcccgaacatgagcctcatggagatccgtgcgaaatgccgtcgtctgaagcagaccaacgatctgaaactcgtagtcatcgactacctgcagctgatgacctcgggcaaggccgtggaatcccgccagcaagaggtgtccgaattctcccgtgccctgaagctcttggccaaggaactcgaagtgccggtcgtggccctttcccagctgaaccgtggcccggaaatgcgtaacgacaagaagccgcagctctccgacctgcgtgaatccggctcaatcgaacaggacgccgacgtggtgttcctggtccaccgccctgacttctacgacaaggaagaccgccctggcgaggccgatatcatcatggccaagcaccgtaacggcccgaccgaaaccttccacctcgccttcctcggtgccacgtccaaattcaaagacatgccgcaggactacaacgccaatcagggggtgtgatgatggcaagcaacgtttcacgcgatgtttcgcaagaccaatcgtccgtggtgcagacctgcaaaccgtggtatgcgttcgccaccgtggccgcaggccgcttcgtgcggtttgcatcccgcgtcaccaaacatggcggttcggctttgcccggcaaagtcgtagaaaagattgaccccggcttcctgacccgtacgctcgggcagttgccgcttggcgtggtattggtgtccggcacgaacggtaagaccaccaccacccgcatggtcgcctcgatgctctccgatctggggctgaaggtgttcaccaatccgaccggctcgaacttcgtgcgcggcgtggtctccgcactgcttaccgaagtcacgctcggcggcaaattggacgcggacatcgccgtgctcgagctcgatgaggcgtacgccgtccacttcgtcaagcaggtcaagccccgttatgcattgctgctgaacgtgatgcgcgatcagcttgaccgattcggtgaaatcgacaccacggccaaactgctcagccatgtggctgcggcgactaccggcactgtggtactgaaccgcgaggacccgcgtatcgccgcgctcgccgcgaaggccccggctggcaccaccgtgcgatacttcggcctcgccgacgatttgcgccgctatttcccgtccgatgacgacatggccacgaccgtgtcggtggaaggtgtggccgggccgctcccctcagccagaactcccctcagtccgcgaagcgaactgagaggagcttccgcaggcacggcagaacttcccgccgacgtgacgcttaccgcagtgggcgaccacaaggccaccttccagatggacggtcagggctacgccaccgacgtcaagcttgaaggcgtctacaacctgtacaacgcggccgccgcgctcgccgtggtacgtgcggtgatgcaagacaatgccgccgcatccaaggccaccgccgcagccaacgcctgcgccgtgtccgccgacgagctcatcgccgccgtttcccgcgtcacgccggctttcggccgtggcgaggtcatcgacgtcaacggttccccggtcgaactgctgctggtcaagaacccgatgggcttccgcctctcgctcgccagcttcgacccggccaacgcggacaccatgatcgccatcaacgacgaatatgccgacggccgcgacatgagctggctgtgggacgtggacttcacttccctgcgcgcgtccggtgtcgccatggtctccggcgtgcgtgcctgggacatggcattgcgcctggggtatgaccaagtgccagtcgccgatacgaacaccgacctcgaacaggccgtcaccgcattcgtcaacgccaatcccggcacacgcaagcacatctactgcacctacaccgccatgctcaaaacccgcgccgtactgggccgcatcaccgaagtacgggacgcgggcgtgggcaagtaactatcctctagcgcccgcgcgccacctcccgcctgcgggaggacatggtgaggaataagacgcttcccgtcagcgggaagacatcgacaaggagaacgtgacatggccagaacaattgatgtggtgtccctgtatcccaaagacatgaacatctacggcgattccggcaacgtgctgactatccgccgccgtctggaactgtacggttatgaaccggtcgtccaccagtacaatcaaggcgacgactggcccgaccaggtggaccttattctgggaggcggcggccaagacaccggccagaagaaaatcatcgacgacttctaccattgcgccgacctgttgcgttcgcttgccgcagacggtacgccgatgctgatgatctgcggcctgtaccagctgttcggcgagtactttgaaaccgtggacggcacccgtctggacggcatcggcgttatcggtgcttataccgtgggccagaacgtgcgtatgatcggcaatcttgttgagcattccgaccagttcggcgatgtgattggctacgagaaccactccggccagaccttcctgcgcgaaggcgttcagccactcggcaccgtcaatcaggacggccgaggcaacaatggcgaagaccataccgagggcgcgcgcgtgcacaacgtgatcggcacctacatgcacggctcgttgctgcctaaaaaccccgccatcagcgatttccttatcgaaactgccgtgactcgtcgttacggtacgttcgatacgtccgatcagacccccgaacaagccaaggagctcgcccggctcgatcaagtagccaccaacgcgcgcaaggctgccgccgaacgtcctcggtgaattctcggtgagtcctcggtaagtaccaatcagcgaaaaatcagtcgaaatcagtctgagggtctagtacattgccctgttgtttgcgctaggcttggtggtacgagacatggcaccaggccatgtcggacctcgaaggaggggtatcatggctgattttgatcttctgggtgatggcctgcgcaaggtcctgctggcgggcatcggagcccttgccaccggatacgagaagagcagcgagctcgtcgacgaactcgtcaagaagggtgagattacggtcgagcagggcaaggcgctgaacaccgagctcaagcgcaaggtgagcgagacggtggatgacgccaagaaggccgccgccgaagccggcgacaaagctgctgccgcagccgacaccagtgccgccgacaagcccgctgacgagggcaaggccgagtgaccaagcccacacgcgctacgccggaatcagggtcgaccccgctttccagcagggtcgaccctattctgacgcctgcgaaagccgaacgtgaggcggcggcgaaccggtccgtcgacacgtcggacacgctcaagcagaccgttaccaaggcgactccgagcgtatccgacgaaacgctggcactgttcggacgcaggaacgatttcgccacgcgctaccatctgacgcgccgtggcaagatcaaacgactggggcagatcaccagaatcgtcgagcaattcgacgtgctgcacggcctgactccggtcaaaatgcgcctcatgttcgaggcgctcggccccacgttcgtcaaagtgggccagattctgtcgatgcgctccgagattctgccgcaaagcttctgcgacgaactcgccaaactgcgcgccgacgccgacccgatgccgtattccacggtgttggatgtgcttgccgccgaatacgggcgtcccgccgacgaggtgttcgcgcatatcgatcccaagccgttgggctctgcttcactggcgcaagtgcatcgcgccacgctgaaaaccggcgaagatgtggccattaaagtgcagcgcccgggtgtgcgcgaaaccatggcccaggacgtctccatcatgcgctccatagccaaggctgccactaaggtgattcgcacctcacagatcgtggacctgaagggcgtggtcgaggagctgtgggacaccttcgaatcggagactgactttctgatcgaggcccgcaatctcgccgaattcaagcgcttctccgtccgattcaaatacatggactgaccgacggtgtacgccgaactatgcaccgagcatgtggtggtcatggagtacatcgacggcatctccgtctcccacccgggccagctcatcgacgccggttatgacttgaaggagatcggcaccaagctcgtcgacaattacgccacacagattctcgacgacggcttcttccacgccgacccacatcccggcaatatcctcatccggggcggccagattgtacttatcgacctcggtatgaccggtcggctcgaccagcgcacccgtacagtcctcaaagaaatgattttcgccgtcgccaaacaggattcgcccgctctggccgaggggctgctgcgattcgccggcaccgaggccgatccggaggactatcccgcgctgttggccgatttggacgtgatcgtcaaggaattcggcaccgtggatttggccgaactggacatcgccgccttcctgaccgcgctgacgcagatggccggccgccacaacattgaggtgcccagtacggtgaccaccatcggccgcgcgttggttacgctcgaaggcttgctggacgagttcattcctgatgtgaatatgatcgaaatcatttccgaccatatcgccacgtcgaaatcgctgaagaacgccaccaaagacgagatcaagtcgctgggcgttgagggacatcaggctttgcatgccacgctcggcaccatgaccgaactcaagaccgtggcccgtatgctgacccgtggtcagttgcgcgtcaacatggaactggtcggctccgaagagccgttccagctgctttcggatatggtgaatcgtctgacgatggccctgattgtggtcggtttgttcgttggctcgtcgattgtctactacgccggcatgaagccgattatcttcggcattccggtcatcggcttcatgggctacgtcgtggccttcgccctcggcgtatggatcgtcatcgacatctacttaaaggggcgcaaaaccaagaagcggtagggtatcgattgatatcagtccagcgggagggtggattcgcgctggataaggtggcagggtacgtagtcgacaccgtgatgcgggttgccgtcgatggcatcgaccaagtatcgtgccgcacgccgtccgatggtttcggtttcgttgtcgatcgacgtcagtgcgggcctcgagctggaggtcagtaccgaccagttatcgtggccgatgacggcgacgtcatccgggatgcgcagtccctgctgcttgagcacgtcaatgcagccgcgggccaactgatcgttctggcagaccactgcatcgaacttgaccccttggtcgagcagcaggcgggtggcggcgcggccccagccttcgtcccatttgccgtaccggattggcccggccggttcgatgcctagctcagccagtgcctcgagcgcgcccttggtgcggtcggtggcagcggtataggtttcgtcgccgccgataatggcgatgtgccggcggccacacgagatgagatggttgatggccatgcgaccggcgtccacgttgtcgcaagtgaccgagcagtctttggggtcggtggaggggccgtagacgtagaccagtggcacgccccagtcatggccaagcgtgggcctggggttggtctcgcactgcacgatgagcagtccgtcgaccttgagggacagcagtttctcgacatgctgacgttccaaggcggcgtcgccacgagcgttggccaacaatactgaggtcgattgggctcgcaactcgttctccgcgccgataagaatcggtgtggagaaacgaccctgcagatcggaggtgaccaggccgatggtgccggtggtgccgcgggctagggattgggcgagtttgttgggagagtagttgagttgcttggcggcatccagtacacgctgcttggtttcttcgctgatacggggtttgttgtgcagtgccttggatgcagtggccgtcgagactccggccaatgccgccacatcctcaagtcgcgctgcccgtccggttgctggctgggtcatcatgcctcgattccttggttcttcagcagtatatagcgcattgttttgcgatgaaatacctcatacggtgtggcgcgccattgcatctgggaataattgtagcttcaatgcgaaaactttcgcaaacatctttttttcggcgtggcgtagtcagggaaattgttcaagtgcaaggtaagtgaaagaaagcgttacttccatgttcgcttttgtttgatttgctcgacacgccggaataatcattgatattaagccaattcaagcacgttattcatagtcgaatcacagtctcgaacccgtttgatgtgagaaaaaacgcgaaaatgcgaaagcgcttttgcaaaaacttccatgttcgtttatattgagaaaaggctttcgcagtgttacctgctccgggcaaaggagcgagcagggcgaaaccaaggaggcggaccgtccgccaccgcctctcatagttgagcggatatatagagaaagaagcgaacatggtgtctttcaataaactgacccgtactcttgctggcatcgctgccgccgcgttgatcgttccgctggccgcctgtggtggctccggcaatggtggcactgccaccgccgaaggtatcccggccaagggcaccgacgatggtaccgagatcaccctgtggacccgttcccctctggagcgtcaggccaagaacgtggtcgaggcttacaacaagagccacaagaaccaggtcaagctcgagatcatcccgaacgacgatatggaaggcaaggtcggcggcgcttcgcagaccgactccctgcctgacatcctcgccggcgacgtggtccgtattccgtactgggcttccgagggcatcttcaccgacatcaccaagcaaatcgatggcctggacaacaaggccgacctgcagcagggccacatcgaagccggtactgttgatggcgccgagtacaccctgccgttcatcactgacgtttccgtgatggtctggaacaagaacctgtacaaggaagccggtctggacccggagcagggtccgaagagcatcgaccagttcgtcgagcaggccaagaaggtcgccgccctcaacaaggatggcgtcgcaggctcctacctcgccggtcagtccggtggtgctctggtcttcgacctcttcccgtccgtgtgggctgacggcgaatccgtcatgaacaaggatggctccgaggccaccctggacaacgactccatgaagggcgtcttggacgcttacaaggagctggccaacaccaccaacggcctgggtgcaggctccaaggaagagaccggcgccacctggaccgctccgttcgcgaacggcaagatcggcgttatgccttacccgaacacctccaccactgctctgttcgatgctgagaaggacggcggcttcgaggtcggcgttgctccgatcccgggcaccaaggaaggcaagacctccacgttcctcggcggcgatgccatgggtatctccaaggactccaagcacgttgctcaggcctggaacttcctctactggctgatgcagtctgacgctcagaaggaagtcttcgctgaccaaggcgacaccgcctccaacatccagaccctgaagaccgcttacaaagacgctgacccacgcatccagaccatcaactccgtgattatcgacggcaacggccagaccccgaagtccccggccttcaacgaagccttcaacgccgctggctccccgtggcagctgctcgtgcagaacgccgtgtggggttccggtgacctcaaggccgacaacaaggccgtcaccgacgtcctgtctgcccagtgattcggtggtgatgctcctcaccatcactcatcaaatcacagcaataactgaataataactgaacagattgagccggtccctcccttgtgagggcaggagccggctcaaccacataatcgaacttctatcttcttcttcattccttctcttccttcatcactacataccttatgaatgcggtgtgttggcggggcttcggagtcctccttcctcgaagccctgacatcggattgcattcggattccgtgattaccatttcacagtaatttcccaaaggagagagaaacatgtcgagtgtttccaagagcgccggggctgtgcccgtgcataagtccaaggcgaaggcggcgcagaccaggcgaggtctgctgtacgcacttccggactggctgatgattatcgtcctgttcttcgtgccgattgttctactggtcgtcatggcctgctctcgttggagcctgctgggtggcaaccgcggcgtgaacttcccggacaacttcgtcaaggtgttcgagaacaaattgttctggccctcgatttggttcacgctcgagtacaccgtgatcgtcacggtcttcctgttggtccttggcctgggcatggccatgattgtgcaggagagctcgaagtggaacaacgtgctgcgtacctgcttcctgctgccgtccgcgacgggcctggcgtccgcgtccctgctgttctacgccctgtattccccgcaggtgggccctgtcaccaagattctgagctcgttgggcctgatgcaggagggtggttcggtgctggccaccggccagtcggccctgtgggccacgattatcgtgattgtttggcgtttctcgggctactacatgctgctgatgatgatcggtctgcaggccatccccggtgatctgtacgaggcggcccgcatggacggcgccggttcctggcgtatcttccgctcgatcaccctgccgttgatgaagccgaccatcgtgatgtgcctggtctactgcgtgaccggctcgatcctcgcgttcgatcagttcttcattctgaccaagggtggtccgaacaactccaccatgaccgtggtgcagctcatctacaacttcgccttcgattccaagaaggatctgggtatggctgcggcgctctcgctgatcgtgctggtggccctggtcatcatcaactccatccagatgcgcggcatgcgcgacaacaccaagtgagaaaggggaggtaacacattatgactaccccattgtggaagcgtatcatcgcccggatcctcgaggccctgctggccatcatcttcatcagcccgctggtctgggtcatcatctgctcgttcagcccgcaggccggttcggcccagtccaagggctggggcgtggccaactacctgaccctgttcggttatcaggaaggtctgcccaagtacctgttcaactcggtaatcgtgactctggtcgcggtcgtgttctccgtggtcgtctgtacgctggccggctactcgttctcccgcttcgactacccgggccgcaacctcggcttcatggtcaccctgtcgatcctgatggtaccgtacgcctcgctgctgatcccgctgatggtctggtacaagcagatcggcctgaacgacagcctgctgggcgtgggcctggtcatcaccctgttccagctgcctatgagcacgttcatcatgcgtaacgcatttgacgcgatccccaaggacatggaggaggccgccatggtcgacggctgcaacagcctccaggccttgttcaagatcctggtgccggtggtcaagccttcgatggttacggttggcctgctcgccttcctcgaggcatggaacaacttcatgattccgctgtacttgagctcttcgtccaagtccacgctgccgctggcgatggtgaacatgcgtcagcagaccatgggcgtcatcgattacggtgccaccgaggccggcgtcgtgatcctgctgattccctgcgccatcctgttcctcgcactccagaagtactacgtcaagggctttatggccggagctgtcaagggctgacggctcgtgccgccggcccttggctgggagcccggtgggctcccagcaagctccgtgctgagacgcgacagcgtcgaagccaatactgagcccggctgaaaccggtccttaattgcagggccggaggcggtgtggtcaagggccttaaaaaaaggacaatcatgaacgttacaatcacttccccgttctggaagcggcgtcgcgaccagatcgtcgaatccgtcatcccctaccagtggggcgtgatgaacgacgagatcgacaccacggtgcccgacgacccagccggcaaccagctggctgacaacaagagccatgcggttgccaacctgaaggttgccgccggcgaattggacgacgagttccatggcatggtcttccaagactccgacgtctacaagtggcttgaggaagccgcctacgcattggcataccacccggatcccgagctcaaggcgctgtgcgaccgcacggtcgatctcatcgcccgcgcccagcagtcggacggctatttggacaccccgtaccagatcaagtccggcgtatgggccgaccgcccgcgcttcagcctgattcagcagagccacgagatgtacgtgatgggtcactacatcgaggccgccgtcgcctaccatcaggtgaccggcaacgagcaggcccttgaagtcgccaaaaagatggctgactgcctggatgccaacttcggccccgaagaaggcaagatccacggcgccgatggtcatcctgagatcgagctcgccctcgccaagctgtatgaagagaccggtgagaagcgttatctgacgctttcccagtatctcatcgacgtgcgcggtcaggatccgcagttctacgccaagcagctcaaggcgatgaacggcgacaacatcttccatgatctcggcttctacaagcccacctacttccaggctgccgagcccgtacgcgaccagcagaccgcggacggccacgccgtgcgcgtcggttacctgtgcaccggtgtggctcacgtgggccgactactcggcgatcaggggctgatcgacactgccaagcgtttctggaagaacatcgtcacccgtcgcatgtatgtcaccggtgcgatcggctccacccatgtgggcgaatcgttcacctacgattacgacctgccgaacgacacgatgtacggcgagacctgcgcttccgtggccatgagcatgttcgcccagcagatgctcgacctcgagcccaagggcgaatacgccgatgtgctggagaaggaactgttcaatggctccatcgccggcatctcgcttgacggcaagcagtactactacgtcaacgcactggagactactcccgacggactggacaacccggatcgtcaccacgtgctctcccaccgtgtcgactggttcggctgcgcatgctgcccggccaacatcgcccggctcatcgcttcagtggaccgttacatctacaccgagcgcgacggcggcaagaccgtgctgagccaccagttcatcgccaacaaggccgattttgcttccggccttacggtcgaacagcgttcggacttcccgtgggacagtcacgtggaatacacggtgagcctgcccgccagcgctgcggacagctcggtccgatttggactgcgcatccccggctggtccttgggctcctacacgctgaccgtgaacggcaagcccgcagtgggttcgctggaagacggcttcatataccttgtggtcaacgccggcgatacgttggagattgcgctcgagctcgacatgtccgtcaagttcgtgcgcgccaactcccgcgtgcgctccgacgccggccaggtggccgttatgcgcggtccgctggtctactgcgccgaacagaccgataaccccggtgatctgtggaactatcgtctggccgatggcgtcaccggtgcggatgccgctgtggctttccaggccgacttgctgggtggcgtcgataccgttgatttgccggcagtgcgcgagcacgccgacgaggatgacgcgccgctgtacgtggatgccgacgaaccgcgtgcgggcgaacccgcgacgctgcgcttggtgccgtactactcgtgggccaaccgcgagataggcgagatgcgtgtcttccagcgtcgataaatatcggcgatatgccggcctgcgcgcaactggccggcaaaaaaatacttatgccgccatcgtctgcaataagtcgatgacggcataggccggatgtcagtatcgattggagccgaaaacacatccggggaatgaggtctcctgtgcggggtaatacccgtgcaggagatttttaattatatgctcccgctgtgagagctgtcggcggagtcgactgagggtggtcataatcggtaccgtgtaagccaccctcagtcttgctttgcgagccagctcccgccagcgggagcctgttggttcctgattcagcgaggctgaatcgttgcgccgtaggtactgcgacacggcgaaacacagcaatgccctaatgcgaaaataaatgcgaaagctgagaaattaccgggtttttgttgtataagatggttgatatcactgagggaaagttgtgaaaccgtattcgctcggttatgatgtggaatcagcttcggtgaattgctccaaccgggatatccatggcggatatcacaccagatttactgaagacactcattccggtgaacccaataaccaataaaggaaactgatggagaacgggctctgcggcccagcatccacagaagaagtcctggtcgcatagacgcgacgtagcctgagcgaagacgcgaaagaccggggcggagaggtccaagcaggaatgcatcaatcaacacgaaagcggtggcttgcgtcaatcggcgcggttgcagcggtcgccacactggccaccggcggtgcagtcaccgcgcaggcagccgatgcgcccgtcatcaagaatgcggatgtggcatatccgtcgttcaaggggtctgatgatccgatgaagacggcggcgaacaacaccacatataaccctgccgccagctatctgcaggagacattcgataacgacgtgaagaacctggccggcaccgacaccgaccatgacttctggatcgataagattctcacccgtactggtgcacagccaactggtaaaggcacgaacgacaagggtgcttactcgtatgaaggctccgacggcaacaactacctgttcacccgtggtcgcgccgcctacatgtacacgcacacgcctaatcggctcggttttgtgggtaacaccgcctactgggatgagaccaacagggatggctttaccgttaccgtaaacgctgacggtgcaaaccagacccttaacgaagacgcctcccagcgcaagcagacgccgagctacttcacctccctgttccagaccggtggcaagagcctcaagatcaaggaagttaagtacatcacctacaacaacgtgatggttgcgaacctcaccgtggaaagcacgcaggaccgcgatgtcacactgaccacggcctcgccgttcgccgccgagggtgctgatggggccaccgaacttactggccgcgtgaacgtcaagaacaacctgacgaccatctatccgcgcttctccgccaacaaccaggacggttccaactggatcgtcagcggtggcaaactcaccagcacgttgagcctcaaggccaacgaaccgcagaccgtcaagattcagctcggcctgatcgccaacgaactgcctgactccaccaaggaatatgaggcccgttacaccggcgaccttaaggatgctgccgcctcctacaaggattccgtgaccacctacaacaagtggtgggtcgataacgctccctacgtggacactccggaagacaacatcgataagaccgtggtctaccgctggtggctgagccgtttcaacatgctcgacgccaacatgcctggcaacaccttccagtacccgacctccatcgagggtgtgctcggctacaacaaccagatcgtgctcacctccggcatgttcatgatggacaccaagtggttccgcaaccccgagtactcctacggcacctggctttccgccggcgataccgccaagaagagcaaggcgggctattactactaccacgacaatccgggcgacccggccaactggaaccatagctacacgcagtacatcacgcgcgccggctgggactcctacaaggtgcacggcggtccgtccaccgtggccgagaagctggccgaccagggtgccgaggacgtgcaaggtctactcgcttccaagagcgagccggacaacaacgacaaccagaacaacaatgacaacagcttgattgactggtcctggtggtcgatgaccggtaacgatgccgacgccgtttccttctctgagccgggtcgctccggccagcgcatggatcgcgccgatggttccgccaatatgtgggccaacgctaacgcggctgctcaggcatacaaggctgctggcgataccgccaacgccgagaagatgcgggccatcgccgacaagatccagaaagaagtcaccactgaactgtgggacaagtccgacaacctgctcaagcacaggtggctgaacgacggtgctttcgccaagtacaaggagatcaataactactacccgtactccgaaggcctgatgcctaccggcaacgaagattacaacaaggctctgcgcctgttcgaggattccaacgagttcccgatcttcccgttcttcaccgccaaccaggcggacaaggccgcgttgaacttccccggttccaacaacttctccatcattaatgcgcagccgctgctgcaggtctactcggccggtattcgcaactacgatgcagccaagaatggctacatcaccaatgagcagttcaagaagctgctgtactgggtggcgttcgcgcactaccagggcggcgataacaaccaccctgatcagaacgagttctggaacgaggacaacaacaacgtcggcgatgtgaacggtgacggcgtgatcaacaacctcgacaagaaccttgacgccgcacagaacggcggcaagatcacctaccgctcctggatccaccacacccagctcggcaccacgaactggacgatggtcgaggacgtagccggtatggtgccgcgcgaggacaacaagattgagctaaacccgatcgaaatccccggttggaactacttcacggtaaacaacctgcgctaccacgatcaggatgtctccatcgtatgggacaaggacggcagccactacggtggtcctgctggctacagcctgtacgtgggcggcaagctcgccttcacctccgacaagctggcgcacctcatctatgacccggctgcgggaacggtcgaggtcaaggacgattccggtgcccaggttaccgtcggcgccgaagccgtcaagaacgtgaaggccgccaatcaggttaccttcaatgccgatcagcgcgtgaccgacctgttcgccaagtccggcaccaacgtcgactccgcctccaagtccaccacgaacgtggccaaggacgcggacgtgaccggtaccacctacgccgagaaggacaccaactacccggccaagaacgcggtggacggcaagaccgtgatggaatcgttctggggtaccaagggctccgggaacaagaccgacacgctcaatatcaagttcaaggacggcaagcagaagatcgacgacatccgcttgtacttctaccagagctcgtccagccagaccatctccggctatgccgagcccgccaactacaagttggagtaccagaaggatgacggcacatgggccccgattgcggatcaggtgcgcaccccgaactacgcgggcgcgaactacaaccgtatccagttcactccggtggagaccacgaccatccgcgtcaccttcacgccgcaggccggcatggccgtcggtgtcaaggagatcgaagcctacaacaccggtatcaaggctgacggcacttctgagaaccagactccgcaggtggatgcttacgtgtcttccagcacctcatccggtgccaagctcgtcggtacggtgaaggatgacggtctgcccgcagaaggcgacgtcaccaccacatggtcccaggtctccggtccggaaggcggtgctgcgaagttcgtggacgcctccgctgccagcaccaccgtcaccttcaacaaggagggtgactacgtcctgaagctcaccgcttccgatggcgagaaggaaggctccaaggaaatcaccgttcacggcatcccctctgacggtaccgtgaacgtagccccgcagtcgagcgcctctgccagctacaccaacggctaccagccgaaggacaacgccaagaaggtcatcgacggtcaggtggtatacgccaacacgccgaacgagacctggaacaactggggcgacaacaccggtgtggagccgtggctgcaactgaagtggaccggcaaggtgccgctgaagaaggccaaggtcttcttctggaccgatggcggtggcgtgccgatggtctcatcttggaagcttcagtacgctgacgctgacggtaactggcaggatgtgaaactggctgacggccagtcctacacggtcaaccggaacgaaggcaacgaagtgaagttcgccgacaccgtcgaaaccaacaagctgcgcgtggtcttcccgaagggcgccatcgtgggtgcttccgagttcgaggcgtacgccatcgagccggtgagcgtggacgaagtcaaccgactggtgcagaccggttccaaggccgatgatctgaagctgccctccaccgtgagcgccgtatacaccgacggttctcgccgtgacctcgccgtcacgtggggtaaggtgaccgacgctcagctggccgccgatgccgtattcgatgtcaagggcaccgtcgccggtgcgctgaacggtacggttgcacacatcgcggctcgttccgataccgcatcgcagaccgtgggtaatgcgcagccggttgagcagaccgtctaccagaacgccaagtccatcgacctgcccgccacggttccggtgaagttcccgaacggatacaacgacgaccgcaaggtcacgtggaaggatgtcgacatcaaggccatcgacctgaccaaggttggtgactacgaggtggctggtaccgtcgacgacggttcatcttccgcagctgccaagctcactgtccacgtggttgccgacccgaacggttcctccactccggagcctgagcctgagccgttggtcggttggattgaaggcaaggcgaccaggaccaccatttcgcctgattccgaggcgacctggtcaccggccgaaggcaagctcaacgacggcgtagtcgtcgatgatacttggccgaccacggatgatcagaacgtcaacgacaaggtctggggttcttggggcaaggcaaaggacggcatgtacgcccagtacgacttcggtcagtccgtgaccattgaccagagccgcgcccagttctgggccaacttcgctgagactgacgattcgaagggtggtctggaagtcccggacgcttggaagattcagtacctcgccgaggatggttcttggaaggacgtcgagcccaccgaggattacaccgtcgtgcgtaattcgccggcttctcgtgcggataccgatgccaagggttggagcgctgtgaccttcaagccggtcaccaccaagtcgctgcgactcgtgctcactccgtacaccggcagcagcaccttcggggccgccgtggccgagtggggcgtgcatggtattgacggcaccgagcctgaacctaccccggtcgacaagaccgcgctcaagtcggctcttgacacagccaacggcctcgatgcacgccgctacaccgccgcttcatgggctgagttccagcaaatcattgacgctgcccaggctgtgtacgacgatgtcaatgccaccgaagaacaggtcgccgagcaggtgaccaagctcgaggacggccagaaggtgctcgttgcgctcgccaccgacgtggagaagtccacgttgcaggcggccatcgacacggccaaggccgaggccgcttccggccagtacacggataagagtgtcgaggccttgaacaaggccatcgaggctgcggaaggtgtgctcaagggcgatgagtccggtgaggtcactcaggccgccgtccaggaagcgtccgcttcgctgaacaaggccgtcaaggccttggaagagaagcccgccgtcgaaacggtgaagaaggagtctctcaaggcttccatcgagcaggccaagaaggctgacaagtcgaagtacaccgagaaggcatggcaggctctgcagagccagattgccgccgctcagaaggtgtacgacgacaaggacgccaagcaggccgacgtcgatgccgcacaggatgctctcgacaaggcattttgggccaccaaggttgagcagaagcccggctcccagcagcctggtgtgaccgacactgataaggatgataaggacaacaagggtgatcgtgtgcctccgactggtgccgcggtttccgtagttgctgcggctgccgtgctgctcaccgccgcaggcgtgaccatcctgaagcgtcgccagtccggcgaccacggttcggctcgccactcggcctgacccgcaacggagtcattctgccgagtgagccccctcacagagggggctctagccttttccttctacccatcattactcttttcactcactcaatgaggagcactatgagtttccatgtatccgcgcaatcggttcgcgcggtggccggtggactcgtcgccgcagcgacattgctgtcaggccttgcccttgcgccgaccgcaatggccgccgattcagccaccgctgacaacgcgcccagcgttgccggtcacgcgtataacgaactgccgtataacaatcctgatgtcaccgtcacccaaatcgacaatagcgcactgcccagctacatgcgcaaccccatcgggcagaacgagggtattgacaccccgaacgatctttcgcagaactactactctgcagatgcatccgcgctgagctatgacggcaaactcttcgtcttcaccggtcacgatgaggcttcgcccgactacggctccttcaacatgaaggactggggcgtatacgtcaccgatgaagacggcctgaatcaaggcaaatggacacattacaagaccatcgccaaggcagacctgttcagctgggccaccggcgatggcgcgtacgccggccaagtcgtagccgacgataacggcaccccgagcgacacttccgatgattggttctactactacgtgccggtgaaggacaaggcttctgaggcggctggacaggacccgttcgccatcggcgtggccaagtcgaagagtccgctcggcccgtggaaggatgccatcggcaagccgctgctcaccacatcgcaaacccagattgaaaccatcgatccggcattctttgtggacgaggatggcaccggatatttgcactttggtacgttcggcactcagctcgccatcaagatgaagaaggacgccacaaccggccgcacctcatacaccgaggtggaaaccaaggctgatggcaccacgccgaacctccacaccatgaaggacgcggacagcaacgcgaacggcccgaagggattcttcgaggcggcgtgggtgttccgtaagggcgatacctattacaacgtgtacgacggcggtaagcccggttcgggcacggccacctgcgtggaatcgaactatcaagcttgcatccagtactccacttccgacagcccgctcggcccatggaagtaccaaggcgtaatcgtgccttctggctcggccaccacgatgcacccctcggtgctccagttcggcgacaaatggtatgtgacctatcacaccggcgacaaggaaggcggcaccgatttccgccgtgccgtgtgcattgatgaagtcgattggaccgccgacggccagatggtttccaccgcccatccaaccaaggccgagaaaacgcagccctccaccaacgtggctccgtacgcaaaggtgagcgcaacgttcaccgagacgccggcatacaagggatcggtgaacgatgggcgtgtactgcaaaccattgtggtgccaccgaaccactggaccaactaccgctccattccgcagccacaatccggcgactcgctggtctaccaatgggatggcactgtgcgcgccaactcgtccaaggtttggttcgatgtggattccaacgcgctgcgcgcgcccgcttcgtggaagattcagtacttggacgcggacggtacatggaaagatgtcaccagtccgagcggttatacaacaaccaccggcaaggccaaccccaacactgtcacgttcgatgcagtgaccaccactgctctaaagctcgacatgactggccaagctgtggatggaggctacgcctccgtggccgtggctgagtgggaagtcggcgctgctgatagcgaatcgccggcaatcactgcgccgaagggcgtgacgaccgccaccggcaccgcgcccacgctgcctgccaccgtcgacgtgaagtatggagacacgaccgttgcttccccggtaatttggcgtccggtcgctgcttcttcctatgccaaggccggttcgttcaaggcctacggtgtggttgctggcgtgcccggtgaggcaagcgagcaaggcaatgtgtcgatgaacgtcactgttcaggatggctacaagcccgccgccgataccacgaagccgaccgtgaccgttgccgtcaccgccaacgcgggcaatagcgaatggctcactgccgctccgttcgccaccgtgcaggccacggacgataccacgccgattgccaagctggagatctccaccgaccaaggtaaaacctggatcaccatcgcggcgaatgccaacgcaactattgccgcgctttcccagcagggtgatgttgacgtgtgggctcgtgccaccgatcagaccggtaacgtttccgacatcgccaaggccagtggcaaggtggattccgccgcgccgaccgtgaaggtcgctgtcgacagggaggagcgcacgctgaccttgaccgctgatgacggcaccggttccggtgtcgcatcaattgaataccgcattggcacagacggtcaatgggccacgtacagcaagccgattgctgcaccgagcgcgtcgcgcgccaccgtgtactaccgcgccaccgataaggccggcaacgtgtccgcttcggcgaaaaccgacattccatccgacacttccgtgccgctgaccggctacattgagggcgatgccaccgccaccgatgtggacggcaaggcatccggctgggtcaagggtgccgccgcgttgaacgacggcaagatcattcccgatatcaccattgccaacgaggatgtctggggcacttggcccaacaccggtgagatgcgcctcgactacgagtgggaccgtgaagtgactatcgactctagccgcgtgcaattcacctcggatgatggcggattgggtattccggcatcgtgggaattgcagtactgggacgccttggcgaacaacggtgccggcaacttcgtggatatttccgacgccacctacactgtgaccgccaattcaccgtctgctggctgggccaccggcgatgccaaggggtggtctgatggcacgtggaacactccggtcaagactaccaagttgcgtatggttatcacgtccggctcggcttctccggctgttgccgaatggcaggttcatgccattgacgacagtacgcctgagccgcctgagcccacaccgatcgacaagaccgagctcaagcaggcgctcgctgactcgcctaaggctgacgatgcctccaagtacaccgagacttcatgggcggagtacgcggcggtattggattcggcgcagcaggtgtataaggctgaggatgccaccgaagctgcggtggtggatgccgcaacccagctgaagcaggcagcgaagaagctggtgcttgtagctacggtgcaagatcgtgccgcgctgagcgctcagctcgatgccgctgctgccgtggatcgcacaaagtggactgatgaatcgctggccgtgcttgattcggcagtcgctacggcgaatgcgctgacgagtgatggtcaggccgcccagtctgacgtacaggctgcgactgaggcaatcagcgatgccatcgcgggtctggttgagaagagcaccacgaagcctggccagggtggcgataagcccggttccggcacggacaagcccaaccaaggcaacgattccaaccagaacaagggtgatgcagactccggcaagcacaagaagatacctgacaccggtgcagccgtgcttggtgttggcatcctcgccgtggtacttgctgttgcgggtgtaatcatcctcaagcgccgcaagtccggtacctgctagtcccactcgctcggcctagcatcaccaagcccccacgcatgaacagcgggggcttcacttttgttcaataacaagcattatgtgcgcgtatgagactacgatggtggggaatctacgaacaggggcagcaatgacggcatacatggaccataaggatctcgccaacgaagttatcgatcaggcgcgcgcacaagagattactgatggtgtgcatcgcgtgcttgaccggattgcctcagcggagtccgcagccgggcgtgctgccggttcggtccaattgctggctgccaccaagacgcgcgatgtcggcgagattctggcggctatcgatgctggtattcgcgtgattggtgagaatcgtccacaggagattactgtcaaggctgacggtctggcaaaacgactgggggagcgtggttattcgctaggcgtgattgatgccgctgaggctgacacggccaatgccgcagctgcaacgcatattcctttccatctcatcggccaattgcaagccaataaaatcggcaaggtgctgccggtagtggacaccatcgaatccgtggattccatcgaactggcggaaaagatcgcccgccgtgccaccatgcgcggcatcacggtcggcgtgttgctggaggtgaacgaatccggcgaggaatcgaagtccggctgcgcacccagccacgccatcgacttggcccagcgcatcggtgcgatgggcggactgcgcttgcagggattgatgactattggtgcccatgtggatgatgagcgcacgattcgtgcgggcttcgcgcatctgcgccgcactcgtgaccagattcttgcctccggtgccgaaggcacggccgactgcaccgaactgtcaatgggcatgacccatgacatggcctacgccatcgaagaaggctccaccatcgtgcgcgtcggcaccgccatcttcggcgagcgcgccttcatctgattggagctatacgaaaaaacaccgcttgatcaatagccaagcggcgttttttcgtaaggattttcggcgtatcaatcacgcatagatattgcgcggacgcatgtcctcgggcaggccgtcgagcagaatcgccacggaaccttcctcgaacacggagcgaatacccgcggccagcagcggtgcgcaagacagtacggtcatattcggcaggcgcttctcttcgggaatcggcacggtgtccataaacacgatttcatgcgcgccgcagtgagacaggcgctccacggccgggccggagagcaggccatgggtggcgaccagcgtcaccgacttggcgccggattcgttcagggtgcgcacggcttcgcagatagtaccggcggtatcgaccatgtcgtcgatgaccacgcagtcgcggccgtcgacatcgccgataatgccatgtgcctcggcatggttcggacgagtaatatcacgctgtttgtggatgaatgccagcggcagattgcctagcttggcggcccactgttcggacactttgatacggccggcatccggggacacgatggtggtgttgcccagatcaagggtggaacgcacgtaatcgagcagcaccggcatggcggttagatgatcgaccggaccatcgaagaaaccctgctcctgagcggcgtgcagatcgaccgtcataatgcggtctgcaccggcggcgtggaacagatcgaaaatcagacgggcggtgatgggctcacgaccgcggtgcttcttatcctggcgcgagtagccgaggaagggcgccaccacggtaatcgacttggcggaggcgcgcttcaaagcatcgatcatgatgagctgttccatgatccacttgttgatatcgcccgaatgacactgcagcacgaacacgtccgcaccgcgcaccggttcggtgaaacgcacgtacatctcgccattggcaaagtcataggacgtggtttcgaggatttcggttcccaagcattcggccaccttctcagctagctcggggtaggcgcggcccgtgaccaatacgagtcgtttatccggagtgccttcaagaatcgccgacatgcgttcgcatcctttgtttgagtcgctgtgtgatttacgccttaaccagtgtacaagcaccccgccgcagcgaacgccacggcggggtgcttatttcgtaagagtgttgagattgccgaaatcactcggagaactcgacactgaccttattgtctttgatggtgaagttgccgttgacctccttgccttcaagcgtgtacgttagctgggcgctcacggtgccatcggcattattggagttctgcgagatgcgcgcgttggtgatgcgcgtgttctcgcccgaggatgccttgctggtcagcagtgcgcgctggttcgtatccacgtgaggatcggcgatggtgttggccttgtcgtagttgccggaggagatggcggccacatagctgttcgcaacgctcttcgcgctgaacacggcggaagacagcacgccatacacgataccgaacagcacgaggaagccggccacggcaccaacgatgatgaagattttcttctgctgctcattcatggtggtggaggtcgcgccaggtgcggctaccggtgccgctccgggagtgatgggagccgcgggctgcgtgggcttgtccaaaacggtggacatcgcgaaaccggcaagaatatgggcataccctgtcccgcctcatatatagactgtccaagttgcccgaagaggcggtgccggtttggtgctgcgtcatgggctaacacgcatacacactcctgccacggaacgtccgtggccgaatagtccgaaggaggtgggtgatgtctgcgcacaagtacgaactgatgttcatcgccgatcctgagctggatgagcgcggtctgaagaagctgaccgag

SEQ ID NO: 112 - DNA, 8544 bp, Unknown
  R206_24m  MAG No. k141_25342
ggaggtggtggaggctcgcagaaaaagacccaggcaccgagcggccgaacatgctgtggttcacggacctcacggagttttccatccccgcgggcaaggcgtacctgtcgcccgtgatcgactgctacgacggcatgccggtcgcccggacgatcggcaccagcccggactcggcgttggccaacggcatgctcgccgacgcgtgctccacgctcaaggacggcgagaaaccactcatccatcccgaccgtggctgccactaccggtggcccgagtggatccgcatccgcaaggacaacaacctgacgcgttcgacgggcgcgaaaggctgttctccggacaacgccgccgcggagggcttcttcccggcccaggcaggagttcttccacaagcgcagcttcgcgggcgtctcgatggacgggttcatcaacatgctcgacgactacatggtccggtaccgggacaagaggatcaagacggagtccggacacgggcatcatggaccggcggcgcagactcggtcttgtggcatgattggtggtgatggaatcaacgatgaatccaacaaaacggcaccggccccttccgaccgacattttttatacattttggtaccctctattggaaatcggggatccagccaagcaccatcatcttcaaaacccgtcagcaagcttttcgatgctccatcaacgtccttccctcaacaaaaaggaccagtagaaaatgaaataatgtaatccactatttcgtcgttacaccgtctgacggaaccttatccaatggagaacggcaaaagtggcgaaggcagctggtacaaaaagaacattgcattaatgtcttttcggcaatacggccaagtagccgcgtagacatcctttttcaatgcatccgtcgttatctcgttatcatcaagttcaagacggtaccgcattgtcacttcaaaagcagtctccatgctctcttttttggaaacgtccatcttctcacgaatgacaagattcagttcaagctcaagaggccaacgctggcccttcatttctgtaacaccttgacggaccgaaacatcaaactcagcattcgagagttccaaaacatcggaatcataagtactgtgagaggatatcaggcccatttgtataattcgttttgccatgactctatgctccttgccacacaggtaaaccgtcacaacgagattcagaataagacttacattccaatcgactaaggtaggttactccctcaagcgatccggaaatatgcctgttttcaaccgcgcatggcactccctcataacccaccacgacagtttcagaaacaggcaagtcggactcatcctcgaacggaataagctcatgatcaatcatgcaactcactgcattagcatatctgcgaagcgttgactgtctcggatcggcattccctttttcaatcatggagatatccggctgagatacgcccatccgatatgcgacttcctcttgcgaaagtccaagttccttccgtctttgcttaaggtcctcgataatttgactatcagattgaatggatttacgcgctcgcttgcgaagcagcttaaactcgtccgacttggtatccattatcatcacttgccctgcagtattacttaatgtgcgtcatgcgcatattgtcaaatataagtagaaacttatatttgacctctagagtaatgcaacatcacaccatatgcaaacgccacgcgagttagcagcttttaattccttcccagttattcgcgcgacattcctgcaaacgttgtttcgcataaatcgcatccgctgtttgcgtttgccacagcatcgtatcggtttgcatttttcctcttcgccatcagaaaaagaccaagtgccacgtccccaagctctcgaggctccgcatggaatagccgagagccaagatactgactcttgccacttccccgtttagtattaggccagccatttcttatttcaaagattctttccggagacgtcgttttggcattgatttccttaacttcatagacaggtttcaaaacaccttttttagcacggtctatagtatcgagaaactcttcttccgccatggccgccgcataatccgattcaaactgtggagcgacatactcttcaaatgcttcttccaaatccgcggcaacgtctgtttggaaccaaaagaactcgattggcttcttttgggaacaaatagagggaaagaccggcctcacaccagcattattcggagtcgggattccagcagcattcatatgcgcatgctaccggaaccctattacaaagaacgcctcacgtcagaatagagtcctcaatttttttggcctttcgctatttggtgtgggtgaagcgggttaggcggtgacgacggtcgggtagttttggtgacatggataccacgatgctgttcaccgccgccctgcaactcgtcgacccctggcacgtcaccgatgtggaactccgcgataccgacgcgggtgggcgggagccgcgcatcacgattggatacgggcccggctcgcgcttccactgtcccgaggcgatctgcttggattggctacaatgtattagacagtccgatgagggacgaatgacgtgggattggaggccgacgatggccggcccgaaacatccccgccactacgacgaggcgttcaaacggcagatcgtgcagtcgtgcgagagcggcaagccatcccgggcgatcaggtccgagtacgacatcgcgcgttcgaccctgcggcgctgggtccgaggcatccgcaacagcggctccacccgggccgcggacaaccgcacgcccgagcagaacgagccggtcgtgccggggaggcgcaacaggcagttggagatggaggtggacgtttcagaacaagcggcgccggtattcgcacgaaggcaggcgtgatacgggccaacgccgcccgctgcccgatatcggcgcgatgcgggatgcggggcgttccccgctccacctactactggatgaccgggcatcccgagacggagcgtgcggatccgatcgccggcgacgtgcgcgcggtccggcgcgacggcctcgaacgctacggcaccaggaagatcaaggccgctctggaaaggaggggcgtcaccgcgtccaggagacgcatcggcaacatcatgcgcgaacagggcatgacgagcgcgtacgcgcgcagacggtccgaaccgcacaagacgcgggccgacgaggccaggctcgcgaacctgttggaccgcgagttcgacggctacgccccgcacacgcacctggcgagcgaccttacctacgtgagggtcggcaacgggtgggcgtacgtgtgcctgctggccggcctggcgaacagggacatcgccggccattccgtcgggcggacccgggacgcgagcctggtattgggcgcgttcgccacgctcgacttcccgctgacggacgtccaggtgttccacacggaccgtggaagcgagttcgacaacacgaggatcgacgagctgctcgacgtgttcggcatcaaaagatcgctgtcacgcaagggtaacccctatgacaacgccgtggtcgagtcgacgaacaggctgttgaagaaggagctcgtgtaccggaacagctacgccacgatcgagcagccggggcgcgaccccgacgactacgtgtggcagtccgacaaccagcggctccactccacccccggataccggagcccgaaggaattcaccgaacaagggctcgtcctctaaggaactgtccaacacaccgttgccaatccaatcatgaggctcatgaccaggcacggcctagtgccccctgttcaagagcgcgaagcggtacagctcgtacaagggcgagctgaccaaggcgccgaagaacctggcgaaccgcgacttccacgccgagcggccgaacatgccgtgagccatgaacctcacggagttctccatccccgcgggaaaggcctacctgccgcccgtgatcgactgccatgacggcatgccggtcgccgcaccagcccggactcggcattggccaacggcatgctcgccgacgtctgctccacgctcaaggacggagagaaaccaatcatccattccgaccgcggccgccactaccggtggcccgagcggatccgcatccgcacggacaacaacctgacgcgttcgacgggcgcgaaaggctgttctccggacaacgcggccgcggaggggttcttcggccgtcccaggcaggagttcttccgcaagcgcagcttcgcgggcgtctcgatggacgggttcatcgacatgctcgacgactacatggtccggtaccgggacaggcggatcaagacggagcccggacacgggcatcatggatcgtcgacgcgagctcggtcttgtggcatgatcggtggtgatggaatcaatgacgagtccaacaaaacgtcaccagcccccaatggcagattagttgtacatccacaagcaatctgccattgcgcaacatagtaaccgacttctttcctcgatcgccccaactacttctggaacacgtcggggtgcttcgggtctccggggatgtcggacagaaggccctccagccccaggaattccttccagaagtcgagcggctggccgtacggcgtggcttcgcggccgtgggcctgaatgttggccttggcctcgaacacctcttcctcgctgatgccctcgaagtagctttccaagcggtcgcgatgctcgggcacgtagaacagagaggacacaatctccgtcagacgttcggcacgctcgatcggcaaggaatcccagtggcgaagctcgatgaagttcttcaggcgtacgtcattgaagtgcgtggagatgatgtggttgatctcgtacgggttgagttcgcggtccgggtacacctcccccgcgttctcgcggaaggccgggcgatgcagttccttgggacttgctccagaagccacagcttcaggggtatgggtcaggtcagcgaacatgagcggcgtggacagcacgtcgatggcgtaatcctcccaaccatagcgatcatcgaacaggccgggcagcacattggtgcgctggaagtccagataatcccacatacgctggcgcagcagcggccatgggttcgtctcgccctcgaaatacggggcgttacggaagaagtaggccagaatcgggccgataactgtgcccagacgcaacttttcgatggagtcgcgctcatccacgtagtcgatgctgacctgggtggaggcggagcaacgcatcatgcatgggccgaactgacccacgcggccgaggtagtcggtcattgcatcgtagcgatccttggggttgaccggcacatccgcaaagctggacttgggctggtaaccatagttgaccaagcggaagtcgagatcgtcaagaatcgggtcgagctcgcgacggaacttggaatacaacgtattcaggtcggacggcttcttcagaatgccgattgaagtctccacctggccgccgggttcgagcgagacggcgacgccggggcgcgcgagccccaccagatggccgttctcccagtattccttctcctcgtcatagtagggtacgagacgtttgagcagcgtttcgatgccgttcggctcgtagtaggtcacggcggtgtcgtcgctgttgtgcacgggcaggtgctcgatctccacgccgaagccgccggcgccccgctgggagcgtccattctcaaagaacttgagcaggctttcgacgtgcttggggttcggcttggcgagcaggtgcgcgtaactgattcggggagtaaccatgctttgtatcgtattcgagccggccggtgcgcgtgcccgaaagcccgtaatacgctatacgaaaaaccgatagcaggctccggcccggtttctcgctctagagactcccctcagtcgctgcgcgacagctcccctcacagaggccgagccgtaaagcggacagcccagtggactgtccgtaggcgagggtgagccgataggcgaaccagcatgtcgcgagcgaagctcgtccttaattgcggacgagccagagcataaatcagtccgcggaggtgaagccctgcggctcgccggcctcggcgaccttggcgttgtgagccttcttggcggcggcgatcatcagcttgatacgattgagctggttcgcctcggaggcacccggatcgtaatcgatggagacgatgttggcttccggatgcaggcggcggatcttgccgaacatgccgcggccggtcacatggttgggcaggcaggcgaacggctgcgcgcagatcacgttcgggcaaccctgttcgatgagttccagaatctcggccgtcagcagccagccttcaccggcctgcacgccgatggaggtgacttcagcagccttcttgaccagttcgggcatcggctcgtcctgcttgaacttgccgttcgatgtggccagcgcggccttgatcggcgcgttgtacaggtcgaggcccttgcgcatcagggcgtaaaccgtcttgttgccgcccatgccgaggttcttctcgttccagtcggtgatgtaggggcgggtggtcatgaattccatgatgccgggcaccacggcctcgcaatcctgggattcgatgacgtcgaccacgtggttgttcgcgtccggctggtacttgacaagaatctcgccgaccacgccgacacgcaccttgcgcgggatgtcgcgcagcggcaatgcatcaaaggatttcacgatctccttggccagcacgttatacggcagatagcccttcttgatgctcggcgccttggctgcggtcttggaatagccgtgatgctcgatggtctcacgcacgatggtgtcccacagctcgtacagcttgttggccgaacctttctccacctcatacgggcgtacgcggtagaggcacttcatgagcaagtcgcccagaatcagcgccttgatggcacggtgcagcaggggcagggtggccttgaagccggggttatcttcgagcccctgggtagaaatggcgatgaccggaatctgcggatagccggcatcgaccaaagccttgcggatcaggccgaagtagttggtcgcacggcacatgccgccggtctgggtgatggcgagcgctacatggtcgggatcgtatttgccttccagaatcgcgtcgatgagctggccgacgaccatgatggccgggtagcaggcgtcgttgttcacgtatttgaggccggtttccacatcgccacggctcgcgtgcttcaggatgtcgaacttgtacccaccggaacgaatcaccgcttcgaccaaggacatgtggatcgggctcatctgagggccaacaatcgtatagttcttcttcatgtccttgacgaacttctcgcgatgcgcgtatcgggacatggtggcgttgttgtggccggacttcttggcgttcgtcacgccggtggtgccgtccgaagtgccgttcttgctggcgactgcggcctgcaggtcgcgttcggcggcacgcttggaggcggcgcgcatggccttggtgagcttcgggttggcggccatggtgctgtcaagcagaatctggcggccgggggttggcgcggtggagccggtcttgcggaatccggtggacttggggccttgcacggccttggccgcggcggcttcgcgggccttgttggcttcgcgttcctcgacggcggccttgagcgagcgcagtcgaatcttggcggcacccaggttggagacctcgtcaatcttcagcagcgtgtacacgtccgccttgtctgccaggatttcggccacctgatcggtggtgatggcgtcaaggccacagccgaaggaattgagctgcacgagttcgaggcccgggtaggaggccacgaagtgtgcggccgcgtacagacgggagtggtaggcccactggttggtgacgcgcaacggcatcttggtgactgtgcggtctcccacgtggcggaatccggcggcgttcttggagcgcgggtcggcttcgccttccgagaggaattcggtgaggttgagcttctcccccggctgcagttcgcagatggaatcctcggagagcaccaccatgccgagcgagcagatggtttcggggatgccgtggttgatttcggggtcgatgtggtaggggcggccggcgagcacgatgccgcggcagttgtgctccttcatgtaggcgagcgcggtcaaaccttcctgctgcacgtcgtgcttgaagaccttgtcttcggcataggcggccttgaccgcggtttcggcctcttcgcgggtcacgttggcccacgcaaactcttcgacgatgcggccaaccatgagctcatggttggcgaggttgaagtacgggtgcatgtagcgcacgccgtcctcacgcagctcaggaacgttggcgccgacgacgagcggatagttggccacaaccgggcagttgtaatgattgtccgtgttgggcacgaggttctcctcgtagctcacgcacgggtagaagatggtcttgatgcccttgttgatcagccacttgatatggcc

SEQ ID NO: 113 - DNA, 50241 bp, Unknown
  R206_24m  MAG No. k141_26566
agctcgctggcgctcggcgtgctgtatgcggaaggttcgcggcgttacctggaagcgctgtccacgtacacgcgccgtcgcctgacccaggccagccgcgcccaagtggacgaagtgctgcatgtgccggccgcgctggccctgcaccagcggcccaccgtgcctggcatccgctcgacgttcggcacgatgaccgaactgctcaacagtctgcggctcctgttctcccgcgtcgcctcgcacgtgtgcccgcattgcggggcgcgcaacgaaccgacgctgaacgtggcggccggactgcccattacttgcgtcagctgtggcaaggaattccacgcgcccggcgccgaatcgctcgccttcaactcggccggcgcctgcccgacctgctccggaaccggcattgtgcgcgaagtgaaccgtgcggccctggtgccggatgagtcgaaaagtatcgacgacggtgcggtgctgccatggggttcgctcatgtgggacctcatgaagcaggtgtgcggcgcgatgggcgtgcgcaccaatgtgccgttcagcgagctcacgcccgaagagcgtgacatcgtattcaacgggccggccgtcaaaaagcatattctttacaagccgaagaaaggcgacgatttcgccgaactcgacttcacctacttcaacgccgtatacacggtggagaacgcgctcgccaaagccaaggacgagaaaggcctgaagcgcgtggcccggttcctcaaggaaggcccatgcaccgactgcggcggcacacgactgagcgtcgccgcccgggcccctcatgtgcgcgggctgaaccttgccgaagccagcgcgatgaccttggatgcggcggtggattgggtgcgcggcgtgccggaatctctgcccgccgacatgcggccgatggccaccaacatctgcgaatcattcctggacgtggcccgccgactgttggatttgggcctcggctatctggcgcttgaccgcgccggtgccacgctttcgaccggtgaacgccagcgtgtgcagctcgcccgtgccgtgcgcaaccgcaccactggcgtgctgtatgtgcttgacgagccatccatcgggctgcacccctcgaacgtggacggactgctcggcgtgatgcgcgatttagtggcggacggcaattccgtggtggtcgtggaccatgacgtgcgcgtgctcaaagccgccgaccatcttattgaaatgggaccggttgccggcgccgaaggcgggcatgtgatcgcgcaaggcacggtagacgaagtggcggcgaatccaagtagtcgtattgcgccgttcctgtcagatcaggcaaacgcgcgtattcgtgagcgcgtggcggaaccgcaggtgttcgaccttggccacatccgcatgacaaccagccagttgcatacggtcaagccgctggacgttgatattccgcgcggccggctcgtggcggtgacaggcgtctccggctccggtaaaaccacgatggtgctcgaatcgctgattcccgcactcaaagcgcaggcggcgggggagctgttgccggaacacgtgcgcgagcttgagaccgcgggcatcagtcgcgcgaatctcatcgacgccacgccgattggcgcaaacgtgcgctccaccgtggccacctatgccgatattcacgacgaattgcgccgcgccttcgcccgcacggacggcgccaaggcgggcggctggaaggctggcgatttctcatacaacaccggccgactgcgttgccccacgtgcgacggcaccggttcgatctcactcgacgtgcagttcctgccggacgttaccatcgaatgcccggattgcggcggatcccggtatgcgcccgaagccggcgcgattcggcgtgctgttaagggagaatcgcacctttcgttgagcctgcctcaactcatggcaatgagcgtggaccaggcgctggccgtgaccagcgacctcaagaaggttcacgcacgtctgaccaccctgcacgacttgggcctcggctacttgacgctcggcgaaccgacgccggcgctttcgggcggcgaagcccagcggctgaaactcgccagcgaaatgggcaaggcccaatcggacgcggtattcgtgttcgatgagccgaccatcggtctgcacccgttcgacgtgcgtgtgctgctgggcgtgttcgaccggcttgtggcgagcggcgcaacagtcgtggtcatcgaacatgaccttgacgtgatcgccaatgcggactggatcatcgacatgggtccgggcggcggcgaaagcggcggacgcatcgtcgccaccggaacgccggaacaaatcgcggccaatccgaacagcatcaccgggcggtatctgcgctgactcgtatggcggtaacgcgcctttgcataggaccctgcgcgagtaggatagccgtccatggtgcagattcatggcattagacgcgcgagcgcggacgcgaaatatcggcagatgaccgggcagccggtcaagccgctgattctcaaactgtgcttgccggccgtcatctccaatctggtgaccactgcctacaatctcacggacacgttctttattggccagcttggcaccgcgcagtccggcgccatcggcatcgcgttctccatcatgaccgtgatgcaggcgctcggcttcttctttggcaacggcgcgggcaactcgatgagccgcgaactcggcaaacagaacaatgagcgcgcctcccgactactggccgtgggcttcgcgggtgcggtgctctctggtttggtgattgccacaatcggattgctgaccctgcggccgctggtcgtcatgctgggatcgacctcgacaatcgccccatacgccgtgcaatacctgacgccgttgttggtcgccgcaccctgtgtatgcgggtcgttcgcgctcaacggactgctgcgataccaagggcaatcggcgttcggcatgatcgggctggtttcgggcgcattgctgaatttcctgctcgcgccgttgtttatcttcgtgctgcacctcggaatttttggtgccggcctggccaccgccatctgccagacggtgagcttcacgattctgaccacaatgagccgcaaattcggcgtgatgaaactgtccctgcgcaattgcaggccggatgtgctgctcatgcgcgaagtggccggcggtggcctgccctcgctgatccgccaaggcgccggttcgatttccgtgacctgcgtgaacattgccgccaatccgttcggcgatgcggccatcgccggcatggccattgtgatgcgcattatgctgggcgccaactcggtgatcgtcggcctcggccaaggtttccaaccggtgtgcggctacaactacggtgccggcctgttcgcgcgcgtcaaagaagggtactggttctgcgtgcggctcgccacctgcgtgctcgtggtgttggcggtgttgctgtgggtgttcgcaccgcaactggtcgagatcttccgctccgacccggccgtggtcgcggtgggtgtggccgcgctgcacatccaatgctgcacggtgattctcaacggcttcaacatgatgggcaatatgatgacccagaccatgggccgcaccggcatcgcctccttcctggccctgtgccgacaaggtctgtttttggcaccgatcgtactgattctgccgatgatgttcggcgtgctcggcgtggaaatggcccaatcggtgtccgacgtgctgacattcgtggtcaccatcccgttcatgcggcgaatcctgcacgaattgcggtagatgtcatcaagattttcgacttccagaccaggtggaccgagcatatctcgctgaatctctgtagtttttccttaccgttgcgttcattaggtcgattatgcgttcattaggtcggtgccctgcttagcatgagataatgagcattggaatgaagccattcttgaaggcagtgttcatcacaagtgacctaatgaacgcataatcgacctaataaatgaatggcggatggctaatacggagcctgaatgcagaatatgaaacgtatgaaagccaaccaggcacacaagtggcctgtgccggagcgcatcgaattgctgtaccgcaccatggctgacgcactcggcccgaccggatggtggccggcggagaccacgttcgagattatggtgggcgcggtgctgacgcagaatacggcgtggggcaatgtgaatcgttcgcttgcggcgttgaacgcggagggtgtgctcgaaccccataagctggtggccatggagccggagcgtttgcaggaactgattcgaccgtcaggcttttatgtcaacaaatccaagaccgtacagtcgctgagttggtggtatgtggagcgttgcggggccgcgcccgagggtgccgcggctatttccgatgccgaattacgggccgagttgcttggattatttggtattggcggcgagacggccgacgatctgatgctgtacgtgttctcgcgccgcacattcgtggccgatacctacgcgcggcggctgttcgccttccttggattcgacgtgccggccggctatccggcattccacagggcctattcgcccgtggtgctggatacgaacctcagtgtcaaggatttgcaggaattccatgggctcattgacgagttcggcaaggcctaccgcgacgacgcggccaaaagcgagtcctttttgggtggatggagggcttgactgcacggcgaatcgttctcaataagaaaagtgtgaggcccgcacggtgccaatcgcacatctgaatccttgactggctgcgctcgatgctgggtgtcgaaaacgagtctgtgacagaatagttcgaccgacacaatcgccaaaacgccgaacaggagccaatgatgaccgaagacaagccgatcgccaagccgattatcgatgatgcgacgcgcgagaaaatggcgcttatgttctctggcgaggtctacctgccggatgatgtggacggcttttttgatctgcaggccgcccagcgtgatctccagctcgaactcaacgccacgccgctgaccaacccgaagcgccgtaccgaactcatgcaggcgttcttcggcgcggcgggggagggtctgtacctcgaatgcccggtgtatgcgaactggggctgcaatacttattggggcgagcgctgttacgccaacttcaacctgacgctggtggacgatggtgagatcttcatcggatcccacaccatgatcggccccaacgtcacgcttgtagccaccggccatcccgtgcgtccggacctgcgctatcagggtgcccagtattcgttgccagtccacatcggcgagaacgtctggatcggcgcgaatgtcaccgtgctgcccggggtcaccatcggggacaacgcggtcattggcgccaactcgctggtcaccaaggacatccccgccaacacggtcgcctatggcagcccgtgcaaggtaattcgcgaaatcaacgaacgcgacgacgtctactactggcgcgaccgccaattcagtgagcgttttaagctcaaagagcagtagcgcgaaagctcactcccacacgtcgagcttgcgatttttgtagaaatactcgcggtccttgtcgccgatttcacgcacgacctcgcagggcgcgccgtaggtgacggagttggcggggatggaatgtgtcacgaccggaccggcgccaatcacgcaattgtcgccgatggtcactcccgacagaatcgacacgttcgcgccgacccacacgttgcgcccgagggccaccggaatgcaatacacgtagcggtgctcgcgcagcaccggcaacacggggtggcaggcggcgcattagcacggggaacggttgaacgagaagtggattggcatgtggtggtatcgaacatactgatgcgtgtgccgccgagcctgtccagatggctgcctatatgaaccagtgacaggaaatcgcgggagagcaaacgagaggagtgtgcatggggcagttcggcgtcatgattggccagttagtcggatttctgatcatgctgatggtcggatacggatgtgtgaggctccggttctatggtcagacggcgttggacggcatgtgctcgctgctgctcaacgtgctcatccccgtgcttgtgttctcgaacgccgtcgacggcgcggaccgcgcgcagcttgccgccaactggggcgtgatgctgctgaccgccgtgatgtacgcgctgctcatcctggtgttctggctggtcgccgaactgttgcggctcaaaggttcgcgtagccatgtatttcaggcgtcgcttattttcggcaacgccggattcatcggcattccgttgattatggcactttggccgcagaacggcgcgatttacgtggcgctgatgtcgatcatcgaccagacgctgctctggacgtacggcgtatggctgtgcgagccggtcgacgaagcgactgacggcaacgcgattggcgcgcgaggtgcggtcgtgaacggttcggtgaacggcgccggttcggtgggcaatgctggttcggcgagcaatgccgcaaacggtggttctccggccgtcgtccgcccctcgccaggcacccgcgtcctcggcctgcttaaacgattcgtcaatcccgccttcgtcggcgtgatgctcgccctgattctgattctgctcggcgtcaaggtgccggacatcatcctgaagccgctgcacaccatcggcaatatggccacgccgatgtcgctaatctacttgggcggcctgttcgcgctgaccaagtggtggggcgtcctcaaacgctacgaactctatgctggcctagtcgccaagatgatcgcattcccgctcgccttctacgcgctactgaccgcgctgaccggcgcattgccgcaactgccgatcacccatgacatggtgctgatgatcacggtcatcgccggactgccgaccatgaccaccattgccatgttcaccggtcgcaagaacaacatgcccgagtatgcggtcggcttcgtgcttgtaagcacgctgttctcgctggcctccctgacgattgtgtcggcggttgtgttctgaattgtccccttcgacgaaaagaatgccgggggcctccggcgcttggaatctcatcgacgccgccaacgactcggcatccgaggcggccgtgccgtatttcaaggagatattcgattacgcgcgcacgctcgatccgcagcatcgcccgctgacctacaccaatctgctgatggccgccggaggcaaagacaagtgccatcagttcgcggatgtcatctgcctgaaccggtattacggctgatatgtgcaagatgggtatcagctcatcggagccaagaaggccttcatcaacgagatgaaccaatggatgaacaccgaacccaacaagccattcctgttcaccgaatacggtgcggacaccgatgccggtgcgcacaagctgccaagcgtgcagtggagtgaggaataccagtgtgagtacctcaccatgcagcacgaagtgttcgacatgttcgaggcagtggtgggcgagcaggtatggaacctctgcgacttccaaaccggtgaaggtatcatgcgcgtcgacggcaacaagaagggcgtcttcactcgcgaccgtcagcccaaagccgccgcctatgtactcaaggagcgttgggagactaagtagcggcccgcccctggaatattccaggagcaacacacatcgcataacacacaacgcaacatacaaaaaagaacctcgtgaaacgaatttcacgaggttctttctagttacgctgaatgactcccattagactcccacgagggaagagcaatgggaattccaacgtggctaagctctcaaactcagatgtggaagtagagctcgtactcgagcggggtcggggccaggcgagcctggtcgatctcgtcgcgcttgaggccaatccaggtctcgatcaggtcgtcggtgaacacgtcgccggcggtgaggaagtcgtggtcctcttccagggcgtccatagcctcggccagggagcttggcacctgcttgatgccagcgtgctcttccggcggcagttcgtagaggtccttgtcgaccggctccggaggctcgatgtggttcaggatgccgtccaggccagccatcagctgggcggagaaggccaggaacgggttgcaggacggatccggagcgcggaactcgatgcgcttggcagccggggaggtgccggccagcggaatacggatggcggcagaacggttacgagcggagtacaccaggttgaccggagcctcgaagcccgggaccagacggtggtaggagttcagggacgggttggtgaaggccagcacggaggaggagtgcttgatcagaccgccgatgtaccagcgagccagatcggacagaccagcgtagcccttctcgtcgtagaacagcggcttgccgtccttccacagggactggtggcagtgcataccagtgccgttgtcgtcggcgatcggcttcggcatgaaggtcgcagccttgccggccagagcggcggtctcgtggacgacgtacttgtacttcatcaggtcatcgcctgcgtgctgcagggtgttgaagcggtagttgatctcctgctggccagcgccggcgacctcgtggtgggaacgctcgaggatcagaccgaccttctgcaggttggcgaccatatcgtcgcgcagatcctgggtgtggtcaatcggcggaaccgggaagtagcccttcttgacgcgattcttgaaaccgatgttcggggtgccgtcctcttcggagtcaacgccggagttccacggagcttcgatggagtcgacctcgtagaaggagcgctgcatggagttctcgaaacgcaccttgtcgaagatgaagaactcggcctcaggggcgaaggatgcggtgtcggcgatgccggtggacttcaggtaggcctcggccttgccggcgacctgacgcgggtcgcgggagtacggctcgtcggtcagtgggtcgacgatggagaaggccacgtcaagggtcttgtgcttgcggaacgggtcaacgaaagaggtctcaacgtccgggaccagcttcatgtcggactcgttgatggcctggaagccctgaacggaggaaccatcgaacggcatgccgtcggtgaaagcgtccttcaggaattcgctagccggcacggtgaagtgctgctgaacgccgataagatcggtgaaacggacggagacatactcgatgccttccttgttgataagggcctcgacgtcttccttggacttgagttcggtcacgggaccgctcctttcgtatgagatataacggtatatatcgtaaaatcgcgcgtttcgccggctcgaaacttgggttacgagaatgtttcgtgactgtggccgacaatcgcgcaggcgcgttatttcaacgaaacatcattacagaatggaaacggagactatcgggggagtaggtagagatgtccgcaacgtggacagtgggtattgacaggtgacgtaggtggatgtaagtggacgcgattatgagacatatgacgaagccccggaaccgattgaacggattccggggcttctgtgcgatttggtggtgtgctgccgatcagcgaccgcgcatcgcgcggcgggagatcttctgcgggcggttcggatccatgcccttggggatggcatagcccttcttggcctgcagcgtgcgaagacgatcgttcagcgtttccatctcggccttggtcagcaggaagcgacggcgcggatgaatcttggcgatcagtgcgttcttgtggtgcgtgggctcatagctcttggacttgatcaccgtgctacgcagcttggtcagcggcacctgcttggggccgtggcccacggcgatgcggtatatcggaatggaggagccggcggtgacgcccttgatatcgcgttcctgacgatccatcgccttcatgacgcggccgtattcgccttcgccgatcaggtagatgccgttcatcgaagtgccgcgccagatggcatccttggtcttcgggtcgatccacaccggttcctgcgggaagtcaaagccggctttctgcatgttgctcagcacgccgatggcggcaccaggcttgccatcaatctgcttgtagccgactgcatccgcgcggcgggtgagcatcatggtggccagcagaatgccgagcatgatggcggtaatcatggtgaagatccaggtcagccaggtccacctgacaatcagaccgatgatgatcatcacgactacaggcagcaggaaagcaccggcctcaagccacggcagggccttgtcttccttagccgtgtacttgtagatctggatgatctgcttgattgtgctctgcttcttcggcttcgcgtccttttccgccatcacttcttcctttgttgggacgaaacacactgggcaatatcttatcaggtgcgctggtccgaacttgcttgtgctggttggtctcagcgtgtgtgcaacggtcgtccgtcggccttgagcagcgcctcgccgagcgtttcactgaatgtgggatgcgggtgaacgaggcgggctgcgtcggcgagcggcacatggttgccgaccagctgttcggcttcggcgatgatgtcggaggccatcggggagaccatgtgcacgccgagcacgcgcggggtgtccgggttggccgcgtcgcagccggagacgatggtcaatgagccggccgtgccgctcatcagcatgcgcgcgttcgccagcatcggatagttggtctccttgatttcgacgaggtcctctctcgcctgcgcctgttcgacggtgagcccgaccgacgccgcttcggggaaggagaacacgatctgcggcacagcggcttcgtccaccggcttgggattgagtccggcgatggtctccgcgatgacgatgccttgctcaaaagcacgatgcgccagtgcgtgaccggccgtcacgtcgcccaccgcccatacgcccggtttgtcggtgcgaccgtacgcatccgtggcgacatgtccgtggtcatcaatcgtcacgccccatgctgggtcggtgatcgggtcgcgcccgatggcgacaagggcgatttcgccccaaacgctctgttcgccgtcctggccttcgcgcgtgtagtgcacggtggcgccaaggttcgcgccggtgtccacatgggtgacgctggcgcgggtgatgatgttcacgccatgacgtttgagctcacgggtcagcgtggtgccggctctccggtcccaggctgagagcacgcggtccttgcgaatcagcagggtcaccttcgaaccggcggcgttccacatcgaggcgaattcaagggcgatggccccggcgccgataatcaccgccgaagagggaaattcgttgacttccagcgcctgtgtggagtcgatgagggcgccggcgaacgggttaccgggcaatgggtgtggcttggcaccggtggcgatgacgatgttcgtggccgtgaggtccatcgtggggccgctgggttcggggacatcggccttgtgataggtgaggatgtcgctttggtcgggggagggaacgaggtggacgatgtggttggaagttgctggagcgatctcatccgcatggaacgcggcattggctcggaacacggtgatgccgcgatgggccagcagtccggccagtcctcccaccatcgtcttgaccacgcgcaggcgatagtcgcgcagcgtgccgaagtcgatgccattcaccgaggcgttgacgccgagttcggccgcacggtgcacggtgtcgatggtgtgggtggcggtgatgagcgccttggaggggatgcagccacggttgagacaggtgccgcccacggtggcgtcacgctcgacgagtgccactttcatgccgagttcggtggcgcgcagggctgtggaatagccgccggggccggccccgatgatgaccagatcaaactgttcgctcatgattgcctccttggtgcatataagtatggctcccatgctagggagccatatgcggctatcgccgccacttcgcctaaaaacagtccactggactgttttctttacggctcagcccctcaacgaggggagccagagtatatatggacatcagtctgccggccagtgaccgcgcttcgggtaacgcggcttgggaagcctccaacgacgcatctgaatcgaacggctccaagcgtaggagaaggagcgggagcccttggacacggactgttcgccgtacttggcgatgagcttggccttgagcttgcgccacatcagccatacgtcgatgatcacggcaatcaggtaaccgtacatcagcgccatcatgatgatggaagcccactggttctgcatcaaagaagtgacgaacatggagacgatcagaatcgcgaaggccaccgggatgaaccattcgccaaggttgaaacgggcatccacataatcacggatgtagatacgccaaggcaggcgttccgccttgggcatgtggttgatatcgcccttctgcatcgcctcgtactcggcgttctccttctcacgcagacgggctttggcggccttggcgctggccttgcggtccaccggaaccagcggacggataccggcggcctgagcctgcttcatcttcggggtaggacggccttttttctcagaaggatcggcggccttcttcggggcctgctcaacgggaacttgggcctcttcttttttcctaaacggattccatgtcatgctttgaggttacggtgacgttcagacacttgtacactggcgcagtcattgcaatgacgccgctcacgcacatatatacgcacatatataaaggaggatcatcatggcaacgctcaccgctgacgagattcgttcgcgcgtcgaaaccgattggaaccgcatcgtcaaggtgctggccgaaaaggtcgcgctgcagtcgatctccgccaagggcatcaccgccgaacatatgaagcgctccgctgaattcgtggcagacgaactgcgcctcgtgggtgtggatgccaaggtggtccaggcttccaatgccgacggcactccgggcgcatgggaggtcatcggctcgcatatcgtttctccggacgcccccaccgtgctgctctacgcccatcacgacgtgcagcctgttccggacccggccgagtggaacaccgacccgttcgtggccaccgaaatcgacggccgtctttacggccgtggctccgccgatgacggcggcggcatcgccatccactccggtgcgctgaaggctttgggcgacgacctcaacgtcaatatcaaagtgttcatcgaaggcgaagaggagatgggctcgccaagcttcattcccttcatcgaggctcaccgcgacgaattcgccgccgacgtgattatcgtggccgattccggcaactggtcggcggacattccttctttgaccacctcgctgcgcggcaacacctgcgtggacgtgaccgtgcagggccttgagcacccggtgcactccggtcagtacggcggcccgattctcgactccaacacgttggccgccatgctcatcgcttccatgtacgacgagaacggcgatctggccgtgcccggcgtggccgcggaagagccaatcggcggtttgcaacgcgaccttgacgaaaccaccgtgcgcgaggattccggcgtggtggccggttacgagttcgccggcaccggttcgctggcctcacgcctgtggaccaagccgtccgtgaccgtgatcggcttcgacgcccacccggtcgagggatccttcaacgtgatcgccccggagacccgcttccgtctgtcgctgcgcaccgcgcccacccagcgccctgaagaagcgcaggaagcactggctgcattcctcgaatcccacgcgccgttcggtgccaaggtcactgtcgaacgcggcgaaaacggcatgggctgggccatggacccgaccgccgtggccaccaaagacgcgctggaagccatgaccgaggccttcggcgttgagcccatcaacaagggcgagggcggctccattccgttcatccccgaactgcagcgcattttccccaacgctcaggtgctggtcaccggccccgaagacccgaaggccaacgcccacagccccaatgagtccatctccctgcccggcctcaagaacaacgtgatcaccgaggctttgctgctggacaagctcggcaagtaaccgaaccgcatcggtaatggtggcgagctgccgtcaggtaggtcacggatgtggctattgcctttgacggcggcttgctttatagtcggggagttgacacgggagctgccgttaggcggctgagaggagattcatagtctcgaccgatggaacgtgaccggataatgccggcgcacggaaatgtcgctcttacccacccgtgcctgaaccaacccgcgcgtggccacgaacatgtgcatcatgtgcgtacatatatccatgtatgttcggcctgcgtacgagcagaagaaaggcacattcatgactgaagctgtggccaaagccaattacaagtggcgcgtcgtcgatatcgtcgtcgccgcaatcatcgccgtcgcatccggcgtcattttctggggctgggacattgtctgctccgccccgctggccctgttcgagggcgtgacccccggtttcgagggtctgctcaacggattctggctgttcgccggcccgctcgccgcaatcatcgtgcgcaagcccggtgccgcactgtttgccgaaaccctcgccgccttcctcgagcttacgctgggcaaccagtggggcgtcggcggctcgctgatcgtcggcatcctccagggtctgggtgccgaaatcgccttcgccgtcttcgcctggaagaagtggaacatcggcaccaccatcctgtccggtgcgctcgccggcgtgggctgctgggcctactactgggccaccaacccgggctggaacggcctgcgcgtcacttggtatctggttggctccatcatctccggcgtcgtgatcgccggcgtggtggtctggtacttgtctcgtgcgctcgccgccaccggcgctctggaacgctttgaatccggccgcagcaaggcgcgcgtctgatgcaggttaatccggctgcggtagaggccagcggctggggatggcggcacgccacgcgtaaggacttcgcgttgcgtgccgtcgatttcaccatccggccaggtgaacgtgtgttgctgctcggtgcttcgggggcgggcaaaagcacgatgatggccggtctcgcaggcgtacttggcggcgatgaggaaggcgagcaggagggctcgctcaccatcgatggcgtcgatgcgcgcgaggcgcgaggccgcgtgggactggtgcttcaggacccggactcgcagatcattcttgaacgactgggcgatgacgcggccttcggctgcgagaacctcaacgtgccgcgcgaggagattcggcagcgagtgcgcgaatcattggatatggtgggactcggcggactcgaactggatcggtccacccgccatctgtccggcggtcagcgccaacgtctcgcgttggccggcgtgctggctatgaagcccggtctgctgttgttggacgaaccgaccgccaacctcgaccccgaaggcgtggtcgaagtgcatgacgcggtcaaaaaggtcatcgaggccaccggacagaccatggttgtggtcgaacatcatatcgatgtatggctcgatctggtcgatcgcgtgatcgtgctcggccgacccgatgcaagttcgcccacgggtgcggtcatcgccgacggcaagccggacgaggtgttcgccgagatgggcgacgtattggccgccggtggcgcgtgggtgccgggccgtgcgattcccgattactcgccgaagcaggagcctgcgcacgatgcgccggtgctcagcaccgagaacttaagctttggccgtgggaccgctcttggcgttggcatcaatctggatttctatcccggcgaagtaacggctctgatgggtccgaacggcgcgggcaaatcgaccttggccctgaccttggccgggctgctcgagcctatcgccggcaaggtgctcatcgccgacaacctcaagcccgcgcatgccgggcgtgagccgattgactggaaaagcaaggaactgctgggccgtatcggcatggtgttccaggagcccgaacaccagttcgctgccaatttcgtgcgtgacgaagtcgccatcggccccaagtcgatggggcagagccaagacgaggcttatcggaccgccgaccgcatgcttgagcagatgaatctcacgcgcttcgccaaagccaacccgtataccttgtctggcggggagaagcggcgactgtccgtggcctccatgctggccgccgcacccaaagtgttggtgatggacgaaccgacattcggacaggatttcagtacgtggaatgaaatggtcaagctgatcgccgccatccgcgaccaaggctcgtgcgtggtcatggtgacgcacgatgaggcgctggtggatgcgctgggcgcacgacgcgtgatgttcgaggaggcgaggcatgagtgacgtggtaaccgtcagcccgcaggaaacgcgcgtggagccggtcaaagcctcatcgccctcatggttcatagcgcgcatcaacgcggtcagtcgcatcatcggtgcgctgttgctgtgcgttccgatgttcatcagtctggatgtggtatccgcatccacggcgctcggcatcgaattcgtgctgctgtggattggtggcgtggctccgtggaccgtatgccgtaagacctggccggtatggatcgccgccgccggcagttttatctccgtgtttctctacggccgtacctcgggcgagatcctgtggcagggtggctggattgtgatcagcgagggatccattaatctggccatcgccacggctatcagggtggcggccattgccgtacccggcgtgatcctggccctgggcctcgatcccactgatttggcggacggtttggttgagattctgcacttctcaccgcgattcgtatacggcgggttggctggattgcgcatgtttacgctgctgcaggaagattggcgcgcacttggcttgtcccagcgttcgcgcggccttggcgacggtaacgccatcgcccgtgccctctcccaagcgttcggactgctggtgctctccatccggcgcgccaccaaacttgccaccgccatggaagcgcgcggcttcggctccagcgccccacgctcccaagcccgtatctcgcgtctgaagcctatcgactggatcttctacgtcatctgtctggctgtcccgctggcctccataggcgtagccatcggcaccgggaattggcacttcgcctttcaaggtgtctgaaaggcgacagactggcacagtgcctttcaaggtgtctgaaaggcttacgatgcctccgccagcgggagcgagccacgactgacgtaatgacccggcagtagggtagtggctatgcccatcaacgcccagattcttgataatccgaaatccgaccgcgttcgccgcatcgccgatctgacccgcgccaaaggccgcgaacgttcgggccgttttcttatcgaaggcccgcaatccgtgcgcgaggccgtcacttggcggccggacgtggtgcaggacctctatgtggaggtttcgcaggcgttggaacatccgcgtatcatctcctccacgttggagaagatcgtcgaaacctcgcaggatgccacgatttatgtgcactactgcaccggcgacgtgatgcaccgcatcagtccggacgcccagggcatcgtggccgtcggcaatgccgagtccatgcacgccggtgccgatgacgtcgaacttggcaagaacggccggggcccgcagatcgccgccttctggcaggtgcgcgacccgggcaacgccggcaccgtgatccgtgcggccgatgcggccggctgcgacgccgtaatcttcgtggacgactgcgtggacgtgctgaaccccaaggtcatccgctccaccgcaggctccctgttccatctgccggtactcgccatgagcaccgacgaattcttcacctggacaggcgacgaccataatatgggcgtctgggccgccgacgtatacggcaccgaagaatgcaagccggaaagcctgcccgcagtactggcggacaaggcggcggtcgaggctccgaaagccgtgctgttcggcaatgaggcgcgtggcttggaaccggacatcctcacacgctgcggccgcatcgtctccatcccgctgtacggcaaggccgaatcgctgaacctcggcacctcggccgcggtgatgttgatgtcgctgtctatgtcgggtcatgttgaaagaatgtgaaaccggtaaaaacgctgtgaaacgctgagaaaacatcagacgaaagggttctcgtggcagaacaaatggtgttcgacgccgaccaggtgaccgctgaggttgccaagggcatcgagaaaatccagaacgcctccaacctagaggagctcaaggccatcaagacaacgtacgcaggtgccgattcggcgatgaccaaggccagcaaggccattggctccctgcccgtcgaccagaagaaggaagccggcaagctcatgggcaagctgcgcgccgacttcggccgtgcctatggccccaaggaagtcgagctcaaggaagccgccgagaaggccgcactcgccgctgaaaccgtggacatgacgctgccggtgaaccgcaagcctctgggcgcccgtcacccgctgcccaagctgatggaagacgtcgaggacttcttcatctccatgggctggcagatctcctccggtccggaaatcgaagccgaatggtacaacttcgactccctgaacttcggcccggaccatccggcccgccagatgcaggacaccttctacgtcaagggcaatcaagccaaggacgccgccggtttcgtcggctccaacatggtggtgcgtacgcagacctcctccgatcaggtccgtgccctcctgacccgtggcgtgccgctgtacatcgcgtcccccggccgtgtgttccgcaccgatgagctggacgccacccatactccggtgttccaccagtgcgaagccctcgccgtcgacaagcacctgaccatggccgacctgaagggcgtgctggacaagctcgccgtcgccatgttcggccctgaagccaagacgcgcctgcgcccgagctacttcccgttcaccgagccgagcgccgagctcgacctgtggttccccgacaagaagggcggccccggctggctcgagtggggcggctgcggcatggtgaacccgaacgtgctgaagtccgccggcatcgacccggacgtctacaccggtttcgccttcggcgtcggcatggagcgcacgctcctgctgcgcagcgacatcaacgacatgcacgacctggtcgaaggtgacgtgcgtttcgccgaacagtttgtgatgggggagtgattcagccatgcctatgatcgatatcgattggctcaaggaccatgtcgaggttcccgaaggcctgacctacgaacagctcgccaaggaccttgtcaaggtgggtcttgaggaagaggagatccactcctcccaggtgaccggcccgattgtggtcggctacgtggtcgacgccacccccgaaccgcagaagaacggcaagaccatcaactggtgccacgtggactgcggcgacgaatggaacgagaccgacgaagacggcaacaaggtgccgcgcggcatcatctgcggcgcgcccaacatgaaggccggcgaaaaggtcgtcgtcaccctgcccggtgccgtgctgcccggcgacttcaagatcgagccgcgcaagacctacggccacatctccaacggcatgtgtgcctccgaacgtgagctgggtctgggcgacaaccacaatggcatcattctgctgcgtcagtacggcttctccgaggctgaatatgaggctctgaagcctggtcaggacgccatgcacctgctgcacctcgaccagcctctgcttgagatcaacatcaccccggaccgtggctacacgctgtcctaccgtggcgtggcccgcgaataccaccactccaccggtgccgcctacaccgatccggccgtggcactgaacgagaaggccccggaacctgctgactaccagcccggcaccccggtggacatcgatgttgaaatcgacgataacaatccgattcacggcgtgcccggttgcgaccgctactacgcgcgtatcgtcaaggacttcaatcccaacgcccacacgcccaactggatgcgccgccgcctgattcgcgccggcatgcgctccatctccttggccgtggacgtgaccaactacgtgatgcttgacctcggccagccgatgcacgcctacgacctcgacaagctcgaaggcccgattgtcgtgcgccgcgccaacgagggtgagaaactcaccaccctggacggcaaggaacatgacctgagcgtcgaagatctgcttatcaccgattcgccgaacggcgaacgcggctcgcgcatcctcggccttgccggtgtgatgggcggcctgtatggcgaagtgaccgctgacaccaagaacattcttctggaggcagcgcacttcgatcaggtgaccatcgcccgttcggcccgtcgccacaagattccatccgaggcctcccgccgcttcgaacgtggcgtcgacaccgcgctgcagcccgccgccacccagatggccgccgagctcatggccaagtacggcaacggcgagcccagcgaacacccgaacgacgtgaacaacacgccgcgcgccaaggtcatccacttcaaggcctccgaagtggcccgcgtggccggcctcgacgtggacatcaaccgcatctccgacatcctgaccgacattggctgcacggtggccggcggcggcaacggcgagttcgccgtaaccgcgccgagctggcgtccggacttgaacgagccgtgcgacctggtcgaggaaatcgcccgactggtcggctacgaccagattccgatcaccgtgccgccggcaccggtcgagggtctggtgggcctgaccccggaccagcagcgtcgccgtcgcgtggcggacgagctcgccgagttcggcatggtcgaatcgctgagctacccgttcgtgggcgacgacgattacaaggccttcggcttcgacccggaagccaccaagaaggtcagcgtcgagatcgccaacccgctctacggcgaccgtccgtacctgcgtcgcgagattctgccgaccctggccaccaccgtgcagcgcaacatccgccgcggcatcgaaaacgtgtccctgtatgagctcggccacgtctacctgtgggatccgaacgcgcccgccatcccggcactgcccggcggcgtgcgccccaccgacgaacagctcgccgcgcttgacgccggtctgcccgaacagcccgaccatgtggccggcatcctgaccggtctggccgaggacgatggctggatgggcggcaagcgcccggtcgactggtccgacgccgtcgaggccgtgcgccgcatcgccggccgtatcggtgccgcaatcgaactcgaccagcccgccgccgacgatgtgcccgtccaatggcaccccggccgcgtcgcccgcgtcatggtgggcgacgtcttcaccggctgggttggtgaactgcacccgcgcgtcaacgaggcgctcggcttcccgtcccattccgcggccttcgagctgaacctcaccgcgctgttcgccacgctgaccggcaagcccgtccaggccaagccgatctccacgttcccgccggtcaagcaggatttggccttcaccgtggacgagaccgtgaccgcaggccagcttgagaacgtgattcgcaaagccgccggcgcgaacctcgaatccatcgaactgttcgacgtgttcaccggcgaacaggtgggcgagggcaagaagtccctggcctatgcggtggtgttccgttcgccgagcaagacgctgtccgccgaagacagcgacgccatccgcaaggccatcgtggctgaggccgccgaaatcggcgcccagctgcgcgcctgacccgaccaatcatccgaatcgaggagcgtcatgagccaaccggagcaggacaagccgaaatacgggcagtaccagcagcctgaatatggtgctatgtctggccaatacgggccgaattacaacccgtatatttatggcgctcccgagccggataccaagaaggattccgccgcagccgctggcatcaacggtggcgcggcgcaatcccagcaggccggccagccgtacggtcagcagccggcgtggcccggcaatcagcaggcgggcggctggccgtatgctcaaggcggccaacagtccggtccgggcgggtacccgggcatgcaggggcagtcgtatggtcaacagccgaacggtcagcctcaccagccgcattattaccacggcatcgacctgaacgatccaaaccagaacccactctacgggcactgggattcgtatgcgatcatctcctttatcctcgccctgttcttcccggtgccagtgctctcggcactgatgggcgcggtggcaatgtggcgcacgcgcaccttccatatgaaaggcttcggtttggctgtggccgccgtggtgatcaacgtgctgtacaccatcgccgtcatctggatggccttcaatggctatgacgccatgagcctctaccaggaagccctccagcaactcaccggcggcaccggctcctcctccgactccatctccgcataagtggcgttcacataccaacacacccactgcataaatatgcaatagtctgcataatcgcgtatactcatcccaagacacatcagtgaaaagagatgagtatggcgaaatatacagtggccgtggccggtgccacgggctatgccggcggtgaagcgctgcgcattctggccgcgcaccccgacttcgacatcacctgcgtggcaggccattcctcagtgggggagtcgatggccaagcacatgccgcatattccccaactggccaatctggtcgtcgaagataccacgcccgaagtgctgaacgggcatgacgttatcatcctcgcactgccgcacggtgcttcgggcaagctcgcctcgcagctcgatccaaatgccgtggttgtggatttgggcgccgaccatcgtctcgaagagcaggccgcttgggatgagttctacggcggcgatttctatgagcattggacctacggcatgcccgagctcatcaccggcaaagccgcggacggctcatacacccgccagcgcgcggcgcttcctggcaccaagcgcatcgcaggccctggctgcaacgtcaccgccaccacgctggccctccagcccggcatcgccgaaggactggttgaatcgcaggatatcgtggccgatctggtcgtcggatactcgggtgctggcaagaatctcaagcgcaccaacctgcttgccgccgaggccctgcaatccgccctgccgtattcggtgggcggcaagcaccgccacattcccgagatcctgcagaacttcgcccacgcggccggcaagagcgcggccgaagccagcgaattcacgctcggcttcacgccgattctcgcccccatgtcccgaggcatcctcgccaccgtgtccgcccgcatgacggacaaggccaaggcactgagcgatgaggagattcgcgccgtatggtccaaggcctatgaaggtcaggacttcatggtgctgctgcccgagggcacactgcccgccaccggcaacatcatcggatccaacgcagcccacctgcaggtcgtcgccgaccgcaaggccggccgcatctacgcttttgccgccatagacaacctcaaccgtggcaccgccggacaagcggtccaatcactgaacatcgcactcggcctgccggaagacgcgggcctgaccaagatcggagtagcaccgtgagcgttacatttgcacaaggtttctccgccgccggcgtggcggctggtatttcatccgtcgaaggcaagaaggacttggccctcgtggtcaacaacggcccgctcgacgcggctgcaggcgtgttcacctcgaaccgtttctgtgccgccccggtgcagtggagccgtaaggtcgtcgccgacggtcacgtcaaggccgtgattctgaattccggcggtgccaacgcctgcaccggcgaggccggttacgcccagtccgtcgccaccgcggaaacggtcgccgggctcatcggtgccgaaccgaatgatgtggctgtctgctccaccggtctcatcggtgaactgctgccgttggacaacgtgttggctggtgccaagagtgcccatgaggctcttgccgccaccgccgaagccggcgccgccgcctcccacgccatcatgaccaccgacaccaagccgaaaacggtcgaactgaccggctccaacggctggaagatcggcggcatggtcaagggctcgggcatgattgccccgcagctggccaccatgctgtgcgtcatcaccaccgatgcggtcgtctccgccggccagatgcaggccgcactcgccgtggccgccgaacattcgttcaaccgcatcgacgtggatggctgcatgtccaccaacgacacggtcctgctgctcgcctccggtgcctccggcgtcgaaccggacaaggacgaattcaacaagctggtgcgtgaggcctgcgtctccctgtcccgccagattatcggcgacggcgaaggtgcctcccacgacattcgcatcactgtcaccggtgccaccagcgaagacgcggcacttgcctgtggtcgtgccgtcgccgcctcgaacctgctcaagtgcgccatctccggcaacgatccgaactggggccgcatcgtcagctccttgggcactgtgccgcctgaagtcgcgccttacgattcgaacaaggtgaccgtggacgtcaacggcgtgcgcatctgcgagaacggcggcgccggccgcgaccgcagcgaggtcgacatgaccccgcgcgaagtccacatcgacatcgacctgaacaccggctcggacgccgaggccaccgtctggaccgatgacctcacccacgaatacgtccacatcaacgccgactacgaaagctgacaaacagcccagtgggctgtttgtagcagccggcagcgatagcgtcgccggcgtcgcatataacgcaaacagcccagtgggctgtttgtagcagccggcagcgatagcgtcgccggcgtcgcagaaaagagaaaaattggctacagaattgaagggacctgggttccatttcgacgtgcacaccgatttgcgcgccgatcagaaggcagaagtgcttattgaagcgctgccttggctggaggagttcgccggccagcgtatcgtcgtcaaatacggcggcaacgccatggtcgatgaccatctgaagcagtgcttcgccgaagacatggtcttcctgcgtcaggtgggcctgcatccgatcgtcgtgcacggcggcggcccgcagatctcccacatgctcaaggccctcggcatcaaatccgaattcaaaggcggcctgagggtcaccacccccgaggccatggacgtggtgcgcatggtcctgaccggcaaggtgtcacgcgaactggtcggcctgatcaacgcgcacggcccgctggccgtaggcctgtccggtgaagacggcggcctgttctcggccatgcagcgcaggcccatcatcaatggcaagcccaccgatatcggcttggtcggcgatgtggtttccgtcgatgcctcggcagtcgaggatctggtggccgccggtcgtatcccggtcgtctcttccgtggctccgaacgaagaagatgccactgaagtgctcaacgtgaacgccgattccgccgccgccgctttggctgccgctgtgggcgcacgcaagcttgttatcttgaccgatgtggatggtctgtacgccgattggccggacaagaattctctgattggccggatcggtgtggaaaacctgcgcgatatgctgccggacctggaatccggtatgcgacccaagatggaggcctgtgtcagggccatcgacggtggcgtgccccaagcccatatcatcgacgggcgcaagccgcattcgattttgaatgagatattcacctccgcaggcatcggtaccatggttatgcccgatgaaggactggaaatgaggagctcttatggctactgagcatgaggaaaaactaggtacggaagacagcaagtggctgggagagtactctcaggtccacatgaatgtgttcggtacgccgttgcgcgtcatggatcacggccaaggtgcccacatctgggatgttgacggtaacgaatacctcgatttcctggcaggcatcgccgtcaattccctcggatacgcccaccccaagtgggtcaaagcggttgccgatcaggctgccaaggtggctcatatcagcaactatttcgcgtccgagccgcaaattgagctggcatccaaactggtcaagctggctggtgcacctgaaggctccaaagtctacttcggcaactccggtgctgaaggcaatgaagctgccctcaagcttgccaagctgtatggccgcaccttgcctggtgccctgccttccatcggcggcaagcccgcacgcattctcgcaatgactcacggcttccatggccgtacgatgggtgcgctgtccgccacatggaaacccggtatccgcaagccgtatgatccgctggtgccgaacattgaattcgtacgcgccggcgacaaggtcgccctgcacgacgcttttgcacagaccggtctcggccgctatggcaagggtccggtggctgctgtgattctggaacttatccagggcgaagccggcgtgcagccgttgggcgccgattacgtcaagttcgtgcgcgaactgtgcgatatcaaccacgcgctgctcatcatcgatgaagtacagaccggtatcggacgtaccggcaagtggttcgcattccagcgtgacgatctgtccggcggcgtgacgccggatatggtgactttcgccaagggcgtggcaggcggattcccgatgggcggcatgatcgctttcggcgagaaacttgcggctctgttcactcctggttcccacggctccacctttgccggcaatccgctgggtgcggctgcgggactcgccactcttggcgtgattgaagacgagaatctggtggccaacgccgaagctcgcggcgaacagctgcgcgatggcattatggccaccggtaatccgctgttcgtttccgtacgcggtcgtggtttgctggacgccgtcgagctcaagcatccctgctcccacgcggtgatgaactactgcctcgaacacgggctcatcgtcaacgcggtggctcccaatgcgctgcgtttcgcaccgccgctgattgtaaccgctcaagacgtggatcaggcacttgccatcctcaaggatgtgcctacggacctgcccgacgactgatttctcgccgtcactgccgacccaccgatccaaggagatcatcatgaccccagaacttcgccacatgctgcgtgacgacgacctcaaccatgaggagcagaagcaggtgctcgaacttgccatcaagttccaccatgaccgcttctacaagcagccgttcgccggtccgcaggccgtcgccgtactgttcgacaagccatccacccgcacccgttccagcttctccatcggcgttgccgagcttggcggctacccgctggtcatcgacaagtccggctcccagctgggccgtggcgagcccgtggccgataccgctcgtgtgctcgaccgcatggcttacggcgtggtgtggcgcaccttcggccaggaccgcgtcgaagaaatggccaagtactccacccatccggtggtcaacgccctgaccgatgacttccatccctgccagattcttgccgacttccagaccatcgccgagcaccgaggcggcgtcgacaacctgaagaaccagaccatcgcctacctcggtgacgcggccaacaacatggctaactcctacctgctcggcggtgccgtggccggcatggacgtgcgcgtggccggcccccacggctacctgccccgcccggacatcgtggccgacgccaagcgcgtcgcggccgagaccggcggctccatcctggtcaccaccgatgccaaggaagcagtgaaggacgccgactgcgtgttcaccgacacctgggtctccatgggcgaggaggccgaatacgccatccgttccaagccgttctgggattaccaggtcaacaccgaacttatggcattggccaagccggatgcgctcttccagcactgcctgcccgcctaccgcggcaaggaagtcaccgctgaagtgatcgatggcccgcagtccgtggtgtgggacgaggccgagaaccgtctgcacgcacagaaagcgttgctgacttggttgaccggcaaggcccgtggagacgaaagcctgctcgcatgagtgaaaccggtccgtccctgcagcgccctgccaccagggcggcgcggctgagtgccatagaacaggcgctcgccacgcatatcatcacctcgcaatcacagctgtccaaaatccttatcgacgagggcattgcggtgactcaggcgaccctgagccgcgatcttgacgagatgcatgcggtgaagacccggctgaaggacggcacggtggcctacacggtgggtcgcagcgtcgttgcttcagaaggtgaggatgtaggggagcgcggtgaggcacagatgtcccgcgtgctgaacggactggtcacctcggtggccgccgccggaaatctggttgtggtgcacacgccttccggtgccgcacaatacgtggcctcggtgattgacaggcagccgatcgaaggcgtgctgggcaccatcgccggagacgacaccgtcatggtgatttgcaccaatgacgacaccgccgtctcccgctccgactggctactaagcctcgcctccaaataaccaacacgccgtgcataaatatacagtcctctgtatatacttgcatcagtttgtttttcagaccttgaacgaaagggaaccaatggcagataacaagcgcattgttctggcctactccggcggtcttgacacctccgtcgccatctcgtacctgaaggagcgcaccggcaaggacgtcgtggccgtgtccctcgacgtcggccagggcggcgaaagcctcgagaccatcaagcagcgcgcccttgcctgcggagccgtcgaatcctacgtggtcgacgcccgtgacgagttcgccaacgaatattgcatgaaggccctcaaggccaacgccatgtacgaaggcgtctacccgctggtctccgccatctcccgtccgctgatctccaagcacctcgtgcgcgccgcccaccagttcggcgccgacaccatctcccacggttgcaccggcaagggcaacgaccaggttcgtttcgaggtctccattgcctccatcgacccgacgctgaaggccatcagcccgattcgcgacctgtccctgacccgcgacgtcgagatcgcgttcgccaaggagcacaagctgccgatcacccagaccgagaagtccccgtactccatcgaccagaacgtatggggccgcgccattgagaccggcttccttgaggatccgtggaacggcccgaccaaggactgctactcctacaccgacgacccggccttcccgccggtcgaagatgaagtcgtcatcgagttcaaggaaggtgtgccggtcaagatcgacggacgtgacgtcaccccgctgcaggccatcgacgagatgaaccgccgcgccggagcccagggcatcggccgcatcgacctcatcgaggaccgcctggtcggcatcaagtcccgcgagctgtacgaggctccgggtgccgtggctctgatcaccgctcaccaggaactcgaaaactgctgcctcgaacgcgaacagcaccgcatcaagcgcgacatcgacaagcgctggggcgagctggtttacgatgcgcagtggttctccccggcaacccagtcgctcaacgccttcatcgaagacacccagaagtacgtgtccggtgagattcgcatggtcctgcacggtggccgcgccgtggtgaccggccgtcgttccgactcctcgctgtacgactacaagctcgccacctacgattccggcgataccttcgaccagaggtcctccaacggcttcatcgacatctatggcctgccgtcccgcgtggccgcagcccgcgacgtcaagttcggcaacggcatcgaggtcccgaagaacaccgtcgagtaattcttactcagtcgcccccgctgcgaggctgtcggcatagctgactgggagtggtctttgaaaggactgtcctcagtcacactccatgtgacagccctcgccagcgggggcaactgtatgtttgaacacattgctacgcttaaacacagctattttcacttttcaaggagccttcatgactgagaacaacgaacatctggccctgtggggtggtcgctttacgtccggtccgtcgccggaactggcccgactgtccaagtccacgcagttcgactggcgcttggccgacgacgatatcgccggttcccgcgcccacgcccgtgctctcggccgtgcgggacttctgaccgccgacgagctgcagcgcatggaggatgcgctcgacacgctccagcgtcatgtggatgacggctccttcgcccccatcgaagacgatgaggacgaggccaccgccctcgaacgcggactgatcgacattgccggcgacgaactcggcggcaaactgcgtgccggacgctcccgcaacgaccagatcgcctgcctgattcgtatgtggctgcgccgccactcccgtgcgattgccggactcctgcttgacctcgtcaacgccctgatcgagcagagcgaaaaggccggccgcaccgtgatgccgggccgcacccacatgcagcacgcccagcccgtgctgctcgcgcaccagctcatggcccacgcttggccgctgattcgcgacgtgcagcgactgatcgactgggacaagcgcatcaacgcctctccgtacggctccggcgcactggccggcaacacgctcggcctcgacccggaggccgtggcgcgtgagctcggcttctcccgcgtgaccgacaactccatcgacggcaccgccgcacgtgatctcgtggccgaattcgcgttcgtggccgccatgaccggcgtggacatcgcccgcctgtccgaggaaatcatcatctggaacacccaggagttcgccttcgtcaagctcgacgacggctattccaccggctcctccatcatgccgcagaagaagaacccggatatcgccgagctcgcccgcggcaagtccggccgactcatcggcgatctgaccggtctgctggccaccctgaagggcctgcccaccgcctacgctcgcgacctgcaggaggacaaggaggccgtgttcgaccaggtcgatacgctcgaagtgctgctgcccgccttcaccggcatggtcaagaccatgcacttcgacagcgagcggcttgaagaggaagccccgaccggcttcgcgctggccaccgacatcgccgaatggcttgtcaagaacggtgtgccgttccgccatgcgcacgagctctctggtgcctgcgtcaagctcgccgaaggccgcggccaggaactgtgggatctgaccgacaatgacttcatcgagaccttcgccgcgttcctgccggccgacaaggctccgggagtacgcgaagtgctctccagccacggttcggtcgactcccgcaacggcaagggcggcaccgcttacggtcgcgtgcgcgagcagatcgccgacgccaaggccgaggtcgaagaactcaagctcttccccgcatccacgtcggatggctccgcctacaaagcccccggcacgttctagtcccaatagagctccctcgtcagagggagctctattttgctgttgtcactgcaacggcatacactgagaaatcgtaacgaacgggagccgtgaggctgagaggaagtcgccagacttcgaccggggaacttgacgcgggtcatgccgccgtaaggaatcgttgttgcagatttgccgggttctccgatacagctttcattccgtttgcataattcagccgtgagacggtcgtgatggagccaatacatcacagcggtcgaacggtcgcatgattgggttcatgaatgggcgcaccacttaaggtacggttcgtttcgtgcacccttttttactatctgaaaggatattatgcaggtcaacggagagcaggtcacgctcgagacgccggtcagcgtcgccgattatctcgaagcgcacggattccgcgccgagcgtgtggccatcgaactcaatggtgagattatcccgcgcgataagcgtgccgacgccatgctcgacgaccagtgcgtcatggaaattgtgcagtttgtacagggtggatgaaaggaaaagctatgagcaatattaatccggttactgaagcatctgttgaggcgactccgctgccgccgcagcccgccgtcaccaatccggtcggcaccgccgcgccgattctgccagtggaagacaagccgctgaccctgggcggtcacgagttccagtcgcgattcattctgggctccggccgctacgacctgaacctcatcaaggccacggtcgaacatgcaggcacgcaaatcgtcaccatggcactgcgccgcgcgcagaccaccgagaacagcgtgctcgactacattcccgaaggcatcacgttgctgcccaacacctccggtgcgcgcaacgccgaagaagccgtgcgtatcgcccgactggcacgcgaagtgtgccacaccgacttcgtcaaggtcgaaatcgaacacgagaccaagtacctcctgccggacaacgccgaaaccatccgagccaccgaaatgctggccaaggaaggcttcgtggtcatgccctacatgttcccggacccgattgccgcacgccagctggaggaggccggtgccgccgccgttatgccgctcggttcgctgatcggctccaacatgggcctgcgcatgcgtgacttcatcgagatcatcatcgccaatgcgcatgtgccggtcatcatcgatgccggcatcggacgcccgagtcaggcatgcgacgccatggagatgggtgcggatgcggtgatggcgtacacggccgttgcctctgctggcaatatcccgctgatggctgaggcgttcaagcacgccatcgatgctggtcgtgcggcgtatctgtccggtctgggcaaggtgaccgagggacaggccgtgccgtccagtccgactacgggatatttgcactgacacttttattagctcccctctctgaggggagctggccgcgtagcggactgaggggagctggaaacatggagaaaacatggcattgactgatgaacaggtggagaggtacgcgcgccatctgattttgaaggggctgggcgtcaaagggcagaagcggttgttggcctccagcgtgctcatcattggagcgggcgggcttggctctccggccgccctgtatctggcggcggccggcgtcggccatatcggactggtggacggcgatgtggtggatatgagcaatctgcaacgtcagatcatccataccactgcacgtgtcggagcgcccaaagtggaatccgcggccacggccatccgcgcgctcaacccagatgtgacggtcgacacctactacgagctcgtcgatgccagcaacatcgccggcctcatcgaaccgtacgatctggtgatcgatgccaccgacaacttcgccgcaaaattcctcatcaatgacgcatgtgtgctggccggcaagccgtatatccatgcgggcgtggtcgggttctccggccaggtgatgaccgtcatcccaggcgaaggcccctgctaccgctgcatcttccgcgatatgcccgccgcaggtgaaattccgacctgcaaggaggccggcgtgctgggcgcggtggtcggcgtgttcggcagtctggaggcgactgaggccgtcaagctgattgccggcgtgggggagccgctcgtggctcgtatgctcactgtggatgccctgaccatgaacatccgccgtgtgccgttgccgaaccatgtgcccgactgcccggtgtgcggtgagcagccgaccattactgctattgatccggccaactatattcagccggcctgcgcgatttagagctatgtggcacccctccttgaggggagccaagatcggaacgagaggggaagaacatgcctattgctttgcgtaatgcggtcgatgacgatgagagcagtgaagcatcgtaccgccgcatcacgccggcggaatttgccaagctcgacccgaatacggtcacgctgctcgacttgagggaaccagccgacttcgccgcccacccggtcgaaggtgccatcaatgcaccactcgaccctctggcccatgtgctcaaaaccgtgcccacagatcgaactgtcgtagtctattgtgctcaaggatggtggagcgaggaagtagctgaaatccttgccgatcgcggttacgatgtagcaagcctcgatggcggttttcagggttatctcgactatcttgaaacccaccacgattaacggttcccgttgtcgttcttttggatgagtgtgcacggacatacgtgtgccctacaatcggtcacggtattactcgatggattcttgaatatcgtcgggtaatcgtaattcacaacaagggattgcactgaaccaacccgaacggagggtcgaaaccgtgggacatctgctcacccgaacgcagattcaacgcctggtcgccaagcacggccgtgaggtcatcgagcatcgccacatgcagatcgaacgctgctactaccagcacggcaacgtcaccacgttcgaacattccgtgcgtgtcgcctgcctggctgtgtggatggccgaccgcgcgcacctgtggtaccgcgtcgacctcaaatccctgattcgcgcggccctcctgcacgattacttcctgtacgactggcacgactgggataacggcgaacaccagtggcatggcttcacccatggccacgccgccctggtcaatgccctgaaggacttcaagctcaacgatatcgaacgcaacagcatcgagaaccacatgttcccgatgaccctggtgccgccgcgctatatcgaaggctatctggtcaccttggcggacaaatgctccgccaccgccgagaccttctcgctcgaccggttcaacaagcgcgcgttgcccgccgcgaagccctacgccgagatcgaagcccgtcgatgatcatcacactcgaacattatttcctctggtttctgttctacagtttcgtcggctggacgtacgaatccattctcgtctcctgccaacagcaccgcttggtcaaccgagggttcctcaacggcccgctgtgcccgatctacggcaccggcgcgatactcggcgtcgccattctcggcaacgtacataacccgatcatcatcttcctgatttcgatggtgggcgccacgatactcgaatacacaacctcgtgggtcatggagcagctgttccacgcccgctggtgggattactcgaatttccgcttcaacctccaaggccgcgtctgcctgctgggcgcgttgattttcggtctcggcggcgtgggcgtggtacttggttcgcagccatatgtcgagcgggtcacggatatgattccgctgccgatgctgcatacgctggtcacggtactggccctgatcaccatcatcgacttggcggtcacggttgcgggcatgctcggattcgagcaggtgctcgattccgtctctcaggtggtgcaggatgtggcggcacgcgccggtggcacgtggcagtggggctcccgtgcggtatccgacaggatgcgtgagctttcgcaggatacggttgagcgtctgcgctgggccatcaatggcgtcatcaacgcacagcagaagcgtatgctcaagtccttcccgaagttccaggtgccggatcgtcaggacatcatcgactctttgcgcgaacttatgggcccgcgccgctagaataaggcattttactgaatcgcgcggctcggctggtgttcggcactgtcgccatgttctgcgaaacttgactgtgcccaattgggcagtctcattcacaattcgatagggagaagcgacaagctatggctcacgtcaccgacttcaaggaagcgggtttcaacaccctgcttgaggaactggaatggcgcgggttgatttcccagtccacggaccgggatcgactcgcagaagcactgaacggcgagcccatcacctattattgcggcttcgaccccaccgctgcatcgttgcatatcggcaacctcgtgcagctcatcaacatgcgtcacctgcagcttgcgggccatcatccgattgctctggtcggcggcgccaccggacttatcggcgacccgcgccagtccggcgaacgcacgctcaacccgaaggacgtggtggccggctgggccgatcgtctgaagaaccagatcggcggcattctggacaccgaaggcgcgaacgccgtacgtttcgtgtccaattacgattggaccgcctcgatgaccgtcatcgacttcctgcgtgacgtcggcaagaacttccgtctgggcaccatgctcgccaaggacacggtcgcccgccgcctgaactctgaggaaggcatctccttcaccgagttcagctaccaggtgctgcagggcaacgacttcctccacctgtttgacgaataccactgcacgctggaactcggcggctccgaccagtggggcaacctcacctccggcctggacctgatccacaaggtgcgcggtgtggacgtcaatgtgttcaccagcccgatcatcaccgatgcttccggcaagaagttcggcaagtccgagggcaacgccgtctggctcgacgccacgatgctcagcccgtacaagttctaccagttctggatcaaccgcccggacgtggagatggaaagcctgctgaaggcgttcaccttcctgcccaaggccgaaatcgaacgattggtcgaggaatccaagaccaaccccggcaagcgcgaggcccagaagacgctcgcctgggaggtcaccagcttcgtgcatggcgaggccgctacacaggctgccatcgatgcttccggtgcgctgttcggccgcggtggcaacctcgaagacatcgatgaggaaacgctggaatccgtgctcgatggtttcaaggtggtcggcgagaacggcgagcacgtcttccccgtctccaagccgggcgatcgcgtaatcgacgccgcccaggctgccggactgttcaagtccgcttccgaggcacgccgcgccatcaagtccggtggcgtgtatctcaacaacaaccgtatcgaggatgaggagcaggtgctggccgaagccgacttcctggccggccgcttcgcgctcatccgtcgtggcaagaaggcgctcggcgccgtggaaaaccgttaatcaacaacgaattaaggaaaacaagtaatggcagaaggtaacgagcgttccggcaagtcctacggcggcggccataaggggtatggcgatcgccgaccgggcaaccgcggcggcaagggtttcaagccgcgcggcaagggcggtttcaagccgcgtcatgacggtgaaggtttcaagccgcgtcgtcgtgaggatggcgaaggctacgcgccgcgccgtgatggtgatggcgagggccacggcggctaccgcaagtcgtacggcaagggtggcgacttccacaagggcggccgctctggtttcggtggcaagggcggctatcgcggcaacggtccgcgccgcgatggcgacggcttccgtccgcgccgcgaccgcgatggcgagggcttcaagccgcgccgccgtgaggatggtgagggttacgcgccgcgccgtgatggtgatggcgagggccacggcggctaccgtaagtcgtacggcaagtccggtggcttccacaagggtggttaccgcggcagtggtccgcgccgtgacggtgaaggtttcaagccgcgccgcgaaggcggctaccgttcccacgaaggcgagaacggcgagaacccgcgctaccagcaccgtgacaacgatcgtcgtgatttccgtcgcgatgatcgccgtgacttccaccgcgatggtgagcgtcgtgacttccgtcgtgacaatgatcgtcgtgacttccgccgcgatgaccgaagggataacgatcgccgtgatttccatcgtgatggcgatcgccgcaacttccgcagggacgaccgccgcgacaacaaccgtcgtgacggcgaattccgcgagttttcgcaggaagagaagcgccagtaccgtgaggagaagcgctctgaatacatgaggcgtccgcgccgtaactccgacggcacgatgagcttcccctcgcagaacccgtacaccgaccgtcgtcccgacgagcccaagatgcccaagggcatggaatggtcgatgctgtccaaggatgagcgcgaacgtctgcgcggcctgtccaaggagcatgcggagaatattggtctgcacatcctcgccgctttcgcgctggaggagagcgatcccgaacttgctttggaacacgccaagtgggtggcccgtcaggcctcccgcatcgactttgcccgcgagacgctcgcgttcgtggcctaccgtcagggcgactacaagctgtccctgcgtgagttccgtaccgcctaccgtatgaacggcttcctcgactacctgccgttcatcgctgactgcgagcgtggtgtcggtgaaccgaagaaggccgtggaactggcgctgtccgatgagggtaagcagctgcatggcgctcccaaggtcgagatgttcctggtgtatgccggtgcccttggcgatttggagatgtgggacaaggccattgaagtggttcataccgtcggccgctctcagggtcttccgggtgagtaccgtatgcgtgccgtgcaggccgagcagtacttccttgaagaggccggccgcagcaaggaagccgagcagcttaatgacctgctggaccgtcttgaggatcagtatgccgacgaggagattgacgaaaacagcgacgacgtggtgattgaccacgatctcgaagacatcaccgacgactccgacgtgctcgagaagctcggcatcgatccggacgaggcgcagtacgccccggatccggagcaggaatacggcgatgaggacgacgaggctgaagacggcgatgccgagtctgatgaggccgatgtcgaaaatgctgagtccgaggatgcatcggaagaatctgaggaatctgaagccgaggagtcttccgagtccgctgacgatgccgttgaaccggctgagtccgacgagaccgagaccgaaaccgaggagtgagcggcgtaatgacccgtttcctcaaaggcaccgatcgcccgctcgccgaggcctatcagcttgcgctgctggacctcgacggcgtggtgtatcgcggcaagaatccggtcgaatacgcagccgattccattcgtgcggccgaagccgccggcatgaccatcgaatacaccacgaacaactcctcgcgcttccagcacgtggtggccgaccagctcaagggcttcggcttggacgtggagccgtggcaggtcatcacctcttcggtggtggccgcccgtgtggtggccaaggcgttgcccgccggcgcgcgcgtacaggtattgggcgccgagcatttgcgcgatgaggtcacccgcaacggcctgaccatcgtggacggtcctcaggaccgcccgcaggccgttattcagggctggtatccggatatgacttggcagatgatggccgatgccgcgttcgcggtcgaggccggagccacgtatttcgtgaccaaccgcgacctgacgattcctcgtgaactgggcatcgcccccggttgcggatcgatgattcgcgccgtgatcacggccactggcgtcgaaccggtcgcctccgctggcaagccggaagcgtacatgtacgatgaggcccgcgaactgaacgccgccgaaggccacgatctggtgtccaaggaggcgtccatcgccattggcgaccgacttgacactgatatcgaggcaggtaaccgcggtgactatgattcgctggcggtgctgaccggtgtcaccaacccgaccgaactgatgctggctccggcacacctgaggcccacattcatcgcccttgatctgcgtgaactcggcgaagcccaaccggagccggtccgcgacgagagcggtacttgggaatgccgcaaggctagcgcttggtttgaaaacggccaggtacacgtcagcgaccccaccagtatggacggcctgcgtgccgccgtatgcgccgcatgggaagccgccgaccaaggcgcacagctcagcgaggccacggtaccggtgttcgccatcgaggcatagtcctatgcctacggatagcgaacacgcgccggtcaccgagcgataccccgaacttgcggatattgatgaacaagacaacgaccgcaagcttgagacctatcgcaacgtgctggaatcgttacaacacgagcttgataacagccgcagctagcagaggagattcattctcccgccagcggaagatgacgtgaagtgctggatggtgggtccatgccgagccaccccgttggtggatggtgggtcgaaaggaaggtatatgaccgagcaacatatcgatcccgcgaccccacttgatcgcctcgacatgatgctcgtggcttcgggactggtcgaatcgcgggccaaagcgcagcgactcatcaaagccgggcatgtgcgcgtggacggcgagaccatcaccaagccatcgttcatggtcaaagccgggcacagcgaactcgccgtggataagggcgacgactacgtctcccgaggcgcttacaaactcttgggcgcgttcgagacctttgccggcaatggccttaccgggccggaaagcttggaatgtctggatatcggtgcctccaccggtggcttcaccgatgtactgttgcgcgggggagcggccaaagtcgtggcgctcgacgtcggccacggccagctcgacccgcgcatcgccaatgacgagcacgtcatcgaaatgagcggcgtcaacattcgcgaagtagaggccgacgacctgccttaccggccggcgatgatcgtctccgacgtctcctttatttccctgacctatgtgattccggtaatcgcgcgcatcgcggctcccggtgcgcagattgtgttactggtcaaaccgcagttcgaggtcgggcgggcaggactcggcaaaaacggcatcgtggaagatccggcattgcgggagcgggcattgcacgacgtggtcgcctgtgctgaacagcacggacttgacgtggtggccactgccgatagtcccatcatcggcacccacggtaatgaggaatacctgctttacgctgtcttgagatgaatgcgttggcagtctccgttcaccagcagcacgctggaggtacggtcgatgcctattgcggtggcacacgtggcgctttccaccgcactgccgttgcgtagcatggcggagtccgccgtcaaagtccggcattgcagatggttggcttcaaccgtgacggctgtgatatggcgaaccatgctgccatcctcatacccatccatatcaaaacgagaaaacatcgtactgcgcagtggatgaacttccagagccctgctgttgacgtcatgacccttcaacacgccgttcaagcggactgtctgaccgctaatatgacgggtgcctagggagccattgacggacagatttccggaacaaacgatatcgctgttgcatcgcagtttgccggtaaaggttatttcatcgcaaataatgtcgccgccgacttcgatgtcgccgctgccgctgatgctggatacgcgaatatcaccatcacaccgcacaatgccactcttgatgaccagtttgtccccttctataactgaggcctcgagggtgctggtcacaatcatggtgtgaaaatgcgcgccatcggcaagacgggaacgttggtccactcctatggtgccgtagactcctttgcctatcaacgtgcaattctgcgtatgcttgtccatgatgataaagccccctcaatatggacgtacagctttatggcttattgccccaataatgagcgcatccatgttgaggggggttatatcggtcacgatgtgagcagatagggggtatagcgagcgcagttaggggggttagccttggatgaagtggtcgatctgatcctgcttgcccatgaggatgagttcgtcgttgcgatgcatgaccagttccttggagccgtactggaactccttgcctggggccttgaggcccaccacggtcacgccgtatttgtcgtgcacctgcacgtcctcgatgctgcgacccaccgcgtataggggcgtgtggatcttgacgacggtgtacgggccgtcgatttcgatgtaatccagataattgccggccaccagatgacccacgcgcttgccggcatcggtctccgcattgatgatgtgacgggcgccgatgcgctgcagaatacgcgcatgctcctgggacacggacttggcccacagatcggaaacgccggcatccagcaggttgccggtgatgatcaccgaagcctcgatgctgtcgccgatggccacgacggccgtgtcgaactgggaggcgtcgatctgctcgatggccagcacatcggtcatgtcggcctgaatggtgggcagatgcgcggaccaacgggccacaagctccgggttcttatccacggcgagcacatcctgacccatctggtcgagggtggcggccacggacccgccgaaacggcccaggccgatgaccagcacgcttttgttgccgctcggttttgctgccatgatgatggtcctctctatgccggatttctgtgtgccgattgaatggccgatcagccaacgataatgttttcctgcggataacgaataggttcgggagccatcggtctgctgatggagtaggcgatggtcaacgggccaagtcgtccgacaatcatctcggcggacagaataaacaggctggccggattgccggcgcttgccacgcccaccgaataaccgcccaacgagaaggccgagcaggcctcgaacacggcgtccacgaacgcgcagccggtggtgaacatcagcatcatcgcaccgaccataaccagcgcaaagcaggccgtggtcacggacacggcggtcatctggacgcggcgggggatacggcggcggaacacggtgacatcgcgatggccggtgaatgcggcgcggcaaatcaagagaatcaccgcgaacgtggtgacacggatgccgccggcggtggatgaggagcctgcgccgatgaacatgagtatgctcatgaacaccttggtctcattcgtgacttcgggcacccaggaaatatcgaaaccggcggagcggggcatgacggcggcgctcatcgcacggcgcatcttcatgccgggaccgtctgcggggaacaggccggtattgccccactcgaccagcaggaaccaagccagtgaggtggccaccagcacagcggtggtcaccaaagtgagtttggtgtgcaacgtccaacgtttcgggctgagatgtcggcgtgcgcactgcaccagattcagcaccacggggaagccgagcgttcctatgaatgcgctgatgagaatcggcagtcccacgccccaacggttcacatgcaggccggtggcgtcaggcgtgaaaccggtgttgttgtaggccgataccgcgtagaacagcgcctgccacaatgtacgtcccatattgccgtggttcacgcggaacaggtcgggcagcagcagcacgaaggtaagcacctcggcgatgatggaggtgcccaataccacggtgagtacgcctttgacctcggaaagcttcgtggtgcccagttcgttcgcggtaagcatgcgctgggagaccttgagtctgcgggaagcgccaagagccaccatcgaggcgaaggtcatgacgcccaggccgccgaactggatggagaataggatgacaacttggccgaacgtcgaccagtattcgccggtgttcaccaccggaatgccgcaggtggacagggccgagacggcggtgaagaacgcgaccgggaagttggtgaagatgatgtccgatgtggagatcggcagcagcagcaagccggtgacgatgatgatcagtgcgccgaaatacaccatggacagacggcccgggtgcctgagcagacggtcggtgatgctgatgcggcgaatgcgcttggcggttttatcgcttttgtctcggctcagtacatcggccgaataccaccatgacaggcccttcgaggcctcctcattggcggaggattcgtcgaagtcattggccatgggtcctcaagctcctcaactgatactgctgtatggtcatacggcatgccatcgcgctgcgcacggcacgcgtacggtgatcgcgcggctgtatgccattgtatgccgaagctttacgttaatcgactctgcggaacgttgtcggcgacgcgccacgaagcggcatttttcgaacacctgtacgagtgatgacggtgtctgcggctagaataatgagcagtgcgaccgaatcgacaggaggatgccatggccaagcgcaacgcggtggtggtgacgcataccaggctcaggcagaccggaaccgtagtggccgaggcggtgagccagctgcgagtggccggtttcgaagtcaccatcatcgacaacaccgaggcccccgatttcggtgtgcagccgccgtgcgtgtcggacgacaccgaaatcgtcgtggtcctgggcggcgacggcacgatactgcgcgccgccgaactcgtccactgcacccaggtgccgattctcggcgtgaacatggggcatgtcggcttcctggccgaattcgaaagcttccagatcgacgaggcgatccgccgggtcgccacccacgactattcgatcgacgaacgcatgatcgcccatgtggatgtctggctgcctggcaccaccaagcccattgaggattgggcgctgaacgacatcacgctggaacgcgccgaccggggcaagatggtcgaactgtccatccgcgtggacgatgtggagatgaactcgttcggcgcggacggcgtcatcgtctccacgcccaccggttccaccgcctacgccttctccgcgggcggtccggtcatgtggccgaacgtcaaggccctgcagttgattccgttggccgcgcatgccctgttcgccaggccgctgatcatcggctccggttcgacctttaccatcgatattctggacgattccatgtccgaaggctggatttgctgcgatggacgccgtcagcgcgccctgccgcagggtacgcgcgtcatggtgcgcgaatcgcgcgataccttgcgcctcgctcgactctccggcatgccgttcaccaaccgtctggtctccaagttcgatctgcccgtggtcggttggcgcgagcacgcgcgcaacgaggcctcgagccagccgctgcatcacgggcacacgttcccggcggccgtgtatgcggctggcgttgccggtgacgctggcgtcgctggtaccgatcccgacaagccgggcgaacgtgacggcaaggcaggagcctgatgctcgaagaactcgatatccgcaatctgggaccgattcgagaagccgccattgcgccggccgcaggcatgaccgccatcaccggtgagaccggcgccggcaaatccatgctgctctccgcgatccgactggtctccggtggggccgccgaatcctcgcgcgtctcggccggggcggacgaggcttgggcccaggcgattttcgcgctcgcggatgatgccgtcgcatctgaacattccggcgacaccaacgatgccggtgacgatgccggcagcgggctcaccggtgctgccgcggccgtggccaaagcccacgacgcgggcgtcgaccccgaagacggcgaactgttcctttcccgcaccgtacgcgcttccggacgttcgcgggccgtgctcggcggcaagtccgtaccgcgttcggtgctgggggccatcgccggcgaactggtcatcattcatggccagaccgatcagctgaaaatcgcggccgccgcacggcaacgcgagtttctggaccgggtggccggagacgaagccgaactggccgcctaccgcaaggcgtgggatgcgctggccgccatggatgagcggctggaacgcctgcgctcgcaggaatcctctgcccgccaacaggccgactacctgcgcgaatccatcgaccgcatcaaccgaaccgacccgcagccgggggaggacgaggagctgaaggcgcgccgcgaacgcatcgaaaacgcggctgacatcgcccaaggcgtgggttcggcgctgggcgcgctggatgcctcgcaggtggatgtggacgccgccgacggcgcttcggccgtggaactcatcaatcatgcggtgacctcgttgcgcgcgattcgcgtcggcggcacgttcgccgagcaggccgatcggcttgaatccatcaatgccgatttgggcgacgtggtgttcgccctgagccaggagctgggcgacgaaggcagcgtggaggatctggaccagatcaacggccgtatccacgagcttggcgacctcacccgtcggtggggccccaccttggccgacgtgctcgcttggcgggacaaggcggcgttcgatttggaggatctggacgcctcgccggaaaaggtcgccgaactcgaatccgaacggcaggcgctgtacgatgcggccctcgccgccgccgacgtgctgagcgccgcgcgcgtggctgccgctgccgacttgggcgcgcgcgtcactgaagaactcggctcgctcgccatgctgggcgcctccttggaagtgcgcgtcacgccgcgagacaaggccgatgatccgctcggcccgtatggtcgcgacgatatcgcgttcctgtttacgccgttcgaggggtcgccgcagttgccgatgggcaaaagcgcttcgggcggtgaactgagtcgactgatgctggccttggagctggtggccgccgacacgcgcggcggtgccgaccaaaccttcatcttcgacgaggttgacgccggcgtgggtggcaaggccgcggtcgaactgggcaaacgtctggcacggctggcccgcagcgcgcaggtcatcgtcgtcacccacttggcgcaggtcgcctcgtgggcggacgcgcagttcgtggtcaccaaggagccgccggatgccgatgacgacgatttgggcgtggtcaccaccatcgccgaggtaaacggcgaagcccgcgtccacgaaatcgcccgcatgctctccggtagcgaatccgaagcctccctggaccatgcccgcgagctcctgaaggaaagcgcactatgaccaaagccgtcatattcgacctcgatggcaccctccttgactccatgggggtctgggaccaagtcgacatcgacttcctcaacaagcgtggcatcgcggttccgcccgactacacgaccacggtctccgccatgcagtttcgccagatcgccgaatacaccatcgcgcgattcggcctgaaagatacccccgaggagcttatgcaggagtgggatgacatggccagcgtcgcctattccaccacggtcgaagccaaacccggcgcgcttgactatctgcgcgatctgaaagcctccggtgtcaaactgggtgtcgccacctcgctgcccccgcatctgcgtgagccggcgctacgccacgtcggcatgttcgatctgttcaacgatatcgtctccgtcgatgacgcgaacgacgtcggcaaggaccagcccgacgtctacctgctcgccgccaagcgcctaggcgccgcgccggccgactgcacggtgttcgaagacctgctggtcggcatgaagtcggccaaatcggtcggcatgaaggtctgggccatgcacgacgactcctccgcctccgattggcccgaaatctgccacctggccgacggcgtcctcttcgacttccacgacgctccgcgcgtgctgtgataaaaaaattacacccccgctggcggagctgtcggcgtaacggcgttgtttggcataggtgccccttcccgaggccattgtaggcgcggcccatgtttcgacactgtatgttggcaaggtgtttgttcactgtttagctgttatgtaacacaccttgacagttaagcagaacagttatactgtgttgtataacagctaaacagctggggtgctagtcaaccacaatcgaaaggggcataggtgaaactgatcatctcatccgtgtccggtgaacccatctacgagcaaatcaaaacccaaatccattcggcggtgctcagtggcgagttgaaggcgggcgaggccctgccttccttgaggaaactcgccaaggagctgcgcatctccgtactcaccgtcaccagggcgtacaacgaactggccgatgagggcgtggtgcagaacatccaaggcaaaggcactttcgtgatggacaagggcaacgaactgatgcaacgtcagctcaaaacccagattcgcgaaagcctggccgaggcaagccggggcgccaaagccgccggcattccgctggacgcattggaccgcatgctcgaagaggaataccgcaagaaataacctcaagaaaggaccatggccatgaccgccatatccgaatccgacgcgatggcgttgcaggtcaccgacgtcaccaaacactatgattccggcttcacgctggacgacgtgaccttcgacctgcccaagggctacatcatgggactgatcggcccgaacggcgccggcaaatccaccctcatcaaactcatcctcaacatgatccaccgcgacgccggttcgattcacgtgctcggcctcgacaacatcgccaacgaggagcccgtcaaagaacaactcggcgtggtgttcgacttcagctacatgcatgaacagtggcaagtcaagaacattgaacgtattgtcgcgccactgtatccatcatgggacggtggatgctatcacaagtatctggatacttttggccttggtgacgcacagaacggcaagaaacatatcaaggatctttcccgcggcatgcagatgaagctgatgctggccatcgcattgagtcatgatgccaagctgctgattctcgacgagccgaccagcggactcgatgtgcttgcccgcgacgaactcatggatatcctgcatgcctacattgaggatggcgaacattcggtactgttcagcacccatatcactgccgacctcgaacgtgctgctgacttcattacctacatcaccgatggccgtctctactacaccggtccgaaagacgagtttgaggaatcgttccgcctgattaagggcggtccagacgaactggcacaactgcctgcggacgtagtgctgggctcacatacgtatgccaccggattcgatgcgctggtccggtcagacaggcttgatgccgttgcgtcggtggtttcggggcttgtcgttgaatcggcttccattgatgacatcattcgactgaccaatgcccatgattccaatcgtgacttgagcgggaggtgagcggccatggaggcaatactgagggtgtcgcggtctcggcaacatgcattgaccactgcattgcgcgtcgatatggcctacctgtgcgtcgacgtacggactgtgttctcgttgttgttggcaccgttgttctccgtcatctttcaaggtgaagcttatggtgatggcttcggctatcgcatgggtgtcatcatgacggtattcacctgcgccatgtgggtgctgaccatggcggttgctgacttacagaacggatatcgacttcgtggcattattccggcttcgaggaagagtcaggtggcc

SEQ ID NO: 114 - DNA, 45281 bp, Unknown
  R206_24m  MAG No. k141_27582
cggcggcagtctggacggcggcagtctggacggcggcagtctggacggcggcagtctggtcggcggcagtctgctgagctgcggcgtactggtcggcggcgtaagcgtctgcaggctgctgctcggcagcctgcagggccgcctgtgacggggcttcctgatcctggaccgggccgccgaatgcctcggcggtgaacccgtattgcgccagggtctcgcgggcgcgctcatcgccgaactcggcgatccaacgcttcaagccggggtagcaacgcggatttacggcgacgtttgcgccgaattccggattctcgtaggcgatttttgccaacagaatcgggtccgcgttcggatcctgtacggcggcgaccgcagcatcataatcaaccatgggattacctccttatgttcgctcggttatgccgaacgtatggtccgtagtgtttgtagtgttgcgtcttcaatggcgccaatgtcctcgccctcgtccagtttaaaagcgctgaacgcgtgatgttcgggttcggtcagtggcatatcggccacaatcacagtgatattgtcggttccgcccgcatcgagcgcggccgccaccaaggcgtccacggcttcctgcggactggaatgcgctgcggcgatggccgcaatctgttcgtctgacacttcaccgtgcaatccatccgaacagatgatgaaacggccggtcagatcggcaacatatacgtcgggcactatgccgtccggatcgcccaggcattgggtgatgatgttgcgtggaatggtcgcctccgcctcttccggcagcatctgaccggaatcgatagcctcctggcgttgcgaatggtcccgcgtgatgcgggtcagcgaggaggcgtcccacacggggatgatatccgtggcgggggcatcggcatccggcagcgggctgagatggtaggttcgggaatcgccgacattgaccacataggtctggtccgagaaatccggggagtcggcgtcgtcaaacggagctgcgctgtgggcattgatggcatctgcgtaaggctggggcaaaaccaggccggagcaggtcgtaccggccacgccgccgagacggtcacccaaatcgagaatgtcgtgctgagcctgtgccagggtgtcgtcgatgtcatggcgggtgcgcgagggcatggaagccagctgcgcgaaatgctgggcagccaactggcttgcttgctcgccgcctttgccgccgcccatgccgtcgcagaccatgaacacgccctgttgggcgaatccggtgtcttggttgttcttgcgcctaagacccacgtcactggtcatcgcgatacggatggagcctgtggtcatgacgccttccccttcttacgcgcgcgcttgacatgcgtcgtgtgcgacttggctgcgtgtctatttgacagtatagccacgcttttcagggaaagtcgtgtacgtatcctcctgaaacgcggcaaagaagcgagcattgccttgcgcaattggtcgactcctgtccaatatgtggtggcttggcccgattcaatgtcttgccccgagaacgtggcgtagtcggcttcccggccaagctggatcaaagcctggtcatctgtgccgagttgacgggcgatggcaccggcctgatctcgacgagtgcccttggctgtgatgccgctttgctcggcaagcatgcgtatggcattccaacctgctgccacacgggctttcggactgccatgccgccgcgctcgcgccagcagcatggccttgaacatcagaatcagaccgcagacgatgagtagggtccacaatgggctgccgtacagggccaccttgcgggtcactcgccagaaccgcacccagaacaggttggtcggcgaatcatcggcgtcggcgccggccaatgagctttggcccctggcttgcgtctgatcgcgcagcggatcggtcaacggcaccggtggttgccggaccagcgtctgcggattcggcggcgtcaggttctggttttcatcaggcaccttggtctccttgggcgtcggatagaacgccacccatcccaggccctgcaatttgatttccacccaagcggtgacatcgttgccggtgaattcgattttggtgccattgcccgaggtcttctccgtgcgggcatcggtgatttcgccatcctcgtttttcggcaggaagcccaggaccacacgggagggcagtcccagatcacgagccatcagtgccatggcggaggcatattgctcggagtcgcccaccatggccgtgcctgccagcagcttgttgatgcggtagttgccatggccggcatcggagggatggtcgccttcaagtccatgagagaaccatccggagtctttcaatgtgtcagccaacgccgtggctgcggcaccgcccgaggactgcccgccggcaatggacgtggccagtttgctggccgaatcgggaacatcctgggcttctggttgggtgatgcaggccgcagccgcactgctgatctgcttatcggtgggcttgcgggcgataatgccggattcggtataggtgaggcctttacgcgtgccggcgggaataatggcggaatcggtatccgtgttgtagtaaaacgtgtcattgccgttgtcggcatcgttggcgaagctcacgccagtggccgctcccgccagcggcagccaggtgtcggtcagtccctgatcgacggtgaaggtcgcagtgaaggatttaccctgctcatccgccttgatcgtggtgcccacgcgatgataattcgaggagtccgtggcttcggaagaatcggacaggttccatactgtgccatcgaatcgatccatcaccgcaagtttgaccggtgttccggccggcagattatgaacggtcagcaacacgtcttttttgtggtccttgatataggatcgcatgccgctgagcgggctggtgtaatcgtaggggcttaacggcggatcgtagcggtcacgcagcacgaaacggtcctgtggcaccagcaacgtgcccccgaaagcaaggccggcagcgagcacgacgatgatcagcgcggatatccagcgcccccattccagcagttcaagacgccaagacagccagataatcagcagcaaggcaaaggcaataccgcagatggcgcgttgccagccgctgtctgtgcccagcagggcacatacggccacggccgccgcaaggggcagcactcccaccagagacaaccatgcgttggcattaatggcaaacacgccggtgaagaacgtaagccacaggccgatggtccataccgccatcagcacgccgtcttgcgtgcccagaggcggatcgacggaaataatgtacttgaacgagccaaacgtcatttcccaacctgaactcaaggtcttcaaggtgggaatcacgtaatgggacgtagtggaactcagcgttaccaccgggccgatgatgaattgggcaaacgccagaaacacgatttgccaccacagtcgcaacgccggcaacatgcccgccagagcgatgatcgcgcccagcaaggtggccggtacagcggcaatcgcccaagtggccacgccgccgtacacgtcgatgagattggcttgcgccagcaacatcatcgccgctatgagtacgaggctggcgattcgtttgccccacggctggcgactgaggcccatgccgcgaagcacattgcctctggtcatccagataaccgaatgtgtggagtcggcccaggagccggtggtggtggaggtcccggtgtacgtgccggaggaagtgccggtgtatgtgccgctcgatccggcgtacgcagcggtattggtattggtgatactggactggtcgaaggtcatgcgagcacccccatgattagtgggagatcatcgaggtcgccgatggtggccaatgtgaagttggcgaatcttctgatgccgcgattggcgccggcgctggcctgcaataccacgcagctggccgatcggggcaaggccaaggtcatgcgcttgatttgctcgatgtctttcagcgatccaacagtgaaaaaatagaacgaagcatcaggactgtgcttcagcgtgccctcggcgagattcggattatcctcacgatcaggctctatggcactggcgttgtcgaggaactccatggcgttgtgcggctggccgtgcgcgttgcccgcgtgacagaacagcgggcgatcctgcagcaggcatttgacgccgatggaggagtggatggacaccgccatctcgaattcctcgccgttgacgtattcgtccgggttcacgctgatggtcaccgaggtgtcggtgcggcgcgtggcctcatattggcgaatcatcaacgtgccggttttcgcggagctcagccagtggacgttacgcacgtcgtcgcccggctcgtattcgcgcaatccgtagaagtcgagatcatcatccacgatctggccggatggttggccttccagatcgcggggcacgccggcattcagggtatcgagacgcacggtacgagggtggatgaatacggtgatgcggtcggccagctccttttcgtgacgcaccagaccgaacgggtctcccttgcggatgcgcaatggaccgatgggtagtattgcgcgcgatacggtacggaactccacatcggtttgcttggattgcccgggagccagcatggggatgttgaatcgttcatgcgcatcgccgattggtagatatccgcgtgccgtggtcgtcgacgttctgccggtgttgtcgatgccgacgataacggatacggtgtctcccacggtcacgcgatgattggatacggcgatggacgcgtggaagcgtgtgttgccgagggaaagcgcgattgccgcgagcatcatcaccatcgccacgatgccgaatacgagcagctcataccagcccagaaacgggaacgcaataaggcatgcgatgcctgcgcccgttaccgcccagcccaagggcgagacgtaggatgcgaagaaccgtctgatacgtcttaccgcgcgcttgaacatgcgttcagcgcgccggcgacggcgtaatgcggcggatgtagatgccatggtcggatacctttccaggccctatcaggaaccgatggtgggggagggaacgtcttcgagcacctgtgcgatcaggctttccggagtcgcgccatcgaaggtggcttccggagtcagcgtgatacggtgtgcgagcacggccactgcaaggtccttgacgtcatccggcaccacgtaggcacggccatcggccgcggcccagatacgggcgcatcgggtcagtgccaaagcgccacgcatggaggagccgaccgtgatcttctcgttgtggcgggtcgcctcgacgagcctgacgatgtattcacgaatcgcatcatccacatagatttcggtggccacctgacgcagccgcatgacatcgtcaccgctcagcaccggggaaatggtctgcgcacggtcggtgatatcgacctgcttgaggatatcgacggacacatcatggcccgggtagccgattgacgtcttgataaggaatcggtccatctgcgcctcaggcagcttataggtaccgagctgctcgatggggttctgggttgcgatcacgataaacggctgcggcacatcatgtgtgacgccgtcaacggtgactttctgctcttccataacctccagaagtgcggactgcgtcttcggcgatgcacggttgatctcatcggccagcacgatggaggcgaaaatcgggccttcgcggaactcaaattctccgcgcttctgatcgtagaaagtcacacccaccacatccgaaggcagcagatcgggcgtgaactgaacacgcttgaaaccggtggaaatggaattggccaagcctcgggccaactgggtcttaccggtgccggggttgtcttcaagcagaatatggccaccgaccatcagtgcggtgacgcattgcttgatagggatggtcttgccgataaccaccttggagacattttcgaccagcgcattgaaggactgctggaaatcccggacctgagccgtgggctggggcagtagtccggaattgatgctggcgggcagtgccgatgcggctgcttgcgcggctttgctcgactgacgctgcggctgtgattgcggctgggattgcgcggtggcctgctgcgggatggctggcgtcgatcccttgcgcggcttgagcacggtgctgtcatcgcccgcaggaatggaggcggcatcagtagtaggagacggcttttctgacggcgcttgtgacggccgctgcggcaggttaggcagcgcaacggactgcggcgccgactcggtgcttggggtcgtgccggtgtgtggtgcggatgccaggtgcgtggcgtcggacaagtgcgtgctgtcggatagctgcgtgctgtcggacagacgggtcgtgtcagacaactgcgtcgcgtcatcgatgttctcgctcatggatgttctcctactgcttgtgaatggtggttgacgatattggggtattgccgaaaccaagaatccaggggttcttggccaaagtggtgacatcggtaccggatttgagcgacttggtcccctccgaggagtcagagggacgtgtgcccgcgacgctgcctccgtccgcagtgttgtcgagaccggagtatcccggcccgccggtgactttgacgctccacgcgtagttgccatcggcggccacggccaagtcggtgacatccaatggctggccggagttccacgtgaacggttggccattgatgatgatttgtacagtggccgacttgccatagacatcaaccgaaccgccggtgacgttaatgacgtgagcgttgtctgaccagcgcagctcctgcggtttgttgattacagccttcttctcataggtgtaaggagcgccattgtgcgggcctccggtgacggcgtcgctggtagcgccgttgaacacctgttgcaccgatgcggtgttgcatttggcccaaggactcattcggaagtcgagtgagttccggttagtagctgtaccggaatcgatgccatcggcagtcacgctgtaggactgcgcatgtccctgcttggtccaatgcacggtgcatgtactgccggatccggtggtgtagacgtcagtgggcggctggaccttgtactgcgggacaaagctgctcttgcccgtgccggaggaagcatcgcgctgcggcaccacggtggccgttacggtgatttcccgggtgttcaaatcgttctcattgatatcgaacgtagcgccactgtcactgcaatcgatggtgtccttgacgtctcctcccaaggaaattcgccggcagccggcattgcggttattgccgagagtgactttcgccgttaccgtggtgtcgtcgttcgacaacgcaatgttcggcgcatccgggtctccccagatcttctctgacggcgatgcggcggactcggcactccaattgattttgttatgggctttgacggtcgccgtaatggcggtgccatcggaaatgtcgttgttgttgaacgtaaacgacagctcggtggccgtattgccggtttccttggtctgcggagcacctgcaccggtgacggtcaccgaatagttgtcgacggcgctgaaatcaccgctcggcgctttccacgtcaccttggcggttttattgccacctgtgaccgtaacatcggtgggagcggacggcaccttgtccggtgtggcttcgacggcggtggacggcttggaccagccgacgtcatttcgcgcggcgacggtgaaggaataggttttgccgttcttcagaccagtgacctggcatgaggtgacggcaccgcaatccttctctccggtgacggcaccggtccaactgaccttgtagttggtgatcgggctgccattggcggcaccgggcgtccatgtgaggctgaccgcgctgtcctgcggttccccggctacgggggagagcagtggaggctcgggcttgtcgatcacggacacggtaatcgatgcggtgacttcacgatccttggacttggtgccgtcttgcacggtgacgagcacggtgttcgtggaagcacctacatcggatgcgacggcgatggtgatgtttccggaggcatcgcatccggcgatggtgagtttggcggcgtcatccgccttgcagctgatgatggtcagcgaggaatcggggaacggattgtacgcgccggtaagcacgttcacggcatcgctggcaccggccttgatcttcaacgtcttgttgccgacgcgtgtcagcggacgggtcgaagacactacgcgcacggtcacaccggcattcacggtgcccgcgccgtatgcgatttgcacgggaatggacgcggtggtgccaggatcggcatccttggtggcggaaacctgcaagctaccggaacgggacaggtttgcggtgatttgcctggatgatgagcttccaccggaatacgtgtattgcttttcgtcgtcatacacgccggacggtgcatgggtgagcgccgtcagatcaacggtcttggggtccgcgcccgcctcgacatcaatagtggaggacgagaacgtgggcggcggcacatcgcggcctatcaccgtgatctggagagtgatcactgcggaattgatgatcttggtcttatccgatccctgcttgccatccacagcggtaaaggtaatggaggcggggcctgcgtagtcttttgccgcagtgaacttcagggtcttgtcgttcacgtagaaatcggagttggaggccttggtggcgctgacggaatcagcgctttcgatatacggttccttgccggcgccgacgcggacatagtcattgatgttgatttcaatggtctcgcgcgaattgaccttcaattccggtgccttgggacgcaacgtgggcggaaagacaccataggccggtacctggatgaacgcggtggaggtgatgttgtatttcgtattggtcaccgtgtaaggcacggctcgcgcctgtgacgtcaggtcgacggtgatggtggtcgaatgctcgccgcccctgacgtgagcgtgagcgctggcggagggatgcacgccgaccttgagctcattggctgtgccggaaggattggcgatccactgggaaacatccacatccacggacttcttatcgatggtggcggcggacggcacgcgatagtcgtaggcggtaggcggctcgatggcggcattcggatccacgtttaccgtgagggtggccgtatcggacaagccggccttgtctttgaccgtgtaggcgatatagtcggtggtggcgctgccgggcgtggtgaaggagagcatattgtctttcacgctcaccccgtcgagaccttggacctcgacatgcttgtcgacggtcagattggtgttgtcgccggagatgtcgttctgcgcgaccggcacggttgcggccgtattgggcctcaacgtgatttcgtcatccctggcgtatacgccggagtcggacgatccttggaatacgcccacgcggatctgcgcctgtgcgcgctgaccggtccaatcctccacggcataggagaaggtgtcggtgccggacgaatccggatacgcttcatagaccaagtagtcggaaccgacttcggatatgcggcccagcgtgggtgccttgttgcccagacccaacagctgatcgtcgtcgccatccgtgtctatgccggtcagtgtgatggggatgcggaccttctgcccggcggcaacctgcgcttcggcgtcatgcggggttggcgcggccttgctcgctgcgtcgctcttatgcacggtaatggtgatattggcggaagccacattacccagattgtcttcaaccgtataggtgatggggaagttgccggtctcgctggatgcttggtagcggaccgtgtctccagagacgaaggccagacccttgaacgtctccttgtcgtattgcaggttgttcttgagcttgaccgtggtgccatccgagtaggccacatggtcaagcacatccacggacacgatgccgccggtgcgcacctgggcattgatattgctggccttgggcactgaattcgaggtggtcagagccggtggctgcaacacgatggtgcccttggcggttccggaggcgttggccacggtgtaggtaagggcgacgggtttcgtgggcacctgacgcgcagtgatatacacgcgcttatggctgacgagaccaaccttgatgccggagtcggccggtgcgctcaccgtggtgacggacagcacgccgcccatcggatcgacgtcattggtgagcggctccacaatggcggtattatccgcgccaagcagggcgacatcgttggcggcaaccggtttggcggcctcgccggtggcgggctgtacctcgacgcgagccaatccggtggccggaatcgagccttgagtaatggtgtagggcacataataggtgccgggattggtggccttgaacgtcaacgacatatccgccgcattggtggtcgtcgaagcgccgttgggcgtatccacctgagtcagctgtgccggctgcaaggaagtgccatgcacgtaagaggacagcttgacgacggtatccgtgttgggaacggtggttttcgctaccgggtcgatgaccgcggccaaggtgttcgcgggcttgaccgagaaatacaccatgccggtgccggtcgccgtgccgtcggagacggtgacctcgacgcccacgcgtcccgacgccagcgcaccggtgttgaacgtaagctggccgtcggctcgggtggacacctgcacctggtcggtgttctgggccacagcggagaccagagtgagcgggtctccatccggatcgttgaagctgctcagcgcattggcggtataactggctccctgctccacatcgatctcgggaggagtgtcgaactgtacgggagcgtggttgcctccatcattcagggttacggtcaccgtggcggaagaggtctggccgcggccatcggaaatatcgtaagtaaaggtaacggtgcctgcggatgtggcggaggcatcgagttgcagataccggccgtcgtaaatcggcgaaatggtgacgtctttgttgtttggtgcgccaaccttggtgattttaagcacggaacaatcggtctgctcgtcattgcgcagcacgtcgagaatctgttccgaaccggctcgtgcgccgatttcatcatcctcggctttgatttggccggattgtgcggaacaggtcttggagaagtcgtggtggttgttggccgagtcgttgttctgctgttctttctcggtctgctcggcctgtattttgttccactgtattttgatgactttggtggaatcctcagggttccacacattgccgttaaccgtgtcgttgagcaccacaaggcgatggttggtgcggaacaccaattcggaagtagtattgacggattcgagggtttgcggcttgacgctggtatccgcgggggagcaggcgcgaatgtagttgctggccttctggctccaagccgagtacacgcagcccttggacgataccggtcgtgccggattcgccttgcccccgttggctatgaaattcgccttggcattggacttcaacgggataagcgtaaggcctctcggtgatgccgcggccacccaatcggactgtacgtcatcggtgggaggctcctgaagggtgagggtgccggtcgtgtcgacatcgacgcggccgcccttgaatatgacggttttgccggttgcgattaccggcgtgctcccgatgacggtaaagctttcaacggtctgctgcttgccgtcggtcagcgattcgagggttttggccttggcgctgctgggattgtcaagacgcagcaccataccgtcggatggacggtatccgtagaccttgccatcgtgggttactacgatgcgcccgccctcgcccagcttcattttcggatcggaagtggtgggggccacggaatcaaggttttccgacaagccggtccacacattgccggtcttctcgttgatcagggctacggtatccccgccgaccacagtggtggtgttggctttgatgtcggtcttgacaccggtgctgaccgtggatgccttgatggtggaggctttggtcgtttcggtcaggatggtgtcgccattatgctgcgcgatgtcgaatcgtggggcggaggaggagacgccggcgtcggcctccttgttctttacgttgaatcgtgcggccttctggttcttcagcgaagtgacccacacggtgccatcgtccagttgcacatggcggcgcgtgacggtgctcatgatcaccgcgccggcaacaagtcccagaagcagcaggagcgtgattacgggaaccgtccacgtatgccctccggagggcataaggcggcgcaaagccgcgctgatgcgtcggcgacgatcgtatgactgggacgatgtggccatctgaactccctgaaccctggtttctctggttgctagtgtaatgacaacgctttacggttccaatacctgccgttcctgttgtccatttggtgaattcgccactgccgggcgcatgcctgatgcgatacgcaatgccaaggtggtatgcccggcagcggcgagcggatcactcttgcggcttggccgcacaggcgatggcggggctgacggacatctggcggttcttgcgcacaatggacacctgaatgcaggtctgcgagccttcctgcgcgttgacggtcaccgtgggatctgacgttgtgacggtttgcgcgctctggtcggtattgctgccctgcactatggcccacgtataggtatcaccgctttgcgggtctggattcgtccaggtgaacgtcacggatgacccatccgccgcataggtgccgttcagattctccggggaaggaatctgggcgttcgcggtatcggtgatcacgtcatcctgattattgcggttgttgtcatcatccttggtgccgggcgtcgccacctgtttggtatctgatccggtggcgctgtccatgcggggaacgaccacgaaggcgaatatcagtgccgctgcggtgattgccgcaagtataccgacggtaatacccaccggtttgacccatcgccgtgacgaacgggtggtctgatctcgctggtccgtggcccggcgccgacgctcgatgtctttggggtaggccggcatcccttccacggtaacgggagtggcatgcccgaaatatgcgaattgcacacgctgcatggcacgtgcgaactccaacgcggagtagtaccgctggtcggggtccttgttcagggcccggcgcagcaccgcttccacatcggccggtacgtcggggcggttgaggcgaggcaatggctggttgacgatcagcgaaatcagttccgattgcgaacgtggatgatattcgtgctggaatggcgagcagccgacgaacatggcgtacagggtggccgccagtgaatagatgtcggcggcttccgaaccattggtcagatgctgaagcacttcaggcggtgcccacggcggcgagaatccggtttcggtacggtcatacacatcggtggagataccgaaatcacccagaacaggcaagccctgcgaggtgatgagaatgttgctgggcttgatgtcgtgatggatgatattgctgcgatgcgcggtgaacagcgcgcttgacagcttgatgccgaggtcgagtacctgctcgcaggtcatggaccgggccttcatgatgctgttgtaggtgccgcccggcgcatattcgatgacaatgtagccatggccatcggaggtgacgccggcaccatataccggcagaatgtacgggtgggatgacagcttggccatgaagttggcctcgcggttgaacagggcagcggcccgtgggtcaagggttttggcgctgacctttaccgccaccgggcgtgcgggcatacgctggttatataggtacaccgtggcggtggcaccgcttcccaacatctggacgaaatcatatccgggcagcttcggcggcctcatcggaatattggccatctgttccctccctccttggaaaatgcgctctccctgcattcgttctacaggataccgtcaagggtacgattcttcgtcgggttcggtaaaatttttccctctgtgacggtcgggtttaggctggagccatgatgacgagacttgaacctggaacagtgctggacggcatcgaccgtgatggagcggcgaggctgattgtcggcacgcctggaagcggcaaaaccgaattcgccttatcggtgttgatggcggggctgcgccgctacggtggcacgcaggcggtgatggccgtatccggccgtgtggccgccgacgcattgggcaatcgggtgattcgtgagctcgggttttccgtgcaggccaggccggtcaccacgctgggtgccgtggcattccgggccatatcagcttcgcgcgagggaactggattgccgtcgcctcgattgttgaacggtgcggaacaggatgctttgctgcgtcaagtcatggccgtgcatctgcgccatgccgtagcgggagatgattgcggcacctgtgatttgctacgcgtctactttgcccaggatgactgggcgaaactcatacgcgatgccggtgccggcgagatgcccggctcggccgcttccgtacaatcaagcctctcgcaacaagggtcggattcgccgtctccgacgtcggcaggcggctcgaccagcgcggataggttcactcgaggtatttcagatgcgtttatcagccagttgcgcgatatgctggcccgattggatgagctcggtgtaggcgttcacgaagagccacgtctcttggacgccgtgacggaggacgcgcgattgtcggtgcaatggcgtttggctttcgcattgcgccgtgaatatattgcagcccaaagcgcggcatatccggggcaataccgtttggatgcctcgtatttgctggtggcaggagctcgtgtggtgcatgaggcattcgccgccgatcacgcggatgattccgaccggcctatgcgtatggaggcgttgggcttgccccggctgctggttgtggatgatgttcaagacaccacgctggccggcatgcgcttcttggaggagttggggaatgccggcgtcaagttggtgctggtcggcaacccggatgaatcggtgcagaccttccgtggatcgtatccggaatatctgatgcgccgtgccgtggaagggtggctgaaagccaaggaagaacagctggttggcggcagtaccggcgctgatcagtcgcacatgacgatggctgatgtgatcgcgtctcgtatttcgctgtcgattccctcgccggaagacgagccgctgcctccggccgagcgtcccggcaagctgaccgccatgctgggcggagtcgatgcagcgaattatcagtcggacggcacggtgaccgccggcctgtaccgatcctcacgtgaggagctggatgatgtggtctggcgcatcaagcgggcgcatctcgaccggcatattcggtggaacgacatggcggtcatcacccacgacaatgccgccgtgcggctgttcggcgaacgactgcgccgagatggcgtgccggtgcggtattcgtcggtcacccgtcctttgaaggacgagactttcgtgcagggattgttcgcgcttgtggagcttgcccgattgcgtgccgagggaatggcggaatgccagatgacgttggcttcctgcgcggcatatataaggactagagtggccacgttgatgaacggcccgttggtgagtgccgggggcagacccggtcaagggcgtcctgcaaggctcgctccgattgaattggccatgagcgcgctggagtcgctggcgcatctcgccacggatgatgccatgctgacctctctgacgacggcatgggagacattgcgtgaaacataccatgaaacacggcgtgaaacaggtcgtgaaacatcctcatcagtggttccgtcgccagtgtctgtcgaaatactcggtgaaccgtccgacgatgacttggcctttggcgttgacgcgctgtacgtgatgcttgccgttgatgatgccgccgcgccggcgcaggctgcgctcgcatccatccatgcggtgcttggcaacgaccctcaggcccgcgcttttgcgaacctgtggcatctggtgggcagcgttgcttccggcttggagcggctgccggcaagccagcgcgtacagccgcgttatgcactgtctgttgcctggaacgccaccggtctggcaccggtctggcagcgtgcggcattattcaacacggcagaggggcgcacggccaatgaccggctggacgcggcaatgcgcctgttccagttcgccgatgattccaccgccagccgagacatcacgtcattcatggcacaggttcggggcatggaagtgcaggccgattccttggcccacatagggccggtggaagacgctgtgacattgaccacgccggcaggcgcggccggacgccactggggatatgcgtggataccggtggtccagcaagacgtgtggccgaacctcgccgggcgcaacaccatgttcggtggtgaagaccttgccgagctcgtgctgaggggagcgcttgaagaaagtgacaaaaccgggcatgatccgcagttcgcggctgtgctgtcgggcgagaagaagggtttcctggtcgcgctgacccgtgcacggcgaatcatgatcagcgcggtatggaacgacagcatgagcccctcggactttcttttcgggtatctgccggaatactatccgcgcaaccggcaacaggcgcctttcaccacagtgggggcgcatacaggatccgccgaatatgatctggccggattggacgccgacccacgtgggttggtcagcgccgcccgcgcggttctggccactgctcaaccgcagcaggctgccgcaaaggacgccgcggttgcgttgacactcctgtcggagcatggtgtgcgcgccgcaaatccgcagagctgggcgttcgtggaatcgccggcccaatcggatagcgcgtcatctggcggtgcgtcatctggcggtgcctcatccgacagtgcctcatccgacagcgcgtcatctggcggtgtacagtctgacggtatccaaacggggaaaggcaagacggatgcgcaggccgcacccatggtcaccctgtctccatcggcggtcgacagcctatgggcatgtccggtgtgctggatgctggagaaccggttcgccggtcctcgccccagctccgtggccaccagcttcggaaccctcatccatgcggttgcacagcaaggcagcgaggaagggctggaccatctttcccacaatgcccagacgttggccatactgggcttggactccacggccggcacggaacgccgcatcgaggctgtcacggcacggcttaatgccatctatcagagcaaacgccccgatccgaatgccatagccgacacccggaaccgctatgaggccacccgtaaggacgagtccgcggcagatgccctgcgcaacatcgccgattactttgtgcgcagcgacgccgatccggaaacgtatcttggcaagaactccagcaacttcagcattggcgcattggccggtgccgaatgcgaacgggagtttgccgcacgattcgatgtgcgtgacatactcgacgcatacaatgccgtgcccggcatgcacccgatcgatcggaacatgctggtccgtctgatgggagcactggtcggagggtggccggaaggcatggacgagcatctgaccgtgagactgtccgggcgcatcgaccgtatggaaacccgcgtactcgcagacggcggcgaatgcattcgcctcattgactacaaaacaggcagaacgcccacggtcaaacagattttcaatgatctgcagctcgtgtgctatcagcttggcctcgtgttccccgaagacgggccgcgcggtgccaaggcacttgccgcaatgccgcatatcagccaaagcgcgctgttccatgtcgggcagaatgcggcaccagccagaagctacgccccggaaggtgccttccagccgccgctgttcactgatggttcgttgaatgccgaaccgttcacgccacgatactggtataaagaccccaaccgtttcttcgacatacccgccatagatccggctactcctcccgaaggtgtgagtgccgaagcgtgggcgcaattcgccgcgctcgccggtacgcagacgttatggtcgctgaccatgatcgcccgcgtattctatgccgcggcggccagcaggtcggccatcatcgaggcccatccgcaagacacccatatcggattctgccgtatgaagaacgtctgccctgcctgtgcgggccagatcgacacgattttcgaaacgaggcaagcatgagcacgttcactcccagtgcggaacaggccgccatcatcgatgcgccagtcgatgctgacgtactggtggttgccggtgccggttccggcaaaacctttacgatgacccaacgcatcatcgcgcttatcaatcgaggtgtggcacctgaacgcatccttggcctgaccttcacacgcaaggccgcaggcgaactgctggaacgcgtctccgccgcagtggccggtgatatggcgggctctacgaccgccacggtgtctgatcgggcattcctcaagccggccattttcacgtatgacgccttcttccagaccatcgtgcgccaatatggactgcttgtcggattcgatcagaacacgcaaccattgagcgcagccggagcgcttcaactggccaccgaagtcatcgacagtcacatggatctggcgttcagtgaggattttggcgccttctccagtttggcgaaccgtgttctggcgttgtcggatgccattggcagtgccatgatcggtgccggctgcaccagcttcgatgatgcgatcaatcaagtacggcaatgggattcggcattcatcaatcgattgcagcaagccgtcgcagacgaacccatgcccgaggacgagccgaaaatccccaagatcaaacgactgaagaaagataccgacgccagctggcaagccaagctcgatgaccgtgccgaacatttgcatgcccgctgcgcctatcattgcggtgcgctgctggagaccacacgcaaacgcgatattctgctccagctggtggaggcctatgcccaagccaagcgggaacgcaatatggccgaattctccgacttcaccattgccgcgtatcagcttatcgagcgcttcccctccatcggagagcgcacgcgccgcaggtacagccatgtgctgctcgacgaatatcaggacacctccaccacgcaggccgctctgctggcagcactgttccatgtggatgcgtcacggaggtccgccgtcaacgcggtgggtgatccgttccagtcgatttacgcatggcgtggtgccagccctggtgcattccgtatgttccagcaagatttccacctgcctgccggatacaagccattcccgttgtccgtcaccaggcgcaacagccgtatagtgctcgaagccgccaataatctcacgctgccgttgcgctccaatccgtcgcgtccctccagctcattgatgcgtgaggtcgatgtctcatcgctcgaccccatgcctgatgcccccgaaggaacattgggagtactgggcttcgccacggccgggcaggagatcgacgccgtagtgcgtttctgcaagacggccatcgcacggcaccgttccgcagccgaacaacaggaacagatgacgggcgaacagaaagcgccggtcgccgtgctgtttcggtccaaatcacatatgcccgaatatcaggcggcattggaacaggccggattgaccacattcgtggtcggctattccgcgctgctggaacgtccggaaatccgcgatctgatggcgttgctgcacgtggccgccgaccacaccgatacgggatcgctgatgcgcttgctggccacgccacgattcaccatgtccgcagcggatttgaccatgttggcccgttttgctgaagaacagaacatggaacaacgcttccaagcattggtgcaggccggccttgcccaaccggatacaccagcgaatgaatgggcggctgtggtgcgtgagtaccgcgatcaggtggccaatgcggtattcctgccagacgtattgctacgcggcgacctggtaaaactgcttgaacggttgagcgcacacgggcgcaacgccataacccgggccgcggtgatgctccgtcaggtgcatgatgccgtcgggcggccactgggcgacgtgattcgcgccggcatagaagcgttggatcttgacatcgacaccgtattggccggtgtgctgcataatccgcagcaccgcgccaatcccgctttggcgcatatgcctatggatgcgattgtggatttggtggatacgtacacgcaagagattgccgctgagcaaactccctcgttgcatgggttcatcacatgggtggatcatctggcttcggtggaggatgaagccgccagtctccccgacgctccggtggatgtggaactgatgaccgtacaccagtccaaagggttggaatgggatgccgttgcggtagtggggcttaccgccggcggattccccagcaatcagggcgaccatctcaagatcgtgctggacgaacaccatacgggaggcaccgagcaaggtcactggaccgcacccgaatatcatgagaccgccgactcctggctcaccaaccccaccgccgtgcccgtgcctatgcgcgccgatgccggcattttgccgcgattcccccatgatgccgatgtggaagccgaccccatcgcatcgttggcggctttggatgatgtggagcttatcgatgatgaagtgttcggctccatgcgcgaattcggcgatggcgtggaagaagtggatgcatccggctggtatttgacgcaggcggaggaatatgggcgtcggctgcatgccgacgaacgtcgattgatgtatgtggcgcttacccgtgcgcgggaagatgccctgatgacctattgcgcctatacgggcgaatccgggcgggacccgtcagtggtgcccaaaggctctcgcgccgctcagccatccaatttctggcttgaagtgcatgacgcgctccaagcccgtgaacatgcgatatcggctcaggactgtgtggaacggctgcaagccgccaatgccgggaagcccatgttgatctcggcgcaaggcgaagcgattgcccctcccgaagggttctttatcggagagcatgccgcggcatacagtgacgccgtggtgggggaggcgtggcaaacgccgattacgcagacgaatgccgccgccgaattgccgtggccggctaccctcagcgacgcggtgcatgaacagctgtcacgcggcatcgatgtcatcgccgcagattcctcgtcacttgagcagcaccaagacgccggcccactcctgcaacgggcacaattgctggtggacgacgccgatttgatggccgatgccgccagcggccagtcgcttgatgaggcagtcaaagccaaggcgcaacgcgttctggctgcaggacgccagaacgtgacaagcctgcaagcccgcgtaggtggcatgaacgaacgggaggagcgcctctactggcgtagcattatccgcccgattccgcgcatatcgtctccggcggccgaggccggcacgcagttccatgcgtgggccgagcaattcatcaatgccggtaagccggatgaagcggtactggcatatgaagccgaaccaagcatgccgcatacaggtcaggatgcgggattcgtttcccgggaagccatgttggccgatttggccgaacgggagcggcaatgccgcaagccatccacacggcagcccgctgtcccacagcccacggctcaacaatccgtatccgccgtatccgccgtatccgccacttccataagcagcgacaatgccaccgagtccaagctggtggcgtggcagcgcagactggccgaatcatcgtgggccaagcgcatcccggcgtggacggagcgtgccatcgtcgtggacgtgccgggcgtgggcctggtcaatggcaaactcgatgcggtattcatcggtggacttgacccgtccagcaccaccgcacgctttaccgtggtcgactggaaaaccggtcgtcggcccaccaagccagacgacatcacccgcaaacttgcccagctcgacatgtaccgactgctgctggcagcggtcgaaggtgtggaattggacagtatcgacgccactctctactatgtcagtgagcccgacgagggcttgcgcgagcttcacgcccgcgcgaaaaccaaacaggaaatccttaccgagttgagctccggcattcccgaacaatctgacaacgactgagcccaaaggctcatgacctgtacagcatcggacggccttcaccggtggagagaccttatgcatcgcaaggcatctccgacgatgaagacgactggccacgtaccggtccgcggttgaaacgcaccgcgtgacgttgctcgggaaccgctaccctcggatggcacgtgtgggcgggcgcacgtgccggacaacgcaccagtaaggagttattgtgtccacgactcgcgcggtttcgaagtcgtccgctgcccactcgccctaccagcgcctgttcatgctgcccggagccaaggcgttctgcctgtccggcgcggtggcacgattgccgatctccatgatgagtctcggcatcgttctggcgctcaaccatctctacgacaattggaccatcgccggcaccatgagcgccgcctatgtgctggccatgagctgcgtcaccccgttctacgcccgcgccttcgaccgtttcggccaagcccgcgtgggccggcttgcgctcgccgtgcagatcgtggccatgctcgccttcgccttcgcggcgttggtgcgcgtgccgattccgctgctgttcgtcctggccatcatcatgggtctgacgcagttctcattcggcgcattggtccgaacacgctggtcctatgcgttgcgcggtgtggaagatggtgaacagctgctcaacacggcctacgccatggaagccgccattgacgagatcgtctttattctggggccgattctggcggcttggctggccacctccgtgcatccggtatcccaactgttcgtgcccaccgtggcatgcggtatcggcggcaccatattcttctcgctgaaatccacccagccaccggttatcgtggaacaggtcaccgtggccgcgcacgatgacggcagccctgctgcaagcgaagatgccgaccagctgaccctgcgccagctcaaacgcagcggcgccaagcccaagagcgtattgctctatgccggcgtactgccgttgctcgctgtgttcatcgtgttcaatatgagcttcacgtccttcgacgtgtccatcaccgccaccatgaaatccatgggacttgagcccttcctcggtctgcaattggcgatgttcgcggtcggctcgtgcatcggcgcgctggtgttcggctcttgccgactcaaaggctcccattgggcgcatatggtgatgttcctatcgctgctgaccgtcggctacgtgttcttccggctgtcaatggacaatctcatcctgctgggcgtcttcgaaatcctcgccggcctgaccgtctcgccgacgttcgccaccggcaacctcatcgtcaaggatctggtgccggcggaatccctgaccgaaggactgagctgggtaaccaccgcaggcacggtcggcacatcgatcggctcgtccgtggccggtattgtgcttgacgcctccaaccctcatgtgggcatgatgctgccattcatcttcacgctggcgtccgtgccattggcattggccggatgggccttggccaagcggcgtgggtgaaacggaatcgggctacgaccgatggatggttggcggcttcgccggggtctctccctcagtccgcttcacgtccagctcgaacgcaattaaatgatggctttcagccaactgaattattgctcactgtcgttcgccctcacctaaaaacgcctccggcgttttcttcacggttcggctcatcagagggagctcgacttcacggttcggctcgtcagagggagcttgattctgtggacgggatattggcgtgagggtttggcggtgataggctgattgccgattggaaaacgtcccgggtacattgccgggcaggtacgggtagacagggaagaagacatgatcaaggtttcggtggtcggagcaaagggccgcatgggctcgcacgtggtcgaagcggtgaacaaggccgaggatacgcagctggcgctcgcattggatgccggcgacgacctgacccaggtcaccaccgacaacaccgatgtggtcgtcgaattcaccgtgccgtccgtcagcctgaacaacgtgctgaccctgatcggccaaggcgtggacgtggtggtcggcaccaccggctggaccgacgagaaactcacccaggtcaaatccgccatcgccaacggcccgaagcccgaaacccagaaggtcttcatcgcacctaatttcgcgatctccgccgtactggccgactactttgcaaccaaggccgcgaaatacttcgaatccgccgaagtcatcgaactgcaccaccccaccaaggtggacgccccctccggcaccgccattcacaccgcccacggcatcgccgaagcgcgcaaggccgcaggactcgcccccgtgccggacgccaccgaaaccgatggcggctcacgcggccaggtggtcgacggcatccacgtgcacgccgtgcgtctgcgcggcctcaacgcccacgaggaagtgctcttcggcaacgccggcgagcagctgaccattcgggccgacagcttcgaccgcaccagcttcatgcccggcgtcctgcttgccgtgcgcaagctcgccggcgacgctccggccggcctgactatcggcctcgaccacttcctcgacctgtaatcgacccgcagtcgaccagtagtcgcccccgcatttcaggcagggaagcgcgccgggacgcgcatcacggcattgccaccggctccggccataatgccacgcattcagcaacaatcaaggtacgtagtataagagtccacaatgggaagtacggtgaacactatgagcgagcatgacatgcaccttcttgagccagcacctttcggccgcattctgccggctatggtcaccccgatgaaatccgacggcagcgtcgatttcgccgccgcgcagaagctcgccaaatacctcgtcgccgatggcgcggatggtctggtggtcaatggcaccaccggtgaatcgcccgtcacccatatggatgagaaggtcgagctggtcagggccgtcaaggaggtcgtcgacgttccggtgatttccggcgccggctccaacgacaccgcacacaccgtgcgtatggtcgaacagactcaggaagcgggcgccgacgcggtgctcgtcgtcatgccttactattcccgcccctcgcaggacggtatcgtcggccactacaaggccgtcgacgaatccgccgaaaagccgatcatcgtctacgatgttcccggccgtaccggcttgaaggtcaaggtcgaaacctacgaccgactggccgaacttgaacacgtcaaggctgtcaaggacgccaccggcgatcttgcagccgcagtggagaagcagcagcgcaccggcctcgcctggtattccggcgatgacggcctgttcctgccgttcctctccatcggcgccgtcggcatcatttcggtgattgcccacgtcgcctccaaccccatgcagcagcttgtccaggcattcgatcgcggcgatatcaccaccgcccgtcgcctcgccaaccagctcgcccctcttgtccacgcgttgaatggcgacggctatcaggccgtcatggccaaggctgcgctcaaggtcaagggcgttatcccctccaccaccatgcgtctgccgaacatcggtcccgacgccactcagcttgacaaggctgaagagggcatgcgcgctgccggactgctgtaagcccgaaacgctgcatacgggttgccagcccgccgcccctgcatgacagagcagaggcaccacaacagaaatcccaaaaaggttatggcacaagaacaaaagaaaacaagcaagaacacgaattctcgccgtcgcggttccgcgcgcggccgcaacgccaacggatccaacagccgtacgccgtcccgtaagatcaacgccacccggcaggccaccgcaccccagcaggatgccgtgctgatcgccccgccgaagtaccgcaagggctccatgcgcatcacgccgctcggcggcttgggcgaaatcggccgcaacatgaacgtgatcgaatacaacggtcacctgctgctcatcgactgcggcgtgctcttccccgaggaggagcagccgggcgtggatctcatcctgcccgatttcagctacatcaagaaccgtctcgacaaggtcgacgccctggtgctcacccacggccacgaggaccacatcggcggcgtgccctacctgctcaagctgcgtccggacatcccgctgatcggctccaagctgaccctcgccttcgtggacgccaagtgcaaggaacaccaccagaaccccaccaaggttgaggttgccggccgtgagaagctcaaggtgggccccttcgacctcgaattcgtcaacgtcacccactccatcccggacgccctggccgtctacgtcaagaccccggccggctccctgatcgacacgggcgatatcaagctcgaccagctgccgctcgaccaccgcatcaccgacctcgtcgaattcggcaagatcggcgaaaagggcgtggacctgctgatgatggactccaccaacgccgaggtgcccggcttcgtcaagcccgagacctccatcggcccggcccttgaccaagcgttcgcccaggccacccgcaagatcatcgtcgccagcttctcctcccacgtgcaccgtgtgcagcaggtggtggacgccgcccacaagtacggccgcaaggtcgtgttcgtcggccgttcgatggtgcgcaacatgtccatcgccgccgacctcggctacctgcacatccccgaaggcaccgtcgtggacctgaagcaggccaacgacattcaggacgacaagctcgtcttcatgtgcaccggttcccagggcgaaccgatggccgcactcggccgcatcgccgacggcaaccaccgcgacatccacatcaacgagttcgacaccgtgattctcgccagctccctgattccgggcaatgagcacggcgtctacaaggtgatcaacaagctcgtgcagctcggcgccaaggtcgtcaaccgcgacaacgccgccgtgcatgtgtccggccactgcaacgagggcgagctgctgtacatgtacaacatcgtcaagcccaagtgcgccatgccgatccacggcgagaaccgtcacctggtggccaacggcctgatcgccgtcaagaccggcgtggacccgcagaacgtggtcttggccgaagacggcgacgtggtcgacctgtatcacggcaaggccgcggtcgtcggctccgtgccgtgcggttacgtgtacgtcgatggcgattccgtcggcgagctgaccgatgacgagctggaaaagcgccgcattctcggcaccgagggcttcgtatccgcgttcgtggtggtcgacaccgacaaccacgaggtcgtcaccggcccgaagatctacctgaacgccgtggccgaggacgaaagcgagttcgacaaggtgcgtcaccagatcgtcgaacagctcaacgaccagatgatgcagggcacgcgtgacacctacaagctgcagcagaccatgcgccgcacgctcggcagctgggttgcgcgccagctgcaccgcaagccgatgatcgtgcccgtcgtggccgacatcgcccaggacgtcgaaaccgtagaaaccaagtagtccggattatccagggacgaccgtaaggagtaattgaagtcatgcccggttctaatctcactcgtattgaagccgaagaacgtaaggccgttatcgaagcgccgattcactatcacgtcgaccttgacctgacggtcggcgcgaagaacttcggttccaagtcgctcatctgcttcaacgcgaagcctggttcgtcgaccttcctcgacctgattgccgacgaagtgacatccatcgacctcaacggcaagtccctggacccagccgtggccttccagaacaaccgcatcgaactgaccgacctcaaggagaagaacgaggtcaccgtcgaagccaagtgccgttactccaacaccggcgagggcctgcaccgctcggtcgacccgtccgatggcaacatctacctgtactcccagttcgaggtgccggacgcgcgccgcgtctacgccgtgttcgaccagcctgacctgaaggccaccttcgatttcaaggtgctcgctcccgccagctggatcgtcacctccaacatgccggttgccaccatcgaggacgatccgcgcgaaaccctcgacggcaccctcggcgacaagccgaacgaaagcacccgtctgtgggacttcgagccgaccccggtgatgagctcctacctgaccgccatctgcgccggcccgtacgccgaatggcacaccgaatacctgaacgaagacggtcgcaccgtgccgatggcccagtactgccgacagtcgttggccaaggccttcgcgaaggacgtcgactacctgttcgacatcaccaagaagggcttcgcgttctacgccaagacctggggcgtgccctacccgtacgccaagttcgaccagatctacgttcccgaatacaacgcgggcgctatggagaacatcggcatggtcaccatccgtgactcctacgtgttcgagtccaaggtgaccgacgcgctggccgagcgccgcgtggtgaccgtgctgcacgagctggcccacatgtggttcggcgactatgtgaccatgaggtggtggaacgacctgtggctcaacgagtccttcgccgaattcacctccacgctggccactgccgaagccaccgaatggcatgacgcctgggccaccttctgctccggtgagaagagctgggcgttgcgccaggatcagctgcccaccacgcacccgatcgtcgccccgatcaacgacctcaacgacacctacgtcaacttcgacggcatcacctacgccaagggcgcctccgtgctgaagcagctggcattctacgtgggccgcacgcagttcttcgaaggtatccacaactacctgaaccgccacgcctactccaacgccaccctggccgacctgctgagcgaactggagaagacctccggccgcgatctcaaggcctggagcgccaagtggctggaggaatccggcatcaacacgatcgccaccggcctgaccgtaaacgcggacggcaccatcgccgaattgaagctcacccagagcgcgccggccgaacacccggtgctgcgtccgcatcgcctggccgtcggcttctacaacgaagacgccgaaaccggcaagatcgtgcgcaccgagcagttcgaactcgacgtggatggcgaaaccaccatcgtcgaggccgcggcaggcaagccgcgcccggcattcgtgctggtcaacgacgatgacctgacctacaccaagattcgtttcgacgccgaatcccaggcattcgctgaagccaacctgcatcgtttcgacgatgccctggcccgcgccgtgacctggctcgccttctgggatatgacccgtgacggcgaattcccggccgaacgcttcgtggacatgaccctgcgtcttctggccacggaaaccgaatccaccaccttccgttacgcgctggcctgcatgagcaccaccgcccaccactacgtggcgccagcccgccgcgacgatgtgctgcgccacgtggccgccgagctgtggaccctggccaacgccgccgaagccggctcggacacccagttccagctcgccaccgcctacctgggctatggcgaggagggcgatgccgcattcgccgccaacgcacacggtctgctggacggcaccgtgcgtcttgaaggcctcgaaatcgacaacaacttcacgtggaccatcgtccaagcgctcacctccgtcaacgagatgaccaacgacgacgtggacgcgcagctcgccaagaaggagaccacggaaaaccgcgagttcgcctacggcgcccgcgcctccatggccacggcgcaagccaaggaatgggcttgggatcaggcactccacaacgacgagctgaccaactcccagctcgaggccgtggcccgtggcttctccgccaccccgcgccccgacctggccgagccgttcgccgccaagtacttcgagactgtggactgggtctgggccaacaagacctatcacatggccgaggctttgctcaacggcctgtacccgggttacgccgatcccgccacgctggtcaagctcggtgacgcctggctggacgagcacattgccgccgacaacgccctgaagcgtctgatcgtcgaaaacgtggcatcctcccaccgcaccctcaaggttcgcgaatacaacgaagcgctctgatttccttctggctcccctcgggtgcgaggggagttgtcgcctcaggcgactgagggaatcgcttccgcgaggagctacgtccacattccaacataaaacccgcaaccaatcctcaacagcgtattctcgctcaaggccggcaatgtgccggtcgatgagcgacaaggatacggggaatgattgcgggcttttccataacttcattactactgattctgttggccggaatcggcgcaggattcgtgggctatgcggtaggcgcatcgtcactggtctcatacccggccttgctcgcgttcggcattccgcctgtattggcaaacgcttctaacaccgttggcgtggtcggcacgggcatcggtggcgtgatgggcgcgcgcaaagaactcaaaggccaagcggtacgctccattacgtatgtggtcattggcgcgttcggcggggtggccggtgcgtttctgttgctcaaactcgacccgagtgtctttgaattcgccgcaccagtgctgattttgctgagctcgctgatcatcgccatcaatccgcgcggccgcatgcaggccaagcaggccgccgcggatgccaccgcgcaactcaagcacatcgaagccactgaagccaccgatgccactgatgccgccaagcgcgcaaccacccctaccgcacctcaccgcccgccggaacaactcgtgcagcccatgagccaggattcctggtgggtatggctgggcgtggtggcagtcgccatctactccggctacttcggcgcgggcgccggcaccctggctctcgccatgcttgatgccgccaaaatcggcccattccacaagatcaatgcattgaaaaccctgatcggcacaggcgcgaacatcagcgcctcagtggtattcatcatccaaggcgcggtcgattggccggccgccatcatgctgtgcatcggctgcttcatcggcgggtacatcgccccgcccatcacccgcaagattcccgcaaacatcatgcgcgccgccgccgtaatcgccggcatcattctcaccatcgatctggggctcaaaacctattgattcgtgccttacactgatgcagtgaagcatacagcatggccgccaaccgcagcgtggccgcagaccccgataaggtggccaatgtctggcatttggcgactgcggaacctgagcgcctagaaaccaacgcggtaggcaaagaggtgagtgacttcctcgatccgccagacacgtcgcagattcacggcgttgcgtgccatgctgattggtggttcgcggcgcgagcaggtgctgttcgccggcgttatgaaggagctactcgcgcccatcaacaatccgcgatatgtcatcatcggcaaggaatggggcgtgcgcacgtacggtgtaagcttcccatgcccgtccatatttgcccgccgccagcaggacgccgaaatactgcgccggcagttggaccgctgcctgacgcattgcaccatggtatacacccgcactgaggaaggccggcgtacgctacttcgttgccaaacgcgttctttcctcaaccgtgacgaacaactgccgcgcatactgaccacaacatcggagtgatagatcgttgcatgcatagccgagaccactccggtagaggagatgccgttgggcatgttcaccgcatggctcagcgtgttcctcgccgtcgtgttgtatacgatcacgtttgccggcccattcgtgctggtacgccgtcttcgttcccgcgccagagcccatcgacctgcccggcatgcccgttaaccgatacttctcattgttcgtctatcgagcaaggtggcacgtacgctacttggtataggggagagtttctcgctgtctgtggtggaaaatccgagttttattatctgagtcagtgctttgggtttgcgttttgggctcgatttactattggacggcgatatccggggcgggcggctagctgttggggttcttgtcgcggctgtagatgtgtgttcggtctatcggtgatgcttgtcctgttcgtggaccgggcgaagtgcgggacgacgcgcggatttcgcggtttttcgtctgccgtcccgcagagagcccgggggatgattatggtccgtaacggggattggcgtgattgcgcggttctggcggttgatagtgtggaacgccacgaacgtcaaacgattgatttctctaccatcccacgttcctgcgggacgccgcgcggaaaccggccaaatccgcgtgccgtcccacaggcatgaggctgtattcggccggccactgtccatggcggacggacgaacagaccccactggccatcgtctgcgcttctgcagcgctcaccccggccttccacggaaatcatgacagcatgaaggtgacgaatggcctggcttgcctgtggacgccgatcaatgtgtgcgacaatgattcgcggtacatggcccctggccggggtggtcacggcatcattggtgatgagattgttggttgaggcgcgctcggtgtcaagacaactcaccaggaatttcgatacgagcctcgaccggttgggcagaatatccggtgcgcccacaatgcctacgctggagccgatgggaataccttcaagttcgttgtcgtctacggtgataactcggtattcgtctgaggggatgagcagacgtgcgctggtggtgttgattaccggatgcagcacaccgttgacgctgatgaatcgagatgcggtgtctttgcccacaatgagtttgttattgctccagtctgaaggcaggccagggctgatgatgccatagaacacactgatcagaaccatgatggcggtcaggccgatactgaccatcaccggcgtcaggcctttcttaggagtcagctccttgccatccggcataccggaagtgaaggcagtaatgagcctggcccgcgaatagttttgtgcgtcctgcaggtccttcttattcgccatggcccctcctcacaatcccaatgccacgtaagcgagcggcagggtggccaccacacagattacgttcgaggcgtcagccagacgggtcatggcgatggaatcgtgcttggacagctgtgtgccgatgacgcacagcaacgctcccagtgagaacaagcccaccaccaccgaagcccacgtggggtgaaacaccgtgcatgcggcacaagacaggcagatgccggcacctgcggtgataacggtgatcagcatttccgattgtgcatagatgcgcctggaatcaagcagcatggctgcgaacagaaccaaggtaagtgccacgcctgctgggcttgcactggaaacagccagaggcgtgccgaacacgatcagtgcgctggtggcagcgcgcaggtcgaacagcagcgtggagccgatacggtacttattacgcacttcgctgatatcgatgttcttgggcagcgcgaaaatctccgattcgctggtggggctgtccacagacaatcgtgcggaagacaggctgagccacggcagcgcattggcagccagaccgagcagagccactgccacgatccatacgcgagtggaccagtgcggcatcgttacacacacaatgccgagaatcaccagtgctgcgccgataatgacaggaatcaacgcgtacagtctgttcactgtaagcagcaaacatgaaatgccgccggccagcagtaaaccagcaccgataccaacggccgggaacccgtagaacgagggattgaacagtgaacccatgagatgatatccggtcacgccggccaaaagcgaggcgactagcgacagtgccagtgcctgccgatgcatatggcgcgaagccagtaccgtggcaatcgccagtaaagcggctgcggtaatgcccgctacgccagcattgatgatggatagtggggccaatgccagacaaatcgctccgacacccagtagcacacaactgaccaccattgtggtcactgtggtattggcactggtccacggtcgatgagaacgctccaccgaatcggccaccgcctcaaccacatcgtcgtagacgatatcctgatcgcccaaggcgttgacctcgagtttgagacgttcaccgtctcggatggcctgatcggccagcgaagcgggattattgatggcggtttcgtcgtcacgggtcagtcggtagccggcatacaccagagtcggatcgaacacacctagtttcttggcgatatcaggcagcagttcagctaccggaagtgtcgacggaacattgagtttcgcggagcgtttgccatacaccacagtgatggccacgcgcggggatgatgcggaaggcgagggctgattggctggcactcccatcgcaatcgaaggtacgggcgttggcgccggaacgtgtggtgctatgcgcggcggtgccggcatcatggacggtccggcgggcgtgtggcgatgcgacgatgccatagggtgcttcctcttctcaataaactcccaaaggtctactgtattcttgtattctctcacacattgcgggtatcgggaatgccattgtctggtcctagagcagattccgtggcgttttttgccgagtcgggtcctagggtggagcacaacgactacgatggtgcgggtaacgcgatacaaggagtggaacttcatatgccgaagatgtttggaaccgatggtgttcgaggactggccaatagggatttgaccgcacgtctggcgttggatttgggcgatgccgccgtgcgtgtgctcggcgacgccggcacccaagacgatcagcctgagggacgccgccgcgcgctcgtgggccgtgacacccgtgtgtccggtgattttctggcttccgccctgtccgcgggcatggccgccggcggcttcgacgtgatcgatgccggcatcatccccactcctggcgtggcctacctgacctccgtgctcaacgtcgaaatgggtgccgtgatctccgcctcccacaacccgatgcccgacaacggcatcaagttcttcgcacgcggcggcttcaagctgcccgaccagaaggaagacgacatcgaggccgtgctcggccaggactgggaccgcccgaccggtgccggcgtgggccgcgtgagccacgaccagacccccgccaccaacctgtacatcgatcatctggtggccaccatcgctccgctgaacgatgacaaaacccagcccaagccgctcaagggactgaagatcgtggccgactgcgccaacggcgccacctccgtggtggctcccgaagccctgcgccgtgccggtgcggatgtaatcgtgatcaacgcctcgccggacggctacaacatcaacaagaacgctggttccacccaccccgagcagctgcaggccatggtcaaggccaccgatgccgtgatgggcgtggccttcgacggcgacgccgaccgttgcctcgccgtggacgaagacggcaacatgatcaacggcgaccagatcatgggcattctggcccgtgccaagcagcgcgaaggcaagctcaaccacgacaccctcgtggtcaccgtgatgagcaacctcggtctgaagctcgccctgaaagacatgggcatcaagaccgtggaaaccgccgtgggcgatcgttacgtgcttgaggaaatgctcaagggcgattactcgcttggcggcgagcagtccggccacgtgatcaaccgcgaattcgccaccaccggcgacggcaccctgaccgcactgaccctgtgcaacgaggtcgtcaagtccggcaagagcctgaaggagctcgccgccgacttcccgcagctgccgcagaccctcatcaacgtgccgaacgtggacaagaaagccgccgccaccaacaagcgcatccaggatgccgtggcccgcgaggaggaactgctgggagacaccggccgtgtgctgctgcgcccctccggcaccgaaccgctcgtacgcgtgatggccgaagccgccacccaggcctacgccgacgaagtctgcacccgcctcgccaagatcgtcgccgaagaactcgcgctgtagcacccttccctaaggaaaagcaatgtttggaaagaacgccaaagtcgacctcgaactcaaccgtgatgtcgaacaactcatcaaaaccggcggcaaggagaagctcctgcccatcgtgcaggccggcgaaccggtgttgcgccaacggacggtggcctaccatggccagctttccaagcgtacgctcgccaaactcatcgatacgatgcacaccaccatgctggaggcgcccggcgtggggctcgccgccacccagatcggcttggggctcgcgctcgccgtggtcgaagaccacgtgcgcgacgacgaggatgatccgcgcgaaatcgcggaattccccttccacgtgatcatcaatccgagctacaaacccaccagcgacaaaaccgcctcgttctacgaaggctgcctgagcttcgacggataccaggccgtgcgcaagcgttggctcgacatcaccgccgaatgggatgatgaagacggcaagcaccacagcgagccgttgcacggctggcccgcacgcatcttccagcacgagaccgatcatttgagcggcgaactgtatatcgatcgcgccgaaatccgttcgctgaccaccaccgaaaacctcgaggattattggtgcgacgacccggtacccaccgaggccgccgaagaactcggcttcgcactatgatcgaccgcacatggctggacgccgccaagggagacattccccaatgggcggcgtccatgcccaaagacgccgacggcaccaccattgactgggactgggtgcgttcgctggacctgatgcatggcatcagcgtattgctggcgcttgctgcagatggtgagcaatatggcgaaaccgcagcacagcctcagctcgggttggaccaaccggaactgacgccacaagctatccacgacgcattgaaggtcgattacgccacacgcgagcatctggaatcaatcatcgcccaatgcaacagcacattcatgaccgattacaatcgattcatcggctcctatcgtctgcctcgcgcgctcgcctacgccaatcgtcggctcaacgacaacatcaacacgctgttgcatctgggcgaacagcaacacctatgggtggtcagtcgcgaacggcgggggaggactaccgttgccgtgctcaggccgtactccggcagccgcccatcgaacgatgaccaaggcatgctgaatctgagcggtgaaaccggtgacgcatctgccggaaacactgctgccgaaagcagcgatgtcaagttccccacaacagtcgccttggacgatatccaagaccgtacggcggcgattcttgacgcacgcgccgaacgacgtaaggcccagcgcttccagaagcgtgcgggcgatgcggcgatggcccgcgccaatctctccggcgcgacttcgccgggtggtgccgcctcgtctggcaacgctaccggccaccatcccaagcccgactggcgcgacgcctatctgcccggccgcgacgtggacgcggtgatgggcatcgacatcgaaaccaccggcatcgatccggcgcgtgactacatcatcgacgtcggcttcgagttcatgaacatggccagtccgcgcccggccggcgaacctgagacatacgcctatgagcagggctattacgccgccggcgacgcctacggccagtcccgtctcgcttttggcgtgccgccggaaaacgcggcgctcggcaacgccctcatcgccaaactcaccggcatcgatgtacgcggccgcagcagcgaggccgggtaccgactcttcgacgaatggccccaagcccaggccggcctgctcgcgcggcttacccagcagccgtacgtggcgcataacgccaccttcgaacatagctggttcatgctgaacgtcgccggatacgcggaaagctaccgtgccgggcgcatcaccatcatcgataccctgccgatgagccggcagtgggaccccggcgcggtacccaccaacgagcatccttacggagacaacatgctcgacgcctacgccaaacgtcagggcgcgcttgattccgcccacaacgaacgccacttgggccttgaggattcgcacatcatgctggtggccatgaaacaccatctggcggcgctgaaagcgcaaaggaaagggccgtgggggcccgccggcagggctggcgtcggcggcaagtcctgcggtcgtaagcggtgagtacactattggtctcgtgagtaactatcaggacggccgacagcagcgtgagaaccgccgccgcaccatcgtgcgtgtggtgtgtgtcgtcatagctgtggccatgctcggctccctgatcatcccggcgatttacgcggggctttgacgttgccttcgcatattcgtgcccgcagttgaacacgtctgatgcgagggatttgtgaggtcgcccggccggctatcggcaaggcaggcccggaaccttctggcagcatggattgcaggcggatgcgtgtgtggcgcggcaatgcccgccaacgccagaggaatgtgcgaaggctgtcaacaaggacgtgacttcccaaagaatctcaaagaatcaacagtaaggtaaaccacgatggcagaatttgactttacccaggcgatcggcgaagcccgcgccaaatacgaatccatcgccaaggcgctggacgtcgaccggctcaaggccgatatcaaggatctcgaaacgcaggccgcggccccgggcctgtgggatgatccggaaaacgcccagaagatcaccagccggctgtccgccgcggaatcgcagctgaagcgtctgaactccgcctcccagcgcatcgacgatgtggaaacgctcgttgaactcggccacgaggagggcgaccaggactctctggacgaggcgcaaagcgaaatcggcgagattcagaaggatctcgaccagatggagatccagaccctgctcgatggcgaatacgacgaacgttccgccgtggtgaccatccgctccggtgccggcggcgtcgacgcggccgacttcgcgcagatgctgttgcgcatgtacctgcgctactgcgagcgtaacggcttcaaggccaaggtcatggacacctcctacgccgaagaggccggcatcaagtccgccaccttccaggtggacgccccctacgcttacggccgtctgtccgtggagggcggcacccaccgtctggtacgtatctccccgttcgacaaccagggccgccgccagaccagcttcgccgccgtggaagtggtgccgctggtcgaggccaccgaccatatcgacattccggatacggacatccgcgtggacacctactgttcctccggccccggcggccagggcgtgaacaccacgtactcggccgtgcgcatcacccaccttcccaccggcatcgtggtgaccatgcaggatgagcgttcgcagattcagaaccgtgcctccgccatggccgtgctccagtcccgactgctcgtgctgcgccacgaggaggaggccaagaagaagaaggagctcgccggcgacatcaaggccagctggggcgatcagatgcgctcctacgtgctgcacccctaccagatggtcaaggacctgcgcaccggctacgaaaccagccagactcaggccgtgttcgacggcgacatcaacgcgttcatcgaggccggcatccgctggcgccatgaacagcgccgcgccgccgaaaccgaggagtaaacagcattatggcactgatctcactggacaatgtgtccaagatctatcccaaaggcacccgaccggcgcttgacgacatcaacctcgatatcgaacgcggtgatttcgtgttccttgtgggtgcgtccggctccggcaagaccacgctcttgagcctgctgttgcgcgaggaggaggccaccagcggcgagattcgcgtggccggcaacgatctgcggcgcatcaccaaccgtcaagtgccgcagtaccgccgttcgctgggcttcgtgttccaggattacaagctgctcaataacaaaaccgtatgggagaacgtggcgttcgcccttgaggtgatcggcacgcggcggtccaccatcaaatcgttggtgcccaaggtgctgaataccgtgggactcaccggcaaggaaaagaactatccgcatgagctctccggtggcgagcagcagcgtgtggccatcgcccgcgcctacgtgaatcacccgcagattctgctggccgacgagcccaccggcaacctcgacccgaccacttcgctgggcatcatggaagtgctggacgccatcaaccgcaccggcaccaccatcgtcatggccacgcataacgaagagatcgtcaactcgatgcgcaagcgcgtggtcgaactgcacaacggcaagatcgtgcgtgacgaggctcatggctcctacgattccgccctgttcttcccggatgccgaagtcgaagccaagtccgacaccgcccatcatgtgctggcggcggcgaccaaggccatcgagggcagtgacgagccgtctgaaggcatcacccgtttggccaattccgtgcattccggccgcaccggccgctatggcgagacgtttgcgccgctggaagacacgctgacctggggcaagggcatttcgttggatgagcaggccgccgccctggaaagcacccaggcgttcgacccgttcaaggacgagtccgccgcgaccgccgcggttgccgatacgtccgtgtcatccgccgccgagccgccggccccgccggagccgcccgcaccgccggaaccgcccgcaccgccggccaacgagcagtccgccgccgagcagcctgctgacgagcagtccgccgcagaccaaacatccgacgatcaacccgctgagggcgcgaaggagtaagggggatcatcatgcgagcacgattcattctgtccgaaacgtgggccaacctcacccgtaacctgtcgatgctgctgtcgctgacgctggtcaccttcatctcattcctgttcatcggcgcttcggtgcttactcaggcgcagatcaccaaagccaagggcgactggtacgacaaggtcgaggtcgtggtgtggctatgtcccgacggcaccagccagtccgcgaactgtgcttccggcaaatcgccctcagccaatgagatcacggcattgcagaaaaccattcgcgatgaactcaacgacgtggtctccaacatcgactatgtcagcaagcaggatttctacgacaacaccttcaccaagcagtacccgaacggtgaattccaaggccgtacgctgaccgcggacgatatgcaggactccctctggctcaagctcaaggaccccaccaaatatcaggtggtctccgaagtgctctccggcaaggagggcgtggaggacgtcaccgaccagcgccagatcttcgacccggtgttcgccgtgctcaaccgagccacggcggttacggctgtgctcgccggcgtgatggtggtggtcgccatcctgctgaccggaaccaccattcgtatgtccgccgcatccagacgaaccgaaaccgaaatcatgaggtacgtgggtgcctcgaactggacgattcgtctgccgttcattctggagggcaccatcgcctcgctgatcggctcggtgctctcgtgcctgatgctttcggctatcgtcaacgtgttcgtcaccggctggctggcgaaatccgttacatggattccttatgtgaatcagctcacggtactggtgatatcgccgttcctggttgtgggcgcgatactgctgtccatcatcgcttcaaccatctcgttgcggcgttatttgagggcgtaacgcgaccggcttacccgcgagaaatgtgatgacatcgtgtgcaagcctctcaggttcgcatgttatggtattggcttaagtgagcgaaaggactattcacatatgacgaacgtacgtgtgatcaagcccgcactggcggcactggtggccgccgcagcctgtgtgggaggtctggcgttcagctcggcacagcctgcccaggcagacacctattccgacctgatcaatgcgcagaaccagcacgccgcgtcggtacagcgcgaggccgaactcaagcagcagctggccggtgccagccaggacctggcgaataaggtacttgagctggacgatctgaccaacaacaagattgtcgccgcgcaggccaaggtcacgcaggccaacgaggatgccgccaccgctcaggacgaggccgacgccgcatccaaacgtctttccgccgcgcagaaagacaaggagacgctcgaggagcggatcaagcagaccggcaaggactacgatgacgcgcacgccgccgtggcccagctggcccgtgacgagatgcacggctcgaatgcttccgacgtgatgagcgtggtgacgggtgccaccagcacacaggacttcgtcaactccatgcagtcccgggacgcgttgtcccgcaacgaggcgaatgcggcttcctccgccgcgacctcactgagcacgtcgaagaaccgtggcgaacgtctggcggccatcgaaaagcagatcgctgtgctcaagacccagtccgatgagaaggccgcttccgcacagaccgccgccgaaaccgcgcaaagcgaacgtgacgctttggacaagctacgccaggagggcgaaacaaggcgtgacgaactgtcttccatgatcgacagtctggattcccaatccgccaagcaggcggcccagaccgtactgatcgcttcccaggtcgattcctacaatcgtcagtaccagaaggaacagcaggacgccgccaaccgggtggataccggtaaccagggcggtacgccgtctactccggtgacccccgctccggcgcccgctccggctccggctccggcgccggcccccgcccccgcccccagcgtcggcggccaaggcacgtcgaacggtgattacggcaacgcctatgccgccggccagtgcacgtactgggcgtatgaacgccgtaggcagatgggcattggcacgccgtcctatctcggcaatggcggcgactggtggcgcaacgccccctcgtacggcttgcgcgtggaccacaaccctcaggtcggtgcggcgctctccttcctgcctggtcaggatggtgccgacggtacctatggccatgttgccgtagtcgaagccgtgtatggcgacggcacattccagatctccgaaatgaactggggtggtccgtggaacatgcacgaccgcaccttgaccaatttgggtcagtactggttcgtccactgaccggttggttcggccgatatatgcggttgaagggttcctcttgaagaggaaccctttttcgtattcgaggccggtccgtgatatcgtcggatgttgcgttgctacccacgagttgctactcacgagttattgcccacgaaaggaggagacatgcccaaggaaaccggtgagaaactcatcgtccagaacaagaaggcccggcatgactatgccatcgaagacaagtacgaggcagggctggccctgaccggcaccgaggtcaagtcgttgcgcgaaggccgcgcatcgctgtccgaggcgttcatctccatcgaccgccgtggcgagatgtggctggagggcgcgaacatccccgaatacctgaacggcacatggaacaaccatgcgcccaagcgcaagcgcaagctgctgctgcaccgactgcagatcaccaagctcgcccgcggcatcgaggccaagggatacacgattgtgccgctgagcctgtacttcaaggacggtcgcgtcaaggcggagatcgcactggcccgaggcaagaaggaattcgacaagcgccaggccctgcgcgaagagcaggacaagcgcgaagccctacgcgccatgcgctacgccaacatgcgccactagtcccgtcccttggctcccctccggaggggagccaagggtaggatgtccgcgttgtgggtcatttcgcccacgattaacgcttccgtagcattgcactcctacgctctggaaccatctgggaaacatacccgcccagctgactatccggagagaggaaatccaatgtctctaagcaagggaatacaatccgctgcggccgccgccctgagcgcggccatgctgatcgccgtggcggcctgtggcacgactgacagcaccgacaccgcatccaagagcggcgattcatccaaggactcgtccagcacttcgattcaaggcttcgacaccagcagcatccagaaggacgacgagattgccgcactgctgcccgattccgtggccggcgacggcacgctgaccgtcggcgccgatacttcctatgccccggccgagttcctggccgaggacggcaagaccccggtcggctttgatgtcgacctgtccaaggcgctggccgcagtgttcggactgaaggaaaacaccgtctcctccacgttcgattcgattatcccgtccgtcggctccaagtacgacatcggcatctcctccttcaccgtgaccaagga

SEQ ID NO: 115 - DNA, 34054 bp, Unknown
  R206_24m  MAG No. k141_27947
caccccgaacaggcccgagcattgggctacctgctcaaaagctacgaccccgagccaagccaagtgcccgtgtacagctgccggcgcggctggatactgctcgacaccgacggccaatggcattcatgcccgccgcccgagggcatgcccaaccacccgcaaaccaaccgataaaatcagcagaaaggaacactcatgatcaacgcctacgcggtcaccgtgcccggcgaactcgacaacgtggacttcacccgagaggacggcaccagcgtgaccatgctcatcccgcccgatataccggtgagcaccaggacaatcatcatcccgcagggcttcacccgcgaggaaacccgaaccatccagggagccatcgttcaggcgctcgccggaaaggagaagacgctatgatccccgagaaacccgaagccctgctatggatggacgtggagaccaccggcctcgatgcgaacatgtgttcgatactggagatcgggttgcgctgcaccagcctggacgccatgcacgaatacgggcggttcgaggccgtggtgcacatcggccgggagaccctgctgaccgtgcagccctccgccctggaactgcatctgaacaacggtctgctcgcccaatgcgaatcctgcgacccgctggccaactcacccagggtcatcgccgagcaggccctgcggttcatccaaggcatggccaccacgtacgtcctgcacccggccggcacgaacatcagccgtttcgacctgcccatggtcgaacgcttctgcatgacgggattcggagaactgctgcactaccgcatgctggacgtcaccgcactgcgcctcgcggccaaagcctgcggccaagacccataccagcaccgcatgaagcccacgcaccgcgtccacgactgcctggacagggacatcgcggaataccgccactacctcaccctcatgacggggccggcgctcgcagaaaaggaggaccggccatgaagccacgttgcatcctgtgccgcaagcccgtgcccgacaaccacacccgatgcgtcaaacactggctcaacaaccaggaccaatggatggaggacgaccaaccggcacacgagcactgcaccccacgaaggagacccgcatgagccacacggcacgaatctggacacaagaccaactcaccgaggcattggcgagcgcctgcgtgctggaaggcgtgagcatcctgcacttcggccaatactccgatacggccatccggaacctcaaggcggtggccagaaccatgtacgagaccagcggcatgccgaccatcgtggaggacgacgatgagtgacctcacccaacaggccctcgcggcgctcgccgacgcggggctgggcaacgagtcagccgccgaagcgttcgtcgtcggatatcaggcgggctatgacgcagcgctcactctggccatcagcatagaaacccatctcaactcgaatgagccgacagacgaagaaatcgagacctgcgcccgaggattcttcgagggaacacccggcatcaccaactgggacgcagtcagcgagcactcaaaacaagcatggctgcacgcggccaagaaagcgctcgccgccgtcaacacgatgaaaaccgaggaggaatcatgagcatcatcagcaaggaagcgtgcttccgctaccccaactgcacggtggacgacgtgcacgacacgttggcccaggtctacaccagtgacgacttgcaggaggcgtacatgaccggtgcggaacgggagcccaccggcttggaggtggaagccgccgccgaacagctctactactcggactgcaacagttccggcctgctcctcgactcagactggaacagactaccggacggcaacaaagccatctaccgcaaccgggtgcgcacaatcatcacaacaatccagaaaaaaggaacagcagaatgaacgagaacacgaacctcaccgacatcatcagcgcggcgctcgccgccggatgccagatcagcgtgaccatcactcccaaagacttctacaacgaatcacaggagccggaggaatgaacgtgagcgaaagcatcgactggcggcattccacgccgggagagcttgacctgcaccggttcatcggactcacgaggagaggccaaacactggacggctatctctcctgcttcacacagaacggccggtggacactcaccgacgccgacaatctcgccaccgtcatcaaaccggacgccaacggaaacccaacactcaacaccgaactcttccgctccatcaacgtactcaaggaaataagaccatgcaaaaaactacattaaccaccacagaactacattaaccaccaccggtttttacattagcgcgctcgccggaggcacccgaggatgcgcggaaactggtcggtggaatccaccatcggactcctgttcaccatcatcatcgcgatactggcgctcgccatcgtatccgccatcggcctggccgcgtacgccgcgatggacaccggtcccagccagcgtatcgtgcagcaggtggagaccacgggcgatgttcgccgcctgtgcatcgaggctcgaaccggcgagcgcgtcgatgccatgtcatgcgatttgattgatccgcatgcgggaggtgttgcgaagtgacgagttaggcgatacgcgacaaggtgctcgcatggcatgggcgcggctacggcgcgacggatacggcccgtcaattgggcctgccgttggaggaggtgcgcgcgatcatccgcgagggtgacggtcggccgaaaccgccatgcaaggtcgagttcattgaaccgccgctgtccgaggaatgaactgaaataccagataaaaaaacgaaaccctccacacgaggcggagggcatgtcagcaagcaaccagtttagccgatgtggagggatttcgtgaactgccagaactgcaacaccataatcgaaaacgggtacgcgctgtgcacggcgtgcgagctgcgcttcgccggcacgctcctgcgactggcgcgcgacgtcacgccgttgcacgactcgttggacgcgaccctgcatccgggcgggcattcgcccgtgcgaatccagacggccactcccccgactcctatcaggcttgacgtgctcgacctgatcgacatgctcgacgccacggcccgtgaactatggcgttgcctcgacggcatcgacgccttggactggcgcaaagacaaacgcaacgaggatctgaaggccacgctcatcgcatgcgcaggccaccccaggctcgccacgttcgcggacgcgggcttctacatgcacgtcgttgacggcatcgcacgcaaagtcgatgctgcgctggacccgccggagcaacgccgcgagataggaacctgcgaactatgcgggaccatgctcaccgcaggtgcaaacgaccaatgggtcacatgccccatatgcggtaccgagcagcgtgtgcagaccgtcaaactgagacgtttggaaaagctctgctgggatgacagtcagcgtggctcggcggcggagatagccaaggtgttcgcggacgcgggaatcgccatcaaaaggcatacgctcaccgtgtggaaatcccgaggcaagcttgatgtcacgccccaaggcatttcatacagcagcgtctaccggctcgtcatcagtggcggacttgacaaagagctgactgtgaccgcataatgtcagtggattagtatcgaaaaacccagctcatgtggctgggttttcgcgtatctatgctttgtttttgcgtggtctcccccctccgacaccacgtcccggacgttgagcgttccattcatcgatggtctcaggcaaccagccgcgcgtgcgccctatcgtggcgtcgggctcagggagcttgaggttgagcaagccgccactggtgatgccaaggcgttctgcgacctgtttgacgccgagatattcagtcgccattgcttgcccttcctgccagataacccagcacgcccgagcacattccgaacacacctgccggtacgctctgggatgcgatggccagcgcgaggctgacgactccgaacatgagtgcgatgattcctatcttgccgttcatgatgttccatggaatagttgggagtggagccgtggctctggatagtacgattatccggaatccacggctcttgttaccgcttgcgccgtctgttcagcggctttcgcggcttgctcttcgcaatcaatgcgacggccacggcggcgatgggtgcgagtgccgcacccaatccggagaggaactccccgatggccttgagcagctccgcgatctgttccatgttcacctcctttccttggctgacatatctatagtaacacaataactatagatatgcaagccgaggacaccaagacacgccaacggacacaatgactgcgaggcacacatgagctggcgagtctgctcgacacccggatgtccgaacctcatcgagacaccggcacgcaaatgcgacgcctgcacccgagcccaacgggaccgcacccgtacccgtggacgcaacccatacaacaccaagggacatcaatcgtttcgcaggcaggtgctcgcacgagacccatactgcacatgccccggcgaccccgagcacggaggctgcggcaaacacaaggggctctgcggaaaaccaagcacaatcgcggatcattatccatacgagcgaatcgaactcatagacatgcgactcaatccgaacgacccgaagttcggacgaggattgtgcaaacaatgccacgacgtgaaaaccggcagaacaagaccagcaggcttcaataccaaacagtaaaaaacaatcagcagccgcacatccccgcaaaaacgaccggcaacacccaggggggtggggtatcgaccacccctgcctgaaccgccggtgagctgtctgtcgggtgcgcagggttcaaacatcgctggcgggccgccgcgagggcggtctcgtcgatctgtcgctagggcgcaaggccatgacgagaggtgaacatcatgccaagtggaggcaaacgagtacgctccgggccggccaaggacccgaacagcgagaagagccgcagactcggatacacattgcagagcctgccgaacaccgagtgccggatgaagccgccggaatggcccttggagcccgccgatgacgagcgcgtccgcaaacttgaggcggagaagtggaagtggctgtggaagctgcctcaggcacgcgcctggcatctgccccagttcaagtggatgattcacgaactggcgttgtacgcgcggctttccaccgcatgcgagatcgcgccggcacccacggcgttgaccgtgctgctgcgcatctccgaccgcgtcggcatgagcgccgccggattgcaggcattaggctggaaaatcgaagcggaggccgagcggaagccagtcgattcggagttcacgcgccgcagggccaaggagctgaaccaggaatcagccgccgaacgctctcccatggacgagacgaagcatgtgtaccagcgtcggatgagcggcaatggctgacgaggattcatggctcatcgacttccccacgttggggcatctggtgtgcgcatggatcgaacgtcactgccggcagcctgacggcccgttgcgaggccgtccagtggtgctgtccgactggcagtactggctggcggcgaaccgttggcgcatccgcgaggacgccccatatgtgccgcccgaggaagtcaccgtcgacaacccgatggtactcaaccaggcattcgaataccgcatgacgctgaccgtcggaccgcagaaatggggcaaggggccatgcacggcgttcttcaccgccgccgagggctgcgggcccaccatcttcgatggctgggcgcgagaaggcgacatgtaccgttgcgctgacaacggttgtccgtgcggctgggagtggccgtacaatccgggcgagccgaaaggccgtcgacatccgtcgccgctcatccagctgaccgccaactccgaggaacaggtacgcaacatctaccgtcctctcgtggcgacgatcctgcttggcccgctcaaggagctcatgcgcgtgagggacaccttcatccgcatactgcagccggggcgcgaaggcgaggccgacgccttggacctggaccgcatcgacgtggtcaccgcctcggcgaaatcccgtctgggcaacccgatcacggacgccgaacaggacgaggccggcctgtacacgaaatcgaacggcatgatagcggtcgccaccacgcagcgccgaggagccgccggcatgggcggccgcacacatgcgtggacgaacgcatgggatccgggcgaggacagttacgcgcagcaggtgttcgagaacgccgaggacgacgtgttcgtgttctaccggaaccccgatctcgcgaaatcattgcgtcaccgcgacggccggccgttggacttcaatctgaaatccgaacgcttgaagatgctcgaatacgtgtatcgcggctccccgtgggtcgaccttaattccatcgaatcggaagccaaggcgctgatgaagaccgaccctacccaagcggaacggttcttcgggaaccgtctggtgcagggcggcggcgcatggctcgaagacggactgtgggagagctgctatgccggcgcatgaactctggttgccgaacccgccaaaaggcacgcgcgtatgcgcgggcttcgacggttcggagaacgacgactggacatgcatcaagatggagaccctcgacgggctgatattcactccccgatacgggcccgaccggcgtgcgaccatctggaacccgaagcagtggggcgggcgcatcccccgcgccgaggtatccgcagcatgggcggaactcaacgaccgctacaaaatcgaacgcgcctactgcgaccccggcttccgcgacgaactgtcatgggaatcggagatagaagcatgggatcgcgcctacgggccgaagaaattcatgccatggagcatgtcgggcagctcccgcatcggagccgtctacgaggcattgcgccgattcgaagccgacctgaccacacatcgcatcacacaggacggctgccccgtcacccgcacccacatgatgaacgcgcgaaaggtcgccaagaccctggaacgctacgggctggcgaaaccccagcagaacaggaagatagacgccgccgtgaccagcgtgctcgcccacgaagccgcatgcgacgcgcgagccgccggctggggcgctcgcaaacacaattacatgcttaccggatcatcgaccaggaggtgacgatggaatacagccagcaggatctgaccgcattggcgaaccgtatggccgacaaaatccagttccgtcgacccagcatcggcacgcataccgattacgtgctcggcaaacgcggcaaactgaagttcgcgtccaaggaattcaaacgctatatgagcgaccggttctccgatttctcggacaactggtgcctcccggtggcgcaggccccggtggaacgcatcaagttcaagggcttcgtcccatatgatgacgtgaagctcggcaccggcatcatgaaatgcctcgaccgcaacgacttcgaacgcggactgcaggaagccgcgctgatgatgaccaccacgggccgcgcgttcgccttggtcacgcaggtcgacggcagggcccgcatcacgttcgagcacccggacagcgccgcagtcatctacgatgcgcgcaccggccagccgtcagccgggttcctcatccagcagggcgacgacaaggagtacggcaccctcatggtgcccggctggacggtcagcatggaacgtaagaagatgctcgatctgaccgaccagcgcgtgccgcccgacgtgtatggctggaagatgaatgaccctcagcccaccggtctggacacgattccattgcgcgagttccgcaaccagatgctattggacaatgcgccgatcagcgacatcgcgcacgtcgaatcgatgcaggacacggtcaacgtcgtatgggcctacctgctgaacgcattggactacgcctcactgccggcacgagtcatcctcggcggagacccgctcgtcgagcccgtctacaacgaggaggggcagcaggtcggcgagaagcccatcgaactcgacaagcaggtgctggagcgcatttaccagttcaccggcgacaacgtgaacctgggcgaatggtcaagctcgaacctgaacgtgttcatcccggtcatcgagaaggccgtggaacatatcgccgccgaaacacgcacccccggccattacctgctgacgaacgcggaggttccggccaccggatacgaggtcgccgaagccggcctcgtatccaagaccatcgaacgcatcagcttcctgaaatcccccatccgcgacatctgcagcatcgccatgcgctacgagaacgacgcgaatgaggcggacatcatcgccgactcaaaggtgcagttcgcgaccccgcagtatcgcagcgagacgctgatggcggacgcgatgctcaagtacaagcagctcggcttcccgatccaatgggtcgcggagcagatggggcaaagctcggacgaggtgcagcgcatcatgcgcatgcgcgccgacgagatggccgaccccgaactcgaatcgttgaaccgtgccctgcagatcggaggcgctgatggcggtcgaatcgcaggtgctggcctacagtcagaaacggctggcgacgttggagctggcggcggacagggccgcgcgcagaacatggaacagggtcgacgccaataacatccaggcgtcgtggaagtcgataagccgcgacttcctcaccctgttctccaccatccaaaccaagtcggcggagacggccatcgacgcgagcggcatgatgctcgccgaacagggcgtgtacgtcactccccatgctttggccaacccgaacgcattcgcgggctgggctccgtccggcctcgacatcgcatcctacttccaatcccccgtgttcgccgccctgcacgcgatacgcaccggcagctcgccgttggaggcattggaatatgggcgcaacctgctggtcatgctcacctctctggcggtcatggacaccgcccgccaggcggaatcactggacatcaccagccgccccaaggtcggctacatccgcgtcgagtccgccacctgctgcgaccgatgcatgctgctggccggcaaatggttccgcttcaacgaggggttcctgcgccacccccactgccacggccgccacgtgccctgcagccatggcatggccaaacaacaggggtggatcagcgaccccatggagggtttcaaaagcctctcccgtgaggagcaggacaagcgtttcggcgcgaactacgcgcaggccatccgcgacggcgccgacatctaccaggtcgtcaactcgaaacgcggcatgcaaagggtgggaaaaggctatacggcgctgaccaccagcgagggcaccacccgatacgggtgggccaacatgcaatacgctcagcagtccggccggaaaatgaaacgccgcctgtccatcgacggcatctactcgctgaccggaggcgaccgggagaagaccatcgccgcgttgaaggccaacggctactacgtggacaacgactggcgcggcaaggtgcccgagatccgcaaaagcatgtggctgcacgacaacacgtaccggcaggggcgcgtcgaactgttgaccgccgccgagaagcgcgtgcagaccgcgaagctccgctacgaggccgtattggagggccgcaaccccaacgatggccgcatgcccctcacccccgagatcgcggcccagtgcgaacgcgaataccgccgatgggtcacctccggcggccagattttccagcaatgatccagcgaatcgaaaggaagaacatggatcccgcaaaccagaaccagcagacaggcgacaacgagtccaagaagccggagaacaccggcggcgaggattggcagtcgaagttcgaaggacagcggaaagtcaaccgcgacctcgaaaagaaactgaacgaagcctacgccaaggccgacaaggtcgacgaactcgaaaaacagatcgccgccctgcagggcaaggaagccgaatacgaggccgcccggaaggaacaggccgtcaaggacgaggcccttgccgccgccaaccagcgcatcctcaaggccgaagtccgcgccgcagccagcggcaagctcaccgacccggccgacgccctgcgctacctcgacctgtccaaattcaccgtcacggatgacggcggcgtggacacgcaggccatcgccgactccatcggcgaactgctggaacagaaaccttatctcgggaaagccgagcaagcgccctcgggcgcgaacatcacgccgcccagcggaacacgggacggcgaccgccatcagggtcagctcacccgagacgacctgaaaaccatgagccccgcagaaatcgtcaaagcccaacaggacggacgactgaaggacctgctcggagccaactaacggaaggaggccttaaatggccatcaccaatttcatccccgaactctggagcgccaacatcctgctggaactccagaagaacctcgtctacggttccgccgtgaaccgcgactacgagggcgacatcgccaactacggcgacaccgtgcacatcaccggcatcgcgcacatcagcatcggcgactacacggcccacaccgacatcaccatcgaaccggccaccgacaaggacgccggcgaactcgtcatcaaccagagcaagtacttcgcgttcgaaatcgacgacgtggagaagcgccaggccatgaacaacctgaccgccgcatactcccaggacgccgcctacaagctgcgcgacctgaccgaccagtacctggccggcctgatggcagcaggcgcgaagagcaagctcgacccgatttccggcaccaccgccaccaaggcgtacgacaccatcgtggatctggccaccgcattggacaagcagaacgtgcccgacgcgggccgttgggtcatcgtcaccccggacttctatggcctgctgcgcaaggatgcccgtttcgtcgcgggcgccgagtccgctcattccacgctgcttaacggagtcgtcggcgaggccgcgggcatgaccatcctcaagtccaacaacgctcccgcagccaagggcggctccacccagtctccgaccgatgagggcaacgtcatcatcgccggcaccaacgcggccaccacgttcgcggagcagatcgccaaggtcgaggccacccgcaaggagaagggctttgacgacatcgtcaaggggctgcacctgtacggcgcgaaggtcgtgcgccccgaagcgctggccaccgtacacttcaaggtgggcaagtgatggccggcagctatgaggccatgccctacgtgggcgaagccgaataaccgcataaggggggctcatggacacgctggcaacgatcaaggaccttgattcatacggcatcgaatacgcggacggaaagctcgcgggcaagctgctcgaatcggtttcggccgcggtgcgcgacgccgccggctgccccatcacacgcggcgaatacacggtgaccatccccggtgaaacctcacgcaggctcgacctgcccatgcgccccgtgatttccgtgagccgcgtgctcgtggacggcgagcagaccggtgattggaaactgctcggcaacgcgctgtacagggaaagcctgtggagcctgccgaacatggtcccccgctccatcaccgtcaccatgctcgccggctatgacccgatccccccggacatcgtgcgcctcgtgtgcagtatggtcgcagccggactcgtccagcagtcgaacggcggccccggcgctcaccgcgacgaatcgtacgcacgaatcgacgacgtgcagatcggctaccgtcagggcgactccgagatcatcgacgcactcgaactgcccgagggcacgaaacgagccctccgcaacaggttcggcatgcgaggcatcgccataggggtgttccgatgaacgtgcagcacatcctcaaccgaggccgacagctcgccgaatcattgatgaccgaccagtgccgcgtcacccacatgggcaaaccggtcaccgaccccgaaacgggactggtggaaccggctgcgaacaccgtgtatgagggcaagtgcaaggtgcagacctcgggcggtctggctgccgagaacacggagggcggcatcgtcgaagcgttgggtgccgtcactcccgtgtggagcatgtacgtgcatttcccctacggcaccatgggtttattgccgggtgacgtgtgcgagataaccgaggccgatgacccgaatctcaagggcaggaaactccggttgttgaacatgcagtccgagaagacacactccaccgcatgccggtggaatgtgaaggaggtgggcaacagcaatgagtgacatcaccatagacgcttcggagctgaccgcgttcggccgtcgtgtcgccgccgcgcacgccatggcttcggtcaaggtcgcgcaggcggtgaagaagggcgcgcaaaacgtcaaggaaggcgtcatctccgacctgcagacatcatcgaactacgcgatcagccgtatcggcatcggctacgaaatgggcagcaccggcaccaccatttatgcggatgtgagcccccgcgacggcggagcttccgacttggccaacatcgcgttcttcggcaccgcgaaaggcggcggaacccactggttttaccagttcgccgaacaggaattgcccacgctcgccgaatacgtgggagacgcggccgacgacatgctgataggagccatcggattatgagcgtcatggacttgaccaatgcggttctcgatctgctgccctccatgccgtccggcgtgaaggtgtacaggcaggaggagccgctggagtcggagatgccgccgtggatcatcgcgcacgtctccaccgaccgtcatgtgatggcggagacgatgcggttcaccgcccactccgccctgttggaggttcgcgccgtcagcaccaccgccgacagcgtgaacatctggtgtgacgacatgctgattcccgcgttggcgaaccgctcccccacccggccgccgggctacacggtcggccagctcaccctgtacgaggattccggcgcatacccggccggtctgaccgccgacgacaccgcgcgccgctaccaggtgcgcgtcctgaggttccgcttcacgtggagccgaccatagtcaaccaatcatttaccaaaagtcttcaaggagcacattatgaccatgaaactgggtacagagattcccggcaccagcgccgagggcaacatcaccaccatctgggtgccgaccatcgccaacatcaaggcccccacgctgaccgaactcaacgccggcaccgacatctcgaactacgtcatgctcggcggctggagcttcgaaccatcacaggacaccgtatccgaccagcgcgagaacgccgtgcaggacttcggggcccccggccgcaagtccgccggcgacatcagcatcgaggtcatcgacaacacgaacaccgagcacaaggaacagaacgaggccgtcacactcatgcacgagggtgcctccggctatatcgtgcgccgtcgaggcatggccaccgacgcgccgctcgccgtagggcagaagctcaccgtcgtgagcgtcacctgcggcgagaagcaggtcatcaacccggacgcgaacaccatgatccgctcggagatcccgctgttcgcgaaggcccccggctgggagtccgagaccgcagagatctcgaccccaaaaggctgacgcctccgaccgtgaccgccgcagcccgtaagggcggccagacggtcacggtgaaagaggccatcgccggcggctgacaattcttccgtgcggggactctaaacctttctggccccgcacggacattcttctctcacgctcagaaaggtttgcagacttttcagaaagggataatcatggctttggaagtgaagcgcaagcgcgtggacgtcgacctcatattggatcaggagaaggccgaacaggtcgccgcattgggagccgatttggaacgcgccatggcgcagcatgtgaccgagggcggcaacgccgccgccaaacgcatcgccaaacagatcgacaaactgcgagacgaggtgaaggacgacaccatccgcatcacgctggaggccctgccgctctcccagtggcgtcaggtgctcgaggcgaacaccgtcaccgagaacgggatcccgaagcagcgcatcgaggacatctgcgccgacgcgatcaaactcatggtcaggaagaccgtgccggaaaccccggttgaggatctggcgaacgtcatgaccgaactgtccgacggccagatcagcccggtctggtacgcgatccgtgacctgaacgcgaagctcatcgacccaaaagacgcactcgaatcagcctcgcggataatccgcagacggtaagggaactgcgaatctgccgccagctcggcatcagctacaaaaggtggctcggctgggaaccagcgtatcgggtggaacgcgactcgcataggcgcatcaccggctacacgccggaaaccgaatgggacgagaccgagcgcgagtggatgctcgccctcaacgactacgaacactcgttatgcccccaatgcggcatgcccatcagcgtctgccatgacgagcagacacccttccacttcacggccgaggtcggcgtctgccagatctccctgctccaatccgtgcgattggaggagtggaagaaggaccatgcgaacgagaacgagctgaagcagtccgcattgacggtgggaatcaaaccaagatgaatctcaggaggccgctatggcaggcggattgaaccgcaacatcacagtccgcctgctcgcggacaccagcaacttcaccgccggcatggccaaggtgtcgggcgaaagccagaaggccgcgaccaccatggaagccgccggaggcaaatcgaagctcatcaccaccggcctcgccgcggccggtgtcgccgccaccgcactgggcgtggccgccatcaagatggcggcggacttcgacgccagcatgagcaccgtgcaggccaacaccggagccagcgcagatgaaatgaatcagctccgtcaggccgccatcgatgctggtgccgataccatatactcggccaccgaatccgccgacgccatcaacgaactcggcaaagccggcctgtcaacctcggatattctctccggcggcttgagcggcgcgctgaaccttgccgcgtccgacggcatggccgtcggcgacgccgccgaactcatggccaccaccctcatgcagttcaacttgacgggcgccgaatccactcaggtggccgacgcgctggcggccggcgcaggcaaggccgtcggttccgcccatgacctcggcctcgcgttgaatcaggccggaatggtgtcgcactcgttcggaatcagcatgcaggagaccaccggcacgctcgccgcattcgccaaaagcggcatgatcggctcggatgccggcaccagtctcaagaccatgctcatcaatctcgccaacccgagcacgaaggccgcgaacacgatgaaggaactcggcatcaacgcctacgacgcgcaaggcaacttcatcggcctgtccggcttggccggccaactgcgggacaagatgagcggcctgtcacaggagcagcgcaaccaggcgttggccaccatcttcggcagcgacgccatccgagccgcgaacgtgctctacgagcagggcgcggaaggtatcgacgactggacaaaaaaggtctccgactccgggtatgccgcagaacaggccgccgccaagaacaacaacctcaaaggggacttggaaagtctgagcggctcgttcaaatccctcatgatctctttgggcgagggcggtcagggaccattgcgctcggtcgtgcagatgctcgacactctcgtggacgcgtttagccaactgccagcacccgtacaacagggaatcgtgcttttcacggctcttgccggcggctcggtcgcattgcacaaggctatggcaccgttgaacgcgagcagcagccagcttgcgcaaaccatcggattgatcgccgacccagggcaaaggctcataggcctcggctccggaatcgcgtcagcgttccagacatggggcgcaactttcggcagtgcagaatctcagataaacacgtttggcaccaccgtcagtcgttctcaaggcgttatggcaggtttcaaaaacctgggaagcggcatagtgtcgttattgggtggaccgtggggtatagccatcggcgtcgccggcgcggccctcctctccttcgccgacaaggccgcagaggccaagcagcgagccgactcgctaaaaaccgcgctggaaagcaccggcgacgccagcaaacaaatcatcgataatctatcaaatgcaaaaatcgataactcctggatcattccggacaatatcgaacaggcgtattacggatacaagacccttggcagcttactcgatgatgtcggaatcaagatgtccgacatggcactggccgcacagggcaactcggcagcaatgcgccgaatcaacggtgtcaccgatgaaatgatcgcgaaaggcggcaagcaaaaagaactcgcgggaatcattctcagccagctcaacgaggaaaaggataactataacaaggcatccgatgcagccaagtcaaaagccaacgcactcgctgaagtagagaatgctaccaacggcgctgctgacgccactggagaatactcaaacgcaacacaaggcgctacgaccagcactcaggatttgatggacgccatcgacgatctcgttaaaggcttcctcagcctgcccggcgtgcagctgtccgcggatcaggccgtaacccaattcaaccagggaatactcgacctcaacgagaacatcgcaaagaacggccgagtgctcgatgaaaacggcaacgctctggcgggctatgagtctcaggcgtatgacagccagagcgcgctgcagggtctcgcctcgaccgcgcagagcacggcgcagaagatcatcgaggaaggccaggcccacggcgatgccgctgctgctacccagcaggcgggcgatatcctcgaacgggcacgtcaggcgtacatcgacaacgcgaccgcagccggcatgagcgccgacgcggccggagaccaggccgaccgatacgggctggcccgccgcgaggccgacaatctgcgtcagagcatcgaatccatgaacagcgaggccgctaaccctgtcgacgtgaggattacgattacggacgaggccagcgacgtactggacaaggtgaaggtgaaagccgagaaaatcggtgacaagaccgtgcgtttgaccggtgacgacaaagacctcatggacaagatcgccgaagccacaggcgttcagatcgactccaaaaccggctatctggacctggacaagagccagttcgatacagcgatggctttggcggccggagccaccatcgacgacaagaccggcatcctcaagggcaacaatgatccactgttcaacaagatggccgaggccaacggctggcagatttacccgaaaaccggctacatctatggcaagaacggtcaggcattgcaggccattcgcgatgtgaacaacgaacccttggaaaccccgagggaggtcacggtcaccacgaacatcgtccgcaacttcatcgagacccacatgacaaagaacgtgccggatacaagcgttggcgttcgcccgggcggcaagaccggtggcctgttcggcggctacggggtttcgatgcgcggctacgccggcggcggccgtgtcatcgaggggctgctgcccggcaaggccacctacacgggggatgacaatatcaccctgttgaacgcgcgcgtcaaaagcggcgaattcgtcagcaacgtgaaatcggtcggctattacggtgccgatttgtacgcggccatgaaccgtcgtcagattccacgtgaggtgttcgcgaaggttcccgccgcgcagaccgtccctcagggtcgggccatgcagccatcggtgaccaatgtcacggtcaacgttgcagggtcgaagagcccggaggtcgtggcacgtgagacggtggaaatcatccgacgagagctgggggtgaggcagtgaggattgctttgacgcctccgctggacagtggtctggaacccgtcgtattcgtggatggcagtccgcagaacctcttcgccacgttgcatgatccgtttgaggtcacgttggcaagaaactcgacggatggctggtatacggcggccgaggtacgggaatcgccgaccgatcgtccgcaggcggacggcgcctactggccatccagaatgacgttgaaaccgcgcgtggtcacaatccgcggccgtgtcgtgcagcacgacgggtcaagctcgctcgaactggcgttgttcaacgaccggctcaacgcgatggtcggccaacgccttaccctccaggtggaggacgcgctcgggcggcggcaatccgactgctatctctcgagccagatgagctggtcgagcgatctcggcgtcacggacgtgacactgatcgtcacctgcccggaccctctcaaatacgggccggaacagtcgttccaggcgtcctcgtccacgtgcctggtcgtgaacggcggcaacgcgccgacatggccgcgggtcaggatcgacgggccggtgaagacgctcaagatccggctctccgacgccggcgcggatggcctggtcgtctggcagggggacgagaaggacggcctcgacctcgacttccgcgacatggtccccagccgcggcaccgtcacggacgaccacgcgttcccgataccgccaggcacgcaccgtctgacggtcgacaccggaaacatcgacgcgaaggccgtggtgttgctgcggccggcatggaagtgaggaagcatggaagccgccgaaatgcacgtgtacgacatcaccaccggcaaacatgtgacgcgcctgccgttcaccttgtgctcgtggcaggaatcccgcaaccgtgagggcggcatgagcgtcgagctcgcgatgaccgacgtgctgcgtgatatgggggctcggggactgctgcagccttggcgcgtcatcgtcgcctacctgccggcacaagggccagctcacgccggaccgctgacgtatgtcaaatgggcggcttccgaccacaaagtcaccttgaccgtaggcggcggtctcactctcctgacgaaacgccttgtcatcggccgccagctcgcggcgtcctggcgcgaccacagcgtcgtcgtggacgagcggaagccagccggcgacctcgcgctcaccctgcgcggcccgtactgcagggacatcgcctgccagctggtcgacgaggccctgcagtggggcatgctgccgatcaccctgcccggattcgtccgcaagggcagtctgacccgcacctactacgcgtgggatctggccaccgtcgccgaccggctcaccgacctgaccaacctcgagaacggcatcgagatacgcttcgcccctcgcatcagggacgatggatccatcatattcgacttcaccgcgaccgaccagacgctggccgaccgggcagcgacagatcgatggaacgccgtcatcccggacagccggatcatcctcgattccctcaccgacgacggagccgacctcacctcgcaagtctggctcaccggcggcaaggacaacgacaaaacgctcatgtgccgcagaagcacggaactgccacagaaacgcggctgcatgttcatgcaatccgtcgacacggagcacacgaccgtatcgagtatgaaaacactgcagtcacacgccgtatccgacctgcgcagacacgccttcccagcggaaaccttcgaattccgcgtgggcgaagagagagcgccgcacgtgggcgacaacatcgacgtgacggtctccgacgacttcatcggatcgtccacgctgcacgtcaccatcaccgacgtatcgggcacgtcggattccgactgggtgacggtcggcgctcaggaaaggagctgacatggctgatgacgataccatcgcttcgatggaagcgtcccaagggaccgtgctgtggctgggcgacggcacgtgcgcgggcggcggcgcgtccgacgcggcacaccggtattccactctcacgagcaaggcgctcggactcgtggaggagaaccacgccgccacgggcgtgggattcgccacgaagccggacatcggctctcaggtcgacgcggcctcgaagctcggtttggccggcgtggcgtacgtgttcctcatggccggcatcacggactcctacgattcgctcggcagcatgcgctccgccacggccgccgccgtccgcgcggcggcgaaggcatggcccggggcccgcgtggtggccggcgtcgcgccgggctgcctgaccggcttggacgacgccgcgctcgaacgcatggagctcgtgtggaccgcgatccgcctgggcgccggggacgcgggcgcgctcgtgtgcgatggattgtggaaggtgtgcggcagcgaccccgcgctgtgctcgtcgggcgggctgccgaacgacgacgggcacgcgctgctcgcggagtccatcgaggcgtcggtgcgcgaggaccagggcgagccgttggaccagccggtcgagaacctgacgcgcgtggtcacgtcgggcggcggggactggctgtcgcgctccctgcgggagtccaggaggcgcgaggccgagaaaagggaggcgaaccgtccgaccggcacggagctctcgaacatcacgtcgaagctggaggacgtgacgaaggggcaggccctgatgcaggccatccagcagcagatgctcgaccagctgcagcggcagcagaagatgctcgaatcccagcaggagcagctccgccagcagcaggcgtccctgcagtcgcagcagaagcagttggaatcgatcgtgggccagcagggcgaaacggtggcgtccctgcagacggtgactgccgacctgcagaagcaggcgcggaacatgagcgtactgctgaactggtgcaacgtgcagttcggggcgatctcgagctatgtggaaggctacgtgcccggctccaagccggcgctcgaatagacgggagaaacacgtatggcgactatgggtaggaaggtcgggcgtctggacgtgcgcctggtgcgtggggacagcgagcgtttgggtggccggtggcggcagaggtatccggacgggaccgtgaaggcggtggatctgagctcgtggagcggcgtggtcgaactgcgcagtccggatggttcggagttgtggtattcgcgtgcgtgcggggagatgacatcggacgggtatgcgatcgcggacatcccgccgtcggcgttcgaggacgcggtgtgggcgtcgcggcggaccggccagtggaaggtcacggtcacgtcgccggacggcgggaccaggcgcacgctgggctggggctattacgccctgtcggattgaaagtctcacgaaaggatttgatatgacggagcagatagtggacatcatggaggcgaacatgcccgtgtcgtcggacgtggcggccgtggcgaggtcggcaggcggcgcggcgggcggtgaggcggccggtcgtgtggtcggctcgttgcgctcgaatctgtccgggaaggtcgacaagtccggtgtgggtcaggtgacgatgctgaacctgtctcaggaggtcaaggaggcgttgaccggcgggagcgtgccggtggtgggcgagggaagcgtgtcttcgggcgcgattcagcccggtgcggtgaccgatgacaagatcccggtcggcgaggtcacgtccaagcgcgtctcgtccgtttccgggttgtcgttcgagcggctcacgtcgtgggagaacacgctggacgtgcgtggatgcgaggcgttcaaaagctcctcgatcggctcgaccggcaacgagctgtccatcgcctccggtgattcgataaggatcaagcccgttgccggtgattcctgcatggcgttcctggtaccgattctcgacgttcccggtgagatatccgtgaaactgcgagtatggccgaaaccggcgcggtccgtctacagtccgaccaacttcacccctggaatatcggttaggatctgggatgcccggaatggcacccagaatgatctggtgctcggtagcgtttacgtgaaggtcgacgacggtctgacggccgtgtatcgcagcgacggcaatcctaacggcaacggcttcctcttcgtccagatccccgtcgaagcatcggaatgcgggacggtgttcggcgtcacgatgctcgcatcgggagggcatgggttgtgcttggggtcggaacccgtgggattcgatcgcgtgaccccgtcggtgatccgcgatttcacctgcatccagtcaaccgtgcaggctacgggaaccatcaacggtgattccgcgtcatggacgccgaatataaatggtggcggcgtgagctcgtccagcccgttgtcgaatctggtggacgcgtcgatggggatgctcgaggtcgcgttccactgcgaccgcgaggtcatcgtgtatgcgttgaccaaggacgacggaaacgtgctgcaccagcacgccgacctgatgcagagagtcggtccgggcgacgtgagggtcacgtgggatctggccgagatcgacgcgcacaagggccatcccatcgaccgcgtatggatcgttggcgctgaagccggggtcgagtacaccatcaccggggtgacgttccgtatggtcgacgagttcgaaggggacggcgacctgcgcggcacgctgcggcgcatccaatccgccgcctccaagccggccggacagttgaggctcgtcagcccggacggcacccggtggcggctgaccgtgggcgacgacggcgtcctgggcgcggtcgccgacacgcgcgtcgtcacgaacgtcgccatcctcggcaacagcctgacggccaacgggatcgcgggatggtcgtgcggcatggcagcgagcggccccgagaccgactgggtatggctcaccgtccagcgcctcaaggaccgcaaccctgccgtaacgttccactgctgggacgacgaggaccggagcggcgacaccgtgaacaggggcagctgcaacccgttcgagacaaacgccggacaggcgagcatcgcgacactcgtcgggaacgtccccgcggacgcggacctcgtcatcctgcagatcggcgacaacgtcaacaccgacgaacgcaagaccaaataccgggccaacatcaacggcctcatgaccgccatccgcgcgaaggccccggactgcatcctggtgtacctgggcagctggttcgccaaacccgacctcgagaccgaggtgtccgaggcgtgcgaacgatccggcgcgctccgggtcgacatcgccgacctgcacacccaggccaaccagaacacggtcggcgcgtcctgcacctggcccgaccgcaccacgcacgtcatcgacagcagcggcgtggccatgcaccccggcgaccccggcatgaaggccatcgccgaccggctctggcagaccctcgacccactcgtcaaacaagcatgaagccacaacggaaaaggagacaccacatgaccatcacgggaaccaaccaggggggtaatcctccctagcatcatccgtttctccctgaggggaggcgtgcggtgagcgagcagatcgtggacctgatcgaggccgtatacccgggtccgcgcggcctgaccggcccgcagggcccgcagggcctgccgggcgtgaacgcggtggacaacgacgaggcggtcgcctcgtacatcgtttcggaggggagcggaacggcctcggccctggcggagtgctggccgcggttctcccgccgccggttcgtggtgttcggcgacagctggacgaccccgttggccggcggggtgtgcatccccgaggaggccgtggccatggtcggcgggagcatcgtcgcgaactacggggtcgcgggcgcgaagctggccccggtcacgatgacagggaactgcctcgaggcccaggccaacgcggcggccgcggacgggaccgtggacaagagcctggtgtccgacgtgctcgtgatcatgggcgtcaacaacctcaacggctcctatgtgacgtacctgccggacgaggcgacgtgccggaacctgttcgagggcctgcgcatgtacccgcacgcgcgctactggtacgccgcgaactccaaacggtgcgtcaacagggaccaggccgcgtggacgttctaccagcggttcatgcaatgcgcgaacgacgcggggttcgccgcggccaggcacagccccatgtggcattggggacgcgacgacctgtgggactccgacgaccccggcgccaggcacatgggcgagaccgggcagcgcgtgtgggccgccaggctcgccgcatggctcgacgggcaggaatgggaaccctacttccgcgtgcccgtcagcgtgcacgacgacctgctcgccatcgacccggacacgtacgtgagccccgggatcatcaccgtggacggagggctgctgcgcgtcaacgtgagcatcgtcgccaggaaccccgactaccagggcaccggctacgtcaacgcactccaggtcgaccgccggtacgcctcggtgctgggcatggcacgatacccgatgtcctaccacgagtacaaccagagcatcaccggcgacgtgaccgcgaagatcatggaccgcgtcgaccggtgctggaagatcgacgcgtacgggagaatcgccatcgaccccggcgccatccggaacaacaagggatggatccagctcacgggcagcgtcccactcgacgaacccgaccgataggcggggcgcgtcccgtcacacggcgttctggtaccggccccacaggtaaggtctcgacgcgttccttcccgtgaccgtcgggaggacgagggtgattctcccggtcaggtcccagcccatgcgggacatgggcgtgatgtcgcccgcgcggtcgggcagataggtgctggataccgtgtcgtagagcacgaaaccgaacggcggcatgcggatgaacgccatgtcgcagaacgtcccgtcgtcgaacaggacccgcatccacccggagaacacgctctccccgtcaagcttcggaaggacggccatgtgcagacggtagcgtgccggcaacgaagtgttcccccggtcgagcaggaagtccctgcagtcaagcatgctgcccggcgccgtcgtggcgcagaagttcgacaccacctgcttgacgaacgccaggggacggaacccctcgttcagatcgaaccggcagtaccgctccacaccgtcggtctcggactcgttccggtcacggtcgagcccgtcgaggatgtcgccggattcatgggcgaaatccaggtacaggcctttgaacgtttccacgtagttggcgccgagatactcgttgcagtcctcgcacagcgtcttgaacgtcatcccgtgtgactgcctgtatccgtcgtcgtcccggacctccatgtcgaacaacgagtgcatcaccgcctcatccccgcggtgcacgaccaccacatggtcgttgcccgtggaccggggagggatgtgctcgagcgtcagcggtttgtgttcgccgcaaatcctgcagaacctgttgcccataccccgagcatatacgtcgaaaggacagcctatgaatccgccagccggtaccccgttgtgggcggtgatcctgatcgcggtggtgccgagtctggccacggtcatagtggcggtgatccagtcccgtcagatccgcgggctgcgcgaccagcagtcggccacgaagtgggagatcacgaacgaccatcaggcgccgttgcgcgtggacatggacgagaagcacgagaaggtcatggacgcgatcgacggactgcgtgacgccatgaactgcgagttcaagacggtgaacgaacgcgtcgccaacgccgaacgcgagcatctggagctgcgcgaggacatccgcgaactgaggaggcatcgatgatcgtcatcgtgatgatagtcgccgtaaccgtcgtgttgatgttcgtgcgcggcggcgacgaccgctggtaacagccagccaatcagaaattccgccccgcccgatcgggtggggcttttccatatccatcaacagtaaggagaggaattggacatcaagaacaagagcaagccgagcctggtaatgcggatcctcgcggtcgtcgtcgccgtgctgctcgcgtgcacgccggcgatcgcgatggccgacgtgtccggcatcgacgtgtccggctggcaggcctcgaacgtgacctgcaccgccagctacgacttcgccgtagtcaaggtgtcccagggcgtaggcttcgagaactccagttggcgcacgcaggccaagtgcgtgacagaccggggcaagagcctcggcctgtaccactacgccggcggcaacaacgccgaggccgaggccgactacttcgtcggccgggcgagggactacatcggcagggccgtgctcgtgctcgactgggagtcctatcagaacgcccagtggggcaattccgactgggttcgccggttcgtccagcgcgtccacacgctcaccggcgtatggccgatggtgtacgtgcaggccagcgcgctgggccagatacccggcgacgtgcgcgccaactgcggcctgtgggtcgcccagtacgccagcaacgcgcccaccggctaccagagccgaccgtggaactacgcggtctacggcgaggccatgcgccagtacacctccaacggctggatcagcggctacaacgggccgctcgacctcaactacttcagaggcgacgcaagccagtggcaggcctacgccaaccccgccggcgcagccaagcccgcaaccccgccgcagaccgagaagccgccgacccagaccatcgacctacaggcactcgcgaccgccaccatccgtggcgactacggcaacggccagcagcggcgcgacgcgctcggcgcgaactacgacaaggtcatggcgatcgtcaaccagcgcctcgccggcaccgcgaccgtagcgccgcagcaggccgcgcaggccaacacgacccgcgtggccgtccgctccggcgacaccatgagcggcatcgcctcgcgcaccggcctgtggccgctgtccaagtggagcgtgcccagcggcaacctcaacctgatctaccccggtcaggtcgtcacctacaacggcggcggcagcgtcgccaccggcagcaacgcgccgccggcaacccgtaccgtgaccgtgcgcagcggcgacaccctcagcggcatcgccgcccgcctcggcatcggctacacgcagctcaccggctatcgcagcggcaaccccaacgtgatctaccccggcgaagtgctgcactactgaactactgagaacccgaacccaacctgggaaccccgcaccttagccgggcggggttcccaggttccaactgcagaatcgaggacaatatgaccgacgaaaacaccgaacccaagaccgccggcacggagccgaccgcgcccgattggctgctgccgaaccgagcctatgacgtgctcaaatggctcgcgctgatcgtgctgccggccatcggcgtgctcgtgcagaccctcggccccgtatggggctggacgtgggccgatcaggccgcgacgaccatcaacgccgtcgccctggccatcggcgtcgtcatcggcgcaagcaccctcaaggccaaggcatccaaaaccgaataaccataaaaacaccgcccctccatccggcataacgctggacggaggggcggttttcacgttttgggagtagctttccgaggctcattttttgcccacattttgcccacattttccgtaaaaacaggttaaaaaccgttaaaaccggttaaaacgaaaaaagccgctcagccctactcccgcaaggcaaagcggccattttccaacccactctcagctcagtgcgtccttcaacttgctgaagaagcctttcttttggccagcctgtggacgggatgcctgggagacgtgcgtggcgcctgaatcatgcgaggcggcgaactgttcgatgaggccgcgctcggtttcgttgagcttggtgggaatcagcacattgacgtgggcgatgaggttgccgcgctcgtccttgttgcggatgttcgtgacgcccagtcccttaagcgtcacagtgtcctcaggctggcagccggccgggatggacacggtcttctcaccatcgaacgtgtcaatggacagatcgtggccgagcacggcccagctcatcggcacctgaatccagcagtgcaggtcgtcgccatcgcgggtgaactgcttatccgccttgatgcgaatgtcgatgtacaggtcgccggcaacgccgccgccctcacccacttcgccctggttggccaaacgtagacgcgcgttgtcgttgatgccggcgggcacggtgacgcccacggtacgtgtggtacgcacacggccgtggcccatgcagctggggcacgggttcttgatgatggtaccgtggccctcgcaacgttcgcagggggcggaggtcatcatctggccgagcatggtgcgcacgaccttctgcatgaatccctggccgtggcagtcggggcaggtgaccggctgtgcgccgctctgggcgccggagccgccgcactcctggcacagggagaacgtgctgatcttgacgtgcgcggtgccgccgaacacggcggtcttcaggtcgatggacgcggaggccagggcgtcgcggccgggctgggtacgcggcaccgggccctgtgagccaccaccgaacgcggaaccgaagaacgtggagaacacgtcgctcatatcgccgaagcccgccccggagaagccgccggcaccggcgttcggatcgttcgggtcgacgcccgaatcatacatacggcgcttgtccggattggacagcacatcgtaggcgttgttcacttccttgaacttgtcctcgaattcagggcccgcgatgtcggggtggtacttacggctgagcttgcggtatgccttcttgatctcgtcgtcactggcgccgcgttccacacccagcgtctcgtaataatctgccacttgattgatcctttgtgttcgtttggtctgcaggtcattgtgccacagacggcggtcagtcttgggtccggccctcggagaggaaggcggtcaaatatctggctacggccctgacggcggccatagtggccgcatagtccatgtgggtcggccctatggagccgacgaaggcgatgggttccgtgtcgttcgtctggctctccgtctcggattcggtttcgggttcgcctacgggatcgttccccgccggttcgcccgccgcaccgctgcgcccatagccactgctgaccacggaggcatgcagtaggccgggggtgtgcatttcggagccgatggccacgcccacgccggatgcattcgtctcctcgctcaggttgctcatgagcttcatcagcacgacctgttcttccagcgcgtcgaagagtggggccagatcggccagggaccgggagtgggccaggtgcgaggtgccggacatgtacagttcgtccgcgcgttcgtccaatgccatcgattcgaaggcgtcggccagcgcgtcggccacgccgcgcaccgactcgtagccggcgctggcggcgatggatcgcacggtctccgcggatttcgatagggacagtccgacacattgttcgttgacggtgttggagagccggttgatctcgtccacggcgggcatggatgcgatggtcaggccgtgctgggccacgcggccggtgtcggtaatcaccaccgcgagcaacgtggtcatggcaacgggcaccatctccacgtgccgcaatgtggccttggccagcgatggcgaggtgactatggccacttgaccggtgatttcggacaacagtcgtgccgaacgctgcagcgcgtccttgagactcaccgatccggacaggaagctgttgatgccgcggcgctgcgcctcgctgagcggcaccacggtagcaagtcggtccacaaagtatcgatagcccttttcggtgggcacacgaccggccgaagtgtgcggctgaatcagatatccttcatcctccagagcggacatgtcgttacggatggtggccgaactgacgccgagatcatggtcgcgcgtcagcgaagtggagcccacgggctcctgagaacggatgtaatcctccaccacggcgcgcagcaccagcatgcgtcttgattgcgtcatgcgcgcctccttatatatgcatacatattcatatcagtcacggttcactcagggcgtaccccgacggtcggttcgccacgccgcgacacgcgggaacccagaaatattgcctctttcttggctccgccacgtgcaggtggcgcacttcaccttagaacattgtattagcactccttaggcttgagtgctaatgcgttcgtttgcagcgtagcaatgttcactgtgaacgctaacggaacacaaactaccaaaacacgccaaaattgcaccgcaacgtcgcaaaccgacgctagcatggtaatcgcaatgtgagggcgtcaagcgcccggcacaagccggatacgcggcccgaccaattggaaggaaagtaatccatgaccgaattcaaggagaccgagctcgacgagcgcgccatcaagatggcgaaggtcctttcggctgacgcggttgagaaggcaggctccggccaccccggctcccccgtctccctggcgcccgtcgcctacacgctgtaccagcacttcatcaagcacgatccgaatgatcccaactgggaaggccgcgatcgcttcatcctttccggtggccatgcctccctcacccagtacgtccagctgtacttctccggctacggcgtgaccctggacgaccttaagaacttccgtggcggcgctgccacccgcaccccgggccacccggagtacggcctgaccccgggcatcgaaatgaccaccggccctctgggccagggcttcgcctccgccatcggctttgcctacggcgagcgtttccagcgcggtctgcttgacccggagaccccgaaggaagattccccgttctaccacaagatttgggccatctgtggtgaaggcgacatcgaggagggcatctccggcgaggccgcttccctggccgccaaccagaagctcggcaacctgaccgtgatcttcgacgccaaccgcatccagatcgaaggcgacaccaacctggtgctggccgaggacgtgctcaagcgcttccaggcctacggctggtacaccgacgagttcagcttcatccagcccgacggctcctacaaggaggacatcgagggtctggccgacgtcatcgccaaggccgaagccgccgccccggaccagccgaagctcatcaaggtccactccctgatcgcctggccgaccccgggcaagaccaacgacccgtcctcccacggctccaagctgggcgccgaggccgtcgccggcctcaagaaactcctcggctacgatccggaggagtccttccacgtcgacgaagaagccctggcccacgcccgcaaggtcgccgatcgcggcctggaggcccacaaggcctgggacgagaagttcgacgcctggcgcaaggccaacccggacaaggccgccctgtacgaccgtctgaaggccggtgaactgccggaaggcttcgacaaggcccttgacgaccttgaggccaccttcgaagtcggcaagggtgtcgccactcgtggcgcctccggctccgtgctcaacgccatcgccgccgtcatgccggaactctggggcggctccgccgacctcggtggctccaacaagaccgacctcaagggcgctgccaccttcgccccggccgagtgcgccaccaagcagtggccgaactgcaacgagttcggtcgccagctgcacttcggcgtgcgcgagttcaccatgggctgcatcaccaacggcatcctgctgggttcccacacccgtccgttcggcggcaccttcttcatgttctccgactacgagcgttccgccgttcgtctggccgccctcatgcagatcccgaacctgtacatctggtcccacgactccgtcgccgtcggcgaggacggcccgacccaccagccggttgagcaccttgcttccttccgcgcgattcctcagcttgaggtcattcgcccggccgacgccttcgagaccgccgaggcttaccgttacttcttcgagaagaagaacaccctgcctggcgccatggttctgacccgtcagggtgtcccggttcttgccgagaccgctgccaaggccaaggacggtgtcaagaagggcgcttacatcctggtcgacaccgagggtactccggacgtcatcctcatggcttccggttccgaggtccagtgggctgtggctgccgccaagaccctggccggcgagggcgtcaaggctcgcgtcgtgtccgtgccgtccatggaatggttcgaggagcaggacgccgagtataaggaggctgtgcttccggccactgtcaaggctcgtgtctccgtcgaggccggcgttgccatgccgtggtacaagtacctcggttcctacggcaagcctgtctccatcgagcagttcggcctgcagggtgacggcgctcagaacatgatcgacctcggcatcaccgccgagcacgtggtggaagccgccaaggcctccatcgccgaagtcgaagccgccaagtgagcaactaagcaataattcaataattgttggctcccctccctgaggggagctgtcaggcgaaagcttgactgaggggagcaatgcttgagcccactcccctcagtccgcgttgcggacagctcccctctcccaggagaggggagcctagggcttgaatccaaggagaaaataaatgactgaagcaactcagcgtacgtccgacaacggcgtttccatctggctggacgacctgtcccgctcccgcatcgagtccggctccctgcaggacctcatcgccaacaagaacgtggtcggcgttaccaccaacccgtccatcttccagaaggccctgagccaggtcggcccgtacgacgctcagctcaaggagctcggcaagggtgacgttgagaccgctgtccgcgagctcaccaccaccgacgtgcgcaatgccaccgacctcttccgcgagatcgctgaggctaccgacttcgtcgacggccgcgtctccatcgaggtcgacccgcgtctggcccacgacaccgagaacaccgccaagcaggctgtggaactctgggagaaggtcaaccgcccgaacgccatgatcaagatcccggcaaccctcgaaggcctgccggccatcaccgccaccctggccaagggcatctccgtcaacgtcaccctgatcttctcgctcgagcgttacgagcaggtcatcgacgccttcatcgagggcatcgcccaggctgacgccaacggccacgacctgaagcacatcggctccgttgcttccttcttcgtctcccgcgtggacaccgctgtcgacaagctgctggaagccaacggctccgacgaagccaaggctctggagggcaaggctgctgtggccaacgctcgcctggcttacgagctcttcgagaagaagttcgctgaggatccgcgttgggccgacctggctgccaagggcgccaaggttcagcgcccgctgtgggcttccaccggcaccaagaacgctgcctactccgactgcaagtacgttgacgagctcgttgctaagcacatcgtcaacaccatgccggagaagaccctgaacgctctggccgaccacggcaacggcgctccgtccatcgagggcacctacgaggagtcccacgccgtcatca

SEQ ID NO: 116 - DNA, 131741 bp, Unknown
  R206_24m  MAG No. k141_31413
gaccaatgccgaacccgccccatcaaaccccaccaaaccaagggacagcccattgcgcatcaaccgtagcgtccgccccgaaccgtacactcacaggtggttttgtgattccatagcgtgcagccaaggcagtacgattgccggtttatccgcacgcacaggtacctacgccggttggtaaaccttacattccatacattgcaaccgaacgtttaggagcatgtatgcctgagcagcatattgataacgagaagattcccacacgtcttatcggcgcgattgtggctgtcggctcacttgccttcattggcattctgaccgaaaccgtgatgaccgtgcttttccccgcactgatgcgcgaattccatgtcgacacggccactgtgcaatggattaccacgatttatctgttggcggtggccgccaccatgcccatcagctcgtttttgaagcgccgattcgcactgaaaaccatttttcttgcggctgtgattctggccatcgttggctcgctgatcatgatcgtcgcccaagccttcccgctgctgattgtcgcccgcattattcagggcattggctcaggcgtggccacgccgttgatgatcaacatcattctggagcagtctcctcgttcgaaaatcggccgattgatgggcgtaggatcgctggtcattaccgtggctccggccatcggcccgaccgtcggcggcgcggtgaccacagtgctgccgtggcgcgcgattttcgtcatcgccattccgctggtgctaatcgcagcatgcatcggcatgaagtgcattgagcagaagacaccgaccgaggctgcctatcttgacccgattcagcttgggtccattgttgtcgcgttggtcggtctggtgctggcgctcaaccaaggtggcgtggccatcagtgcggcggtgtccggcaagtcagccacacgctccggcattatcgccattgtcagtctgattgtgggcctcgccttgttgatcgtgttcgccatgagttccaagcgtgccttctccccgctgctgcgccttggcattctcaaggatcccgccgtactgttacacgcctgcgcatatctgctgctgccattggtcgccatcggctacggctatgtcatcaccaatgtggcacagctctcgctcggcaccacggcatttgtggccggctctctggtgctgcccggagcactggtcggcgctgtctgtgccccgcttggcggctggttctacgataagttcggcgcggtcaagccgattctgattccgatcggcatcgctattttgggcccagtgcttatgctggtgttctcgatgcagcttacgcccgtgctgctcgccggattctatttcattttcggtctgttctattccatcggcaatgcgaatgtgatgaccagtggcctgtcggaggtctctcccgagttcaagccggacggcaacgccattttcaacacgtgtcttcagtttggtggcgctgccggtaccgcactgttctccacgattctttccgtggctcaggccggcgcaggagaagaaggcaccgctgagtttgctcacgccactgccgtcggcggcacatggacgtttgccacgatgacggttatctgcctgattggctggtgctgtctggccaccgcgttccgcattcgcgcggcacgtaagcgtgcataaatccgatcatcaatagagtcccagctttccaaacacgtgtggggcgtgccccgggggaacccccgggcccgccccccacccaaatgaaaggaagaaaaggagaaagaaagctttggcgggcagtgccggctgctgtgaccttgccatcacagcagccgggctgatcccgcctattcagttatggtgtgtgtcgtattcggtgcggagaccgagcgggcaagcccgctattttttatctccgccgaccgccatcaccgcgcgctgaagcacaacgaagacgaggatcatgagaccgataacgatggtggtccattcggccggcacaccgaagtcagaggtgagcggatcgaggatggagcggaccagagagccgagcacggagccgagcacgtagccgaagccaccggtgatgatcgtaccgccgatgaccacggaggcaacggcgtcgagctcccagccaatacccacagtgttcttggcagagccgatgtttgcggtgtacacgatcgaggccagggcggcgagagtcgcagaggtcaagtagatgatgtactgcgtgcgcttgaccggcagacccataagttccgcggaggaacgggagccgccgatggcgtagatggtgcgtccggtgcgggtatggtgcaggaagacgtagccgaagaccacaaccaccagtgcgatgatcacgccgacgttgaaggacagatcgttggagatcttcggattgtcgatgatcttgatctcgttggagatgaacgagaagtcattgccctgcgggaaggtcagcgagtcggtggagatgatggaggcaagaccacgggccaggaacatcgtcgacagggtcgcgatgaacggctgcatgttgaattcctcgatcaaggtgccggccagcaggccgaacacagcgccgatgagcagcatgatgatcatgaccaggaaggcgggcacgccggcgttcgccagcttcaggccgacgactgcggtgatggccacgatagcaccgacagacaaatcgataccaccggtcagaatcggcagggtcatggccacagccagaataatcaggtaggcgtggtcaatgaacagggaggagatgaagcccagtcgaatgtaggtgccgaacaacgcctgacccatgatgatcatcaggatgaagatcaccacggccgcgagggtcgggatcatctgacgatcgagcttgaagcccttcttgggagccttcactttgtttgccgtagctgttgtcatgctgccaccgccttagcttgagccttgagcgcgcgcttgcgtttcatattcgcgctcaggttgtgaatcttcggagcctgcatcacgcagatcacaatcacaacgacggcgaagaaggccggagttgcctcggcgttgacgcccagggtgatgatggtcttgcggatcatggcgataattacagcaccgacagcagagccggcgagggagagcttaccacccagcagtgaagtaccgccgatgacgactgccagaatggcgtatatttcgaggtcctgaccggtcttaaccacgtcgacacgcatcacggatgcggtggcgaacagaccagcgatggccgcgaggaagccggaaatcgcgtagacgaggaagaggatcttcttcggcttgataccggtcatacgggaggcttcctggttgatgcccacggcctcaatcatcatgcccatagcggtcttgcggcacagcaggccaacgagaatcacaatgataacggcgatgacgaagttggcgggaatgcccagaatgaagccgttggcgaaccacttcagcggttcgttgccagcaactgcggaggcgtcggtgttctcaccggaggtgatgaccttggccataccacggccggcgagcatcataatcagggtggtgatgaacggctgtaggcccaggaaggaaaccagagcgccgttgacgcagccaatggccagaccaacagccaaggcgatgaggatggagagccacacgttcatgccattggacagggtctgcatggcggcggcacctgccactgccataacggaaccgaccgaaaggtcgataccggcggtggagataaccaaggtcataccggttgcaatcatcaggtatcgggcagattcctggagcatggtgatcagcgggccggccagaccaccggtgttgctgttccagctcagagccaggaagtcatgctggaagatggtgcagatgatgaccagaagaatgaatgcgacgatcgaccaggtcaggttgctgctcagcagcttcttgacaaagttgttgccctcggcttttgccttttcagccatctcatgcctcctttccggtgtttacgttggtgttagcgatggtttcgacgatggtcgcctgagagacggtgtcgtcgttttcgatttctgcgatcttgtggcggtccttgagaacctcgatgtcgtcggacagacgcacgacctcttcaagctcggaggagatgaagacaacgcccatgccctgagaagccaggtcaagcacgacctgctgaatttcagccttggcaccgatatcgataccacgggtcggctcgtccagaatcagcagctcggggtgcgtggccagccaacggccaatgagcaccttctgctggttgccgccggagagattcttgaccgggcgatccgggtcggcgggacgaacgttgagttccttcatgtacttgtcaacgatggcgtccgcttccttcttgggaatcggcttgaacataccgcgcgttgcctgcagggcgataaggatgttctggcggacggtcaggtcgccgataatgccctcatcacgacggttttcggtggagtacgcgattttgttcttcaaagccgtgtacggatcggagatgttgaccttcttgccgttgagcgtgtaggtacccgaatccggcttgtcggcaccatacaggagtcgaccaagctcggtacgaccggagcccagcaggccagcgaagccaacgacctcccccttgtagatgtcaacatcaaccgggttgatggtgcccttcttgccgaggcccttgacatcgacgatcggcttctcgccaggggtgatttcacggcgagccttcttggcaccaatctgggacagctcggcggcggacttaccaatcatcatgccgatgagttcgtcgcgcggggtgtccttggtcatgacctccttgatgaactggccgttacgcagaatggtcagacgatcggtaatctcataaatctgatcgaggaagtgggagacgaagaggatggccacgcccgagtcacgcaccttgcgcatgatcgcgaacaggtccctgacctcgttggcatccagcgaagaggtcggctcatcgagaatcagcaccttggcgttgataaccatagcgcgggcgatggcgaccagctgctgcatagcgatggagatggagctcagcggagtgtgcgggtcaatggattcgaggcccatctgtgccaaatacttcttggcggcctcgtgggtcttcttccagtcgatgccgaaggggccgcgcttttcgtggcccagcatcacgttctcaccgacggaaaggttggtgcacaggttcacttcctgatacacggtggcgataccggcgttttgtgcgtcgagggtgccgttgaactgctgaggcttgccgtccaccataatggagccggcgttgatcttgtacacaccggtcagagccttaatcatggtggacttgcctgcaccgttctcacccatcagggcgtgaacttcacccgggtagagagtcaaatcaacaccatccaaggccttgacgcccgggaattcaatcgtaatgcctttcattacgacgatggggtttttatctgtcatgtctttgccttaaacgagaatgagatgttatcgttttgtgatatttgagccacacatgagtgatggtgtggaaggaacatccttctcacaccatcacaccaattatttggtccagttatcaatgagtcgcagcagacttatcagtaggcgcgggtgttgttgtccagggcttccttggcggaggcggcgtcgaaggtcttggactcgatctcgatgtccttctcaacggtcttgccatccagatagtccttgacggcctgagcggtttccttaccgaagatcgggttgtactcgatcacgtaggagaggtcgccatcaacaagagcctgcagagcgttcttggtaccgtcgatggtgatgatcttgaccttgcccttgaggccggcggcgtcaacagcctgagcggcaccgaggcccatctcgtcgttctgagcgaagatgaactgcgggttgtcggacttgtacttgtcgagcagaccagcggtcacggtcttggcctcatcagtggaccagttagcggactgggactcaagaaccttgacgttggaggcaaccttgttgtcccaaccagtgccacgatccttcaccacggacaggccggcagggccttcgaggatgaagccgttggcgccatccgggaagttcttgttcacgaactcggcagcctgctcgccgcaccagacgttggacggtccgatgtgagcaacgatggccttcttggcctcggcgtccttgacgtccacgttacggtcaacggtgaagaccggaatctcagcctcagcggccttcttcagggagtcatcccaaccggaatcctcggtggaggacaggatgatggcgtcgacttcgtcgttaacgaacttgttgaacgcctgaatctgcttctgctgatcgttgttctgggtcggagagtaagtcaggtcaaagccggcatcctcgaatgcctgctgaatgtccttctcgttggcggtacggaagccgccctcagggcccacagcaacgaagccaaccgtcttcttgccggagtccgagctgccacctgcgttgctggaaccgcatgcggcaacgctgacaagcgcagcagcagaagcaacgagggcaatggccttcttccaattcttcataaatactcctcctcgagcagtgtttattttttggatgatcttccatcctgtttggtgactgttcgtcatcgacaatctctagtgtgacgctcacaggccaaatgttcaatcgcatgcgataacagtttgataacaggtttataacagtttgataacagtagttcaaaaaacggcttcacagcgccgttttgccttgttattaagccataataagaggtggttgcacggcggcaatgccgctcgtcagccgagcgacaaagccgccgcatcacaacacaagaaaagttattatgaacaccgtttttcttataccatctactgcgcaccgagggcagtgacctggctatcggcgatggtccaggaaccgtcgagtgagccggaaacggagcgcacaatacccaaatcgtccacaatggccaggcgacgagacaggctgatctgccccgatgccatcgacgttatgattccattgggtaaacgctgcgcattggccgggcctggtgccatttgacgccatgcctcttgttgttcgctgtttccctcaggaggtgtggtggcgtacaccagattcagatcattgtagaacgtgagcatggtgacgtgcctgagcacactcacttgggtggccgctttgctcagaccgctcagtgttttatcaccgttgcgcgccacaccggtcatcatcacgccgttcgtgtcctcgcccccgactgccaacgccaatcggcacccttccggagaaaccgccaatgccacaatgctgtcggcagcaccaagccaatcaagcttcatatcggtttccttgcccccatctgacacatgcaattcgcgcccgttctcggatacagcccatacttcgccatccagaccttcggtaatcgatcgcatcggctcgccggagaacatcaccccacaggacgcaccatcagatttcaggcattcgaccacgccgtccgcacgcaacaccgcgccgccggatgaggaaaaaacgaagccccgagcatcgtcatatccgggggcctcccctacacgcaacggactggagctggccagggaaacgatatgaccaccggtcaacgtgtatacgcccgctgtcggctgctcggtagtaagtttcacatttgcgtcggcatcggaatagtccactccatcgccggtaatcctcagcgcgtattcggcattgccgtcgcccatagtcagacggatgcgatgtaccagcaggcctcgttcttcctcgttcaacgcattgataccgctgttgaggtgtatctccaccacattgttcttcaccggcacgctgtcgaccgcgagtttgatggtagacaagccggcgcctcgcagcactccttccaaccaggagggtgcatccgagagcacttcaccgactgcctgggtgcgccagttgcgccagctcaaccaacgaatatccgggataagttgcttgccggaagtactcacctgatacacggatacttggcggaacacctgttcaaaatctgcggtggaaatcaccacgccgctttccaatgacgagatgcgccattggccgcttttcttcatcagcgtatagggaagcctgcgcgtttgggtgctgtttgacggcgtgtatacgccatgcgaatccaaggaacccaccacctgaagttccacttccacaatcagtgagctttccgcaccttgtggcgcgcttatggtgttggcgcgtcggcggaaatcaggggtgccgctgtataccagtgccgcagaatctccattccacccggcagaagccgagccagtcaggaattcgcgagccacgcgatagccatcggactgcacgccagcaggcatagcgtcatagaaccctttgacaatggtttccggctgtgcatcgtccgcaggcccctgaggattggtgtaaacacgctgggtctgctgttccaccggtgccagagtctgcaccgagccgctaatcggcaaaccgaacggacttgagcatgccgtcatcgtgatgcaacaggctatggccgcgcctgcggcggcaatcgttctggtcactcgtctcatagtggcctccccatcatcgtgtcgcggcgaacctcatgataatcatgtgtgacttggctggtggccacaccaaacccaccggtaacacgcaggtcatccggcgtttcagaagcaaaattcaccggcagttcagcgtccgccacctcaccttggtcggggtcacgcggcagcaataccaagaaccaggtgccctcccccactgccgaacgtacacggatactaccgtggtgcagcaaggcatcagtcatggcgatggccaggcccaatccggtgccgccggtaacgcgtgaacgtgaaaggtcgcctctccagaatcgatcgaatacatgagcgactttgtcttcgtcgataccaacgccatagtcgcgaacgctgatggccacggctttgcggttggccgcgacgcgcacttcgatcggccggtcctcagcgaaatcgacggcattggccaacagatttctgacgatgcgaatcactcgacgcgaatcgatacgagtcaaaacctgcacattgggcagatacgtgtgaatcggcacccgtttggcttgggcgatgccgtcaacttggtccactgccgtttcaattggttcgcataaatcggtttccacaaggtcgagtgccgcataaccggcatcgtagcgggagatttccaacagatcggcgagcatgtcttggaatcgactgatctggccggccaacagttcgaccgtacgcttggtggaggggtcgaagccgtcttttttcatttcgagcaggtcggaagccatacgcatggtggtcaccggggtacgcaattcatgactgacgtcggacacaaatcgtttctggaaaacgcttgcttcctccagctcatcgatcttctggttgagcgcatcagccatcgtattgaaggattgctgcagcacaccaagctcatccttacgatccacggtaacgcgcatatcgagattgccggaggccagtgtttccgaggccgctgccactcgtccaatcgggcgcacgatgccacgaatcaccagccagattactacgcccaccacgatggacagcaacgcacagatgaccaccagactgagctgaatctgcgtcaaggactgctgctggaacgtgtacgaataaatggcgaagaattcgaggttgccggccacgccaaagtccaatacggtgccgagcaccgctgcgggcgtcccgctgcccggcatgccggaatcaccgggaatttcgaccggctgatagaacacgctgtcatccaagtcggaagccacggacgaacggatgtcgtcagaaatcagactttgatagctgggttcggtggatacggggatgatggcacgcgagttggtatcacgactccacaaatacacacctatcaggttggaggacccctcggattgcaacgaggacgccaagtcattgaccagctgttggatctgcactacggcggagacatcggccgcgtccagactggtttgggcctgctgcaccatgtttgaatagtcggcacgcgactgcgaagtgatttgggtaagcagcgaggcgcgcactgataccatcgatacgccagagaagacgatggccacggccagcgtaagaatcacggtgagggccacggtgcgggcctgcagtgagcgacgaacttcagcgcgtccgtggcgcagcaagcgtttgagactgaatcgagggcgcaggttcattgttcaggagtgacgaacttgtagccgataccgcgtacggtctgcacgatttgcgggttctcggggtcgtcctccactttggccctaaggcgttgaacatgcacattgaccaggcgcgtatcgccggaattctcgtatccccagacattcttgagcaggctggaacgactgatggcctcgccggcggcggccgcaagcatgaacagcagctcgaattccatcggagtgagattcaggtccttgccatccttggtggcggtgtgttccaaacggtcgatgacgatgggtccgcgttccagatggttgacgtttgcattgccaccgcttgcgccaccggtggcaccgtcttcggcggccggcttggcgatgcggaagcgtgcacggatacgcgccagcagttcggctactttgaagggcttgggcacgtagtcgtcggcaccggcttccaagccggccacgacgtcaagtgtgtctgatttggcggtgagcatgataatcggcacattagaggtagctctgatgcggcgggccacctccgtgccgtccagcccggggagcataacgtcaagcagaatcaaatcgggcttgacgatggggaacatttccacagccctcagcccgtccaggcaggtcacagtctggaatccctcgttttccaaaacaagactaagcatttcgccgatggcctgatcatcgtccacgatgaagatggtcgccatggtgtttgcctcccctttttccactgttattgttgcgttacactttactcccctatgttcatttctgttcgggttccccaccatgcagtatcgggcgaatcttggcaagacgctggctgacttcgtgttcatagccgcaatcgttgggatggtagtactcggtgccacgcagctcttcgggcatatattcctgtggcgccacggcaccgggccaatcgtgcgcatacttgtagccctcgtggttgccccactctttcataagcttggtgggggcgttcctcaaatacagcggaacagcgccgatcttgccggtatccacgtccgcgagcgcctggttaatggcgttatagctggcatttgatttgggcgcggtggccacggcaatcgtggcttcggccaaaataatacgtgcctcgggcatgccgaccagcgccacggcctgcgccgcggccacggtgacctgcaaaatctgcggggcggccatgccgacttcctcgctggcggcaatcatgatgcgacgggcgatgaagcgcggatcttcacccgctttcagcatgcgcgccagataatggatggcggcatccggatcggagccccgcatggatttgatgaatgcggaaatcacgtcgtaatggtcatcgccgtctttgtcgtagcgcacggtggcggtgtccattaccgtagccacgatttcggaggtgatgatgggtcggcgtgcgccctttttgcgggcttcgtcgccggtgaccgcgccagccgcggcctccagaatcgtgagactcttgcgtgcgtcgccaccggccatgcgcacgatatcggcgatggcttcgtccgtggctttgacctcgtccctgagaccgcggtcatcagtcagcgcgcgctgtaccagttcggtgagctgatcaggctccaatgactcaagcttgacgaccaccgaacgggagagcaacggtttgatgatggaaaagctcgggttctcggtggtggcgccgataaaggtcacgtcgcggttttcgacggcgggaagcagcgcatcctgctgggatttggagaagcgatgcacctcgtcgatgaacagtacggtttcccggccgcgtgacacgagccgttcgtgagcgcgggtgagtacgtcgcgcacgtctttgacgccggaggtcacggcggagagttcctcaaacacgcggccggattggccggccacgatggtggcgagcgtggtcttgccgacgcctggagggccgaacaggattacggagctcggcgcggtgagactgcctttgctggccggattggcgaggcggcgcagcggcgagccctggcccaacacctgcgtttggccaatcacctcgtccaaagtgcgtggacgcatgcgcaccgccaacggccgtgtcatcgactccggcgcatcagccgccccaaacaaatcgttctcactcataacgtcctatagtaccccagtgttcgaacagacgttcgagctgcaccttggcttccctcagagaggggagccaggaatcagttactcaccttgtagtcgtggaagactacttcgccggtgtcttgggtggcgtcaaggtccacgatgccttcgatggcccagtcgtggtcgccatcggaatcatcgataatctgacgcaccttccacgtatgctcgtcgttctcgtgcttgtcatccaacatgaacagttcgggcgagcgcgcttcggcgccgatgcccacgtactcgtgctcgtcgtagtagtcgtcgagcacatcttcccattcgtgcacgccgtagccccagtccttgtcgagcgcgccgagcttgtccggctggtcaaggtccataagccgcacacggcggaacaaggcattgcgcaccagcacggtaagaccacgacggtcctcgaccaccgcgctttttgcgccgggcgcggccaaggatgccgcagcctcggattggtcagccgagtcaccggcgttctcccattcgtccaccagcgaggagtcgatggagcgcacgagcacgcgcagccacgagatgatgtcttcgagttgctcgtcacgcttttcgggcggcacggtgcgcgacagcgtgcggtaggcgtccgagaggtagcgcaacagggtgccttcggagcgggcgatgttgtatcgggtgatgtatccggtgaagtcggaggcggtttccaccatgtcgcgcaccacggatttcggcgacagccagtagtcgttggcccacggcacatcgtggcggtactgatcgaacgcggcttcgagcatgtcttccagtggcttcggatacgtaatctcctgcagcttatccatacgctcgtcatagtcgagtccgtcggccttcatatcggccatcgccttgtctcgggcctgacgctcctgggcacgcagcacctgcttggggtcttcgagcgtggcctcggccatggagatcacgtccagcgcataggtgtcggactcggggtcgagcagttcgagcgcggccagcaggaacggggagagcggctggtcgagggcgaagtcgtccggcatatcaagggtcatgtagtagtccttgccgccgtccttgcggtcctcggtttcgatgacttcggtatcgaacagggtttggaagatctcgtcggcccgctggtgcagatgctccttctggtcgggggtctgcgcggaatcgtcgatgagatcgtcgatacgggcacgggcgtcaccgccctgcgccacttcattgagcaccatcgaatgcgtgattttcaggtgcgggaccagggtctccggttcagcgtcgatgagcttatcaaacgtgctctggttccaggtcacaaaaccttccggcgccttcttgcgcttgaccttcttgagtttcttcggatctcccccggccttggcgatggctttctggttttcgatttcatattcgggagcctcggcgatcaccagtccctcggtatcgaatcccatacggccagctcgtccggcaatctggtggaattcgcgggcgcgcaggcggcgcatcttggtgccgtcgaacttggtcagggccgtgagcaccacggagtgaatcggcacattgatgccgacgcccaatgtatcggtgccgcaaatcaccggcagcagaccctgctgggcgagctgttcgaccaggcggcggtagcgaggcagcatgccggcatgatggatgccgacaccggtgcgcagcagtcgctgcagaatcttgccgaaggctgtggtgaacttgacgcctttgatggcttctgcgatggcttggcgctgttccttgctggatacaccggtggaggcgagcgcttgcgcggtctccaatgcggcgtcctgcgaaaagtggaccacgtaaatcggggtttcgccgttgcggaaggcgagttccacggttttttccatcgggtcgagcgtgtattcgtagctcaacggcaccggtcgcggcgcgtcggcgattacatccacgtccggggtgtcgttcagatcggagagcttgtcggcgatggcgtccacattgccgagtgtggcgctcatcagcaggaactgggtctgcggcagcgtgagcagtggcacctgccacgcccagccgcgctccggatcaccgtaataatggaattcgtccatcgccacgaggcccacatcggcatgggtgccttcgcgcaaagcctgattggcgaggatttcggcggtgcagcagatgatcggcgcgtccgcgttgatgtggctgtcaccggtgatcatgccgacattgtcgcggccgaacacttcgaccaagtcgaagaatttctccgacaccagcgccttgatcggagcggtgtaataggagcggcggccagtgcatagggcggcgaagtgcatgccgagcgccaccagcgatttgcccgaaccggtcggggtattcaaaatcacatggtcgccggccaagaggtccataatggcctcttcctgatgcggccacggctcgatgcccttgacgtcttccacccagccgaagaaccgttcgtagatgtcgtcggccgtaagattccgttcgcgtccgtcgccgtcccattcgggggccagccgccccagggatccgtattccttctcgtcagtcataatgctcagtctacctagtggcctattccgacggcacgagccgccctccgtcgctatgcgacgcctcccgccagcgggcggagccatgcgaagagctgtgccatgcgcttggctccgccaatgggaggatcgctcacgccaaccggcggcgcacctcgtcggggtccacctcgggttcgaggggaggccaggtcatgttcatgttcttcaaggtggtgcgcagcagttcggagaccacggctcgcgaataccagcggttatcggccggaacgaggtaccacggtgcggcggccgtgctggttttctcgaacacttcctgccaagcgaacatgtactcatcccatcggtcgcgggcctcgaggtcggagatatcgaatttccagaacttggtgggatcatccagcctcccaagaaagtgttttttctgttcttcctggcttaccacgaggaagatcttgaggatggcgcatccgctggcggccagttcacgttcgaaatcgttgatctggtcgtagcgggcacgccatacgtcttcgggataggtgccatagacgtgcggcatgaccacatcttcataatgggagcggtcgaatacggcaatccaccccggcttgggcaattcacgcttcacgcgccagaggaagtcgtggtcaagctcctcggccgcaggcttgccgaagccatggtaatggatgcccatcgggtcgccttggctgaacacgtgacgcacaatgccgcccttgccggaggcatccatgccttgcagcacgatgagcagccgccgtgtcgagcctttgacgccattcgcgtacatgagccgctggtatcgggcgatttcggaggagctgatcgaaatgaacttctcggcatcctctttattgccgtcgaatccgggagtggaatcgccttcgacatcagtgacctgcatgccgtggtggaacataagacgttgagcgggcggcaacgaccatacggcgctgagcagttcactggatttcgccgcacgcgccagtcgttcaggcacgctggcactggagtcgatggtgtctatgcgatccaccgcgagctgtaataccttgtcgatccgtcgatcggttttggattcctttcccttgccgttcttgttgttctttcctgaggattttccggccgtaccccacttgccggcctcttcaggcttgttggttctgtcgtcgtccttggccatgctcccgattgtacgtcttgtaactcaggagacctagcaacgtagcgacattcacatttcgcttgttactgcaaatctataggcatgcagtcgttcggaccgtaattgttggctttgcaccaattccaagcctcatctgtcgagtcgaagccctcaccggcaagaatcacatagtatttgtcggaattgctgctgtaggcgggccagtcacccgaccagataagcagtacgtttgaattcttgttgtgcatcgtgatgaattgcgcaagaatatcgcggtagttccaggtcttgccttcagcctccatacccttacgcttgctggacagctgtgcggtatacgtggaatagaacagctctgcggagtccttgtcgtgctcgacctgccaatccaatgccttgcttgcattattttcggcttcgtcatccgtaacgttgctgccgcttatcgcgcctggatcagacgatccccagcaatatcttctttccggcagacccaccggaacgcggctgcgcagcgccaccgttgcctggcgccgtcgacaatgtcgaagtaggtgcggtcgccgtgttgaaacttgggggcaacggcatcgaactcgctggcacctgctggggagcagccggtaccagcgttgggccatccatcgactgaggacttgggcttggcgcagactgtgccatcggcgcaccgcattccgtgcagaatcggcttccctccggcatctccgttccgcaaacctggcacttcatactctctccgttctctctcgtccctatcggccaatcccccgcccgttttgcagtacataaagaagcggcaaacggcccgaaacatacctgagccatcaggaagacggcacgatctactacgagaaagatatcatcaccgaccggcaaatcgtcggcatcatgctgaagcatccgaccagcgcacgcggcttcaagcgctacttgcgcgccgcatcatgacgcttgaccacgatggtgacgccacccgcagcgaacagcgtcgccagaaccacaaccaacgcaaccgaggcaccggtattggccgtatgttcggtctgctgtggcttggtgctgccattggcattgacgctaccgctatggttgccgttatccttgtcgtccgtcccggtggacactccggtaacggcaacgggcagagcgaccgtggtcttattggtcgcaccggtcactgtcaggctgatatcaccggtcttggttccggcgggaatcgtgaccttgagctcggcggtatcgccattcgcaacctgcgcttcgccgaccatctgctcgccgatggtggcggtcagcttcgtctcgtcaggcacgcccagcgaggtgagcgtgagcttcgagaagtgcagggtgaacgagccaccggccttgaccgcaccggtcgggataccggtgacggccactgcgcggcggtcgtagcgcggggcaaccggattgttgtccttgagatagtcaatccaagcatcgcggtccaccagaccggtgtccttggtgttcgtgccttgggcgaaggcgcggaagttatcgccgccctccaacaggaagctgaacgaaccgatacggtagttgcgtttcagatccaaaggctcaccgttgacggtcaccgaggtgatgtgatggccttgcgcggcatccggatcatacgtgtagctcacgttgtgggacagtccgagttgcagatacgcgcgcgatggcgtgctgccgtccgcgttcgtctgccactgctgttccagcgcttccttgaactgcgcgccggtaagcgtggtggtccacaggttgttcaggaacggcagtacagcgttggcctgggcgtaggtgatattgccgtcggcatcgagcgtgcaggcgtcattggtgccggacttgcagaattcggcacgcagaccgccggggttgaccacaccgatttcggccgcgccgtggtcctcgcttttgagcgaatcgagcagcgcatcggccaccagattgcccatggtcgattcggaggcgcgatcgtcacgcttgccgtccttgaatgcggtggtgatatccgcagacaccttgccgaccttctcgctgcccttttcatcggccaccttaagggcctggtacacgatgtccttcaccttggcgacagtcggattcgcggcggcgagcaggccatcgttgtattcggcgtaatcgttgtagtgcgaatcatttttgtcggcgggctgcgaagccacctgcacggccgtgttaccggacttgtcgtaagacaccgcaccggtggccgtgttgtaggtgagcaccacttggccgatgttggcggcatagctaccggtctggatgatcggtcggttgttgtgcgcgggatcggtgtacgaatacttcatgtgggtatgtgcagtgaagatcacgttcactgccgcatcggtatcgtccacaatcttctggaatacggggctggcggccttctgctcgtcaagcgtgggcttggccgtggcgtcatcttcattggaggctgcaccctcatggtattcggccacaatcacgtcagcctcgccattggattcgtcgccgtcggtgagttgcttggccacacggttcacggcttccaccggatcgccgaattcgatgtccttgacaccaccgggagcaaccaacgtgccggtttcctgagtgaccgcaccgatgatgccgaccttcacgccgttcacctcctgaatgctgcactcgggcagagccggggttgtggtgcccttcttgtacacgttggcaccgaggtaatcccattgggcgttgcgcgcgccctccttgccaatcacacgatcggtaaggtcggcatagccttggtcgaactcgtggttgcccaccgccgaggccttgacgcccaaagcattgagcacatcgatggtcggctggtcctgctgcaccgaagagttgaacagcgaagcaccgatattgtcgccggcggacagcagcagtgatgagtcagggtattcgcccttgagctgctcgatggtggcggcgaacggcacggtgaggttcttgtcgatacggccgtggaagtcgttgaagttcagcaggttgatggtggtgctggcgggaaccggctgattggttgccatatagcccatacgcaatgaatggccattggtcacgccgtcgtctgcccagaacaccggcttgtacaccttgccatttactaccttggtggcttcggtatcaggggtgatggcaaaaccttcggtgttctgcgtacggatttcatccggagtgtcggtcagcttggtcagctgcagcacaccgttcttgaactcgtaggtaccgattttggcaccggtgttcgcatcattgtcgctttgggcgagcagctggttgtgctcggcgtcccaagtcagatcgcgcgggccatcatagccggcgttcaccgcggactgcggcaggtcgatatcggccaccggatgtaccaggtcctcgccattcacggtttgcagcgcgaaagcgtagatatggccggttttctccagtgcggcgaagaacagaccgccgaaatcattgccgaaaccgtccgggtcgtaggtcattacgttcttcgggtcaaggttggattggaatccattggcggtcaggaccgagtcgggaataaaggctatgccttccaccccaagattggcgtccgctccgtggcccagcgtcacgccgaattgtgtgagtgctgcggtgagattccactcgtgcgtagcggtcagctcttgcgctccgtcgccgttggcgtcggtggttttcgcggtcacgtcatactgcaggatggaaggccgcggcacattcttgttttcgttgtcgcgctcggcgccgatgaatatgcccttggatgaatctccgttgatcagcgtgatgccttcggagtccacaccgcccttgccgtccttgaagtgcagctgcttgccgcccttggtctgaccgttgttggtgaaggtccagccatcagtgggatcctgctgccatgtgccgttctggtagacgaacttgttgatggagccagggcccttatcagcggtgttgccgagcgtggggttcagatcgttgtcggccgcccacagcacaccttgcttgccgtctttaccggcttcatacaccagaccagacagattgccgtcagtgtggtcgccgccttgtcctttggcgccaaattcgccttcggcatccactgtggtcacatcggccaatcccgaccatgcgtccacggtcatggtctcgccggcgggcggagtcggagtcgggtcatcgaacacgttctgtgcaccgggcgtgggcgtatcggaaagcgcgaaagtgccatcgtccttacgggaccacgactgactgtcgctcatcttcttcacgccggttgtatcggtattccatgacgtggaatccaccacatcgctatcggtaaagtcgccgctggtagtggtcagataggcttcgtcggcatcggaacccaggccgggctcggccttgtcggggtcgatgtatgccaccagatatccgccggctttgatgacggtgtccgtattcgttacttcgctggtgccgatggtgtagtgcttcttggctttcttgccgctgtcgtagatgccccagcccttcacgtcaacgtctgtggagccggtgttcttgagctcgacccaatcgcaacgcttgctatccgggtctccggcagctttcgtattgccggcatagacctcgttgatgattacggatggtttggcagccgtgttctgttcggcagtggcctgctgctcgtccgcagccgcagcgggcacgccgatcagggcgatgctgctcagtgtcaccgcagcggtgagcagcgcgatggcgcgccgcgacatcgcggtgaaattgttggtgtggaacattactcccgttccttcctcgggttgtgccgccgcagcatgatgctcttcggcggatgacacccccgagggtatgggagagaaatgaagccgacaccgtatgaaggcaaactcggcagatctccaaactgaactttggctgaattactgctgaagctagttcttggatttgcgtcgaaccgtccgtattccgccgacaatcgcgattacagcggtaccgatagctacgctgatcaacgccggtcgttgcgcggcatggagggtggcgagatccggtccggccgcaatggcgctgttttcacccgccgagccatcagacgccgggtgattgcccgagtcggtgtactgggcattgaccacactcgggccggtaagcgccacttggtcggcggtctcgaccttggccacatcgccgtgcttatccaaggtgacgcgggcgcacagggctttggcccagttgatacgctgccagccgtcgctcgattgccatagggggtatccggaatccaaggcagtggctttcaaaatcgcgttgcgctgatcggcgtgcagttcgggataggccagtcgcagcacgtccgccgccccgcgcggtgccacgaaatcagcgccggactgggcggtgtcttgcgggaaggtgtaggtcaggcgtgcggtgtagacgcgcacggccgaggcctggtccgcgaccggctcggtggccaccgggtccagaaaatcgttggtgtagccgcccgaaccggaggccttggtgttggcgatgcaggcggcgagggtagtgccgtggccgtccgcggcgcagcgggacaccagatagtcccgcagctgccgggacgcgggcacgatggacgaagcgaattcgttatgccagtactgcccgttctgggcggatgcgccaatgcgcccgcccatgatgtcaagcggataatgcacgccgagcacgatgcggttgttgccggcctccgaagtgcgggccatgatttgcggcgcgagttcgggaatcatgccggccagcgcgataccccacgaataggcgccggtagtgtggccggaggggtaggaactgtttttctgcaagttcgagtagccgggcacgtgttcgagccatgagggtgattgcttgatgtcaagcgtggcgggcagtccggcgagatcgttagtgccgccgtagctgctttccgcacggttcagataggggcgcggatgcatggccgcacgttttgaggcgtaggtggaggccacgttaaaggagaagatatcggcgacggcgttgagtttcccggatttgagcccttcgctcatatatttgccaagcaccggaccgagcgcgtccggcatggcttcctcggcttgcagatcggagtcgacgagcgcacgcttgcgttgggcgttcaggccatccttatcgagattttcggcggctttgtggttaatggccacggccaaatcttcgtcgagtttcattgtatcggcgtcgagcaccttgccaccgtgttcggcatcggtgggggcctgccaatagttcttttcgtagtcggagagcaatgccacccaatccgggttgggcaactggtcggcctgtgcgattgcgggcgtcgcggctagcgtggccgccaacgccagcggcgcaatggtcgcaatagcaaaaacggaggataggtgccggaacatcttcatatgttccaacctatcctccgtgaaagctacgtagccggaacccagtcaaacactcagtaaattcttcgtgccggcttagcggcgattgagctgactgtcaggcctctgactcgtcttcggacttgcggaacgccgggaattcgccggtttccgggtcaacctgtgactcgggctgggtggcgtcatatccctgttcgtagcgggtgcgccgccagttgcgaatcgaggcgttggtgccacggtgatgcacatggtatttgcgcggcgcaccaccaaacggcagctcttcgacttccttggccacagcgatctggttgacattggacgggtctccggcggcgatcggcgccacgggctcggcctcggtgggcgcggccgtgcgctgctgcatgcgcgaaggcagccattcggcgagcctcgacaacagccagcaggcgacgaagtagatcaccgcagccatgaccagcgtctgcaggatgttgaagtacatcgagccgagtcggcgcgattcctgcagcaggtcggtatacatgatgatcgagcctagggcggtgtccttcaacaccacgaccagctgggtgacggcggccggcagcatggcgtagacggcctgcggcacctcgatctccatcaacgactgcgtttcggtcaggcccaaagcgagcgaggcctcgcgctggccgcccggcagattgccgacgccggagcgcaccagttcggcgaccaccgaaccgttgtacagcaccaaggccagcaccacggcccaataggacgggctgggcaggcccgcgaacgcgaaccatcgccagaagaagatcatgagcagcagcacgggaaccgcacggcagaactcgacgatcacggcggagacgccacgtaccaacgggttcggcagcagtcggcccacgccgaacaccaggccgaacaccacggcacccaccacggccacgacggtagccttgatggtcatccacagtccgggcaggtagaagtcggtccacgcctctcgttcgacggcgggcttccacagctcccagctgagctggttctcgccgtccggcgggttgtgcaggcgcatgaggataaacacgagcaccaccgcgaacagaatgcccgcgatccagttgacgatgcgaatggtgcgccggcccttgggacctggcgcgtcgaacagcacggaattcgaagtatcggccatatccgtcacctccttacggcgagtttgttggacaggtacgtggtgagcatgccgatggggatgatcaggatcacgtagccgagcgcgaagatcaggaagatttggatgatcacgtcgggacggaattcgatcatctcgctcatcagcgaggatgtttcggtggccacggatgcggcggcggccacggtggagttcttgagcagggcgatcagcgtgttgccgagcggtgccacggagcctcggaaggcctgcggcagaatgatctcggcggcggactgcatgaagcccaagcccagcgctcgtgcggcctcggcctggccaatcggcacggtgttgatgcccgaacgcagagattcgcacacgaacgccgccgtgtacaggctcaggccggtgaccgcgagccagaagaagttcgtggtgaaggtgtcggagaagctgagcttcagctgcgcgtaggcacccagcaccatgaacaccatgatgatggtcagcggcaggttcttgaacagttccacatacgcaccggccacggccctgagcgaggaaatcggcgagatgcgcatcaccacaaggatcacaccgaggatcagggagaacagggcggaccatagggtcagttcgatattgaccagaaacgcgccgagcacgtcatactggctgaagagttccaggaatccgctcatcaggcctcctctccttcgtccggggtgggcgggttgtagcgtacgtcgggcgtgtagttggtgcccttggtgttatcgctgatggcgttctcccacgagccgtcctgaatcatgtccacgatggcgttgttgattttggtggccagctgcgtgtcgcccttcttgatgcccacgccgtagtgttcctgcgtgaacggtttgccgaccaccttgagcttgccgcgcgaggcggaggccaggccggccaggatgatgtcgtcggtggttaccgcgtccacgatgccggagaacagggcagtggcgcattcggcgtaaccgggctgttccataagctggacttcggaggcgaacttctccttgacggtggcggcggaggtcgaaccggtgacggagcataggcgcttgccgttcaggtcttcggggccgttgatggagttgtcgtccttgcgcacgagcagatcctgtccggccacgaagtacgggccggcgaaggagacggccttcttgcgctcgtcggtgatggagtaggtggcgaggatcatgtccacgtcgccgttctgaatcatggcctcacgctgcttggagggagcttccttccagatgatctggtcttcggaatagccgagtttcttggcgatgtacttggccacgtccacgtcgaagcccacgtaggtgccggacttcttgaagcccaggccgggctggtcgaatttgatgccgatgcggatcttgccggtttcgtccgcgccgcaggcggccagcgacattgtgcaggccacggcggcgagcgcggcgatcacgcggcaaaccttccgtttgaacgtattggtgaatgtcattggattgcgtacccgtctttcagtgggttcgtcagtgggtgaggatcttcgagaggaagtccttggcacggtcggtctgcggatgctcgaagaactcgtcgggcgtgttctcttcgagaatctggccgtccgccatgaagacgatgcggtcggcggccttgcgcgcgaagcccatctcgtgggtcacgcagatcatcgtcatgccttcatgcgcgagttcgaccatcacgtcgagcacttcgttgaccatttccgggtcgagtgcggaggtgggctcgtcgaacagcatgaccttggggcgcatggcgagcgcgcgggcgatggccacacgctgctgctggccgccggagagctgggagggcatcttgctggcttgggagtcgacgcccacgcgggcgagcaggtccatggccagttgctcggcttccttcttgtccatgtgacgcaccttgatgagggccaacgtcacgttttcaagaatggttttgttggcgaacaggttgaacgactggaacaccatgccaacttcggccctgaggttcgcgagctccttgccttcctgtggcaggggcttgccgtcgatgcggatgtcgccggaatcgatggtctcgaggcgattgatggtgcggcacatcgtggacttgcctgagccggacgggcccacgaccaccagcacctcacccttggtgacggtcaggttgatgtccttcaggacgtgcaaagcaccgaagtgcttttcgacgtgggtcagttcgactagcggacggttcaggtcctctttgccgggaaccagtggggtcaatttggccttgcttggtgatgttgtgcttgtcgtgcgcgaacgcactgctgtttcattgttcgtttcagacatgagtgggaggataacacaccgacgtttccaacgtgttcacagtatgtccacacagttgctcagtcgatgtctcatttccgcatcagacatcgtgaaggcggcattgggcatcggcatacattctcgctgagtcgcgcatcgctcggcgtctgctgtgcgctgattgcctgctgcgtggcggctgagacgttgctgcgacggcaaagcgggcacgtgttgtcctatctgctgattccatgtttggccttggtgtcgttggcgttgctgccgtgtatgccgcagtcgggcgcatggctggcggtcactttgtattgtgtggggctgggctcgccgtttcccatgtcgtattcgtataaatgtgctaggcattttgagcgtggctagctgttcgcacacgatgagtgctgttatacggtggacgacactcccgaagcgcggtggataaccgggcgcggcacacgatatgccggtggataaccagttcgcgccgcttaagttatccccatttttcggttttgcccctgtgccaccgtggaatgcgctacgctcggcgcatgaacggatacagcgaagcgccgcacaatggcgaaatcaacaactatctgcgcaaagatcttgacgccaaagccacggccaagaacacggcctgttggaatctgctgggcaaagtgcgcacgaaacgcacgttgtgtttctcgctgtataccgcattggaattatgcggcgtggagttgccgaggcacagcacgttgccgcagaaggatttttatgtgacggtgaggagcaaggggacccgctcttcattggacaatgtcgactatcgcatatggaatgcaaagttcagcagtatcgctttttcaaacggcgtaacctgcatgcatcccatggatgcgtggatacagtttgcccaatatctcaacctcactgaattagtggtgctggctgaagcgctcatcagacgttatggatatgccattgaacaattcactcaacgactaacggcctttcaccgcgttattggtcgtgcgcgttgtgaggcagcgctgaagctcgtaaaaccatcggattccgttcaggaaactcgtacacgcttggcgcttatgcttttcggcctgcccataccgcaaacacaatatggcattaccgattcagagaacggatacacctacaccgttgacatggcttatccacaatacaaagtcgctattgaatatgatggcgatcatcaccgtcgcttccgcaaacaatatgtgcgggaccagcaaaaacgtcgacgtctgcggcaattgggctggaccgtcatcgaggtgttcgccgatgacctgtggaacaccgccaaacaacgtgccttcgcacaagaggttgccaccgcgatgcaaataccgcttcctggccgtcctcaaccttcatgccgggtattaatagacggcagccttaccatcaatgcgcgcaaaggggaatacaggaggcggaaacaagcaaaacacaaaaaagcctcacaacattgatcaaatacggagttgcgatcgctcctcatggggcgacaattcccccatgaggcggcaatttgcccatggggcggtttgaagaaattgtaaaaccgcggaattaagccattttgacctaccgccccatggggttttcaccgccccatgggttgtttaccgccccatgaggaagttaccgccccatggaaggataatcggcaaacgccaagggggacaccgcatggtgcgaggtttgccgcatggcggaggtgccatcgggcggagtatttggcaccccttggcaggtatttggcacattgggccccacccgcaaaaagcaaatggcccttggaattattccaagggccatttgcggctaatagcaccggagcattactcctcgaaaattaatctacgcatgcggagaccgccgttcgaagccgaaggcgcactaaggtgcgtcgagtgctgaggaaaggcggtatacgctccgtagattagttttcgtcggcgtccgggtcgtagtcgacgccagtctcggcgcgctgctcgtcggaaatcggggccggagcaccggtcagcgggtcgcggccgccgccggccttcgggaaggcgatgacgtcgcggatggagtcggcaccggccaggatggacacggtgcggtcccaaccgagggccaaacccgcgtgaggcggagcgccgtacttgaatgcctcaagcaggaagccgaacttctcgtcggcctcttccttggtgatgcccagcacatcgagcacacgggcttggatgtcgtcgcggtggatacgtacggaaccgccgcccatctcctcaccattgcagacaatgtcgtaggaatcggacatggcgtgctcgggatccttgtcgaacttgtcgatccaatccttggagggcatggtgaacgggtggtgcatggaggtccacttggagtggccgacagccacatcgtcatcatccggatcgtcggtgggcttgaacagcgggaagtccacgacccaagtgaaagcgaacttcttcggatccagcaggccttcgcgggaggcgagctccacacgcacggcacccagcagcagctgggcggactcgcgagaaccggcggcgaagaagacggcgtcgccttcctcggcaccgacggcctcgcgcaggccgttgcgctcctcatcggacaggttcttggcgacggggcccttgagttcgccgttttcgctgaagaccacgtaggcaaggcccttggctccacgctgacgagcccaatcctgccaagcgtcgaactgacgacgcggcgtggcggcaccgcccttgaagaccacggcacccacgtacggggcctggaacacgcggaacggcgtgttcttgaagtactcggtcagttccaccagcgggttgccgaagcgcaggtccggcttgtcggagccgtacttgtccatcgcatccttccaggtgatgcgcggtagcggcagctggacctcatagccggcggacttccagatggcggcgatgaccttctcggtcatggccatcacatcttcctggtccacgtaggccatctccatatcgagctgagtgaactcgggctgacggtcggcgcggaagtcctcgtcacggtagcagcgggcgagctggtagtaacgctcgacaccggagaccatgagcagctgcttgaggagctgcggggactgcggcagggcgtaccaggaaccgggcaccagacgggccggcaccacgaagtcgcgggcgccttccggggtggacttaatgaaggtcggggtctcgacctcggtgaagtccatgtcttccagcgcgtggcgggcggccttagccatgtcggaacgcagcttcagattgtgctgcatggacggacggcgcaggtcgaggtaacggtacttcagacgcacgtcctcgccaggcagcttgttctcggactcattctcgagagcggtggaaacctggaacggcagggcgtcggacttggcgaggatctcgatggtctcggccacaacctcgatcttgccggtggccagatgggtgttctcgttgccatccgggcgcaggcgcacttcgccggtaatctgaatcacgaattcgctgcgcagcgggcgggccatatcctcgtcgtaaatgacgacctgcacgaggccggtcgaatcacgaaggtcgatgaaggccacgccaccgtgatcacggcgtcggtcaacccaaccggcaagggtgaccttctggccgaccagggcctcggtcacttcagtggcatgatgtgttctgtaagccgtctggctcattatcttgtttctcctcgatttttcgcgcgaatacgtcagatttcgacggtttgctgggcaaccacagtatccggctcccacgacgtgcaatcggcggcaacctgctcgcccgtgacgatgttcttgacctcgtcgccagcgggctctgcgccttccgcaccttcggcagcggtggccgggaaccacacgtacggaatgccgagtttgtccgcgtacttgatctgcttgccgagcttggccgcggtgggtgccacgtcggtggcgatgccgcgcgcacgcagttggttcgcaatacggttggcggccgggcggtcctcttcattccacacagcgaccagcacggcggccgggctgacgcggctggcgtgcgcgccggcagcgtgcagcatgtagctgaccagtcggctcaggccgatggacaggcccacgcccgggtacttgcggttgccctgggaggcgagattgtcgtaacggccaccggaacagatggaaccgagtgatgcggcaccgtcgaggaaggtctcgtagacggaaccggtgtagtagtcgagaccgcgggcgatcttcaggtcggcaatgacggaaccggggcggatggcggcggcctcgtcgacgatcatggccagggtatcgagtccctgacgagccagcgtgtatgcctcggaatccttggcgatgccgtgagactcgcacagcgcatcgaacttggcggcaagctcagcaccgtcggaggcggtgagctcggccaattcgaggcaggcgcgtgcctgtgcttcggtggcaccgcaggtctcggtgagcagtcgggccacctcatcggcaccgattttgtcgagcttgtcgatctcgcgcagcacgccttcgacgtccgtcaggccaaggccgcggtagaagccttcagacaacttgcggttattggcgtgcacggtggccttggggaggccatacgcgcgcagctcttccagcgcggagaccatgaccagcggcagttccacttcatagtggtcgggcaggtcgccggcaccgatcacgtcgatatcggcctgcacgaactcgcggaagcggccttcctgcggacgctcgccacgccacaccttctgaatctgccagcgcttgaacgggaacgccaatgcacccgagtgctcgaccacataccggctcagcggcacggtcagatcgaaatgcaggcccaaccgctcttcaatcggagtgtcggattcatgaccgacctcctgcaaacggctcagcaggtaaatctccttgctggtctcgccctttttcagcaaagaagcgccggtttccaccgctcgcgtctcaatgccgatgaagccgttgagctcaaaaaccttacgaagcgtatcgataacacgctgctccacaacacgttcggaggggagccactccgggaatcctgatattgatgcacctttagccacgaaatcaatataataggtgagggttgcgtcaaaacttcctggttcgcccgggatgggagacgctcccgcttatgcattctacgctttaaggagctggccatggccgacgaaactgtcaccgaacccgtaaacaccgctgcgcccgaagagcaggcaacgacacccgcacccgaagccagcgcggccacgccggcgccgactccgtcccccgcttccatgccgaaaccgcacgcgccctcccccgccgccttcgccaagaagactccgtcggccaagccgcgcgctgccgccccggccgccgccaccgccacctattccgaggctgatgtcaaggccgccgaggccttcggccgcgtggatgacaacggcaccgtcttcgtcaaggatggcgacgccgagcgcgaggtaggccagttcccggatgtctccaaggaagaggcgttggcactgtacgcccgtcgtttcctggatctcaaggccaagctcgatctgctggccacccgtctggcttccccgaacatcaaggcccgtgaaatcgacgaatccgcgaagctcttgggtgaagaaacctccgagccggccgtcgtgggcgatcttgccgcactcaaggcccagtacgaggagctgaaggctgccggcgaggccaagaagaccgaaatcgccgaggcacgcaaggccgctcaggccaaggccgtcgccgagcgcaccgccattgtcgagaaggctgaagcactggcggcctccctgggcgacaacaccaactggcgctccaccgccgacaagttccgcaacctgttcgacgagtggcagaaccaccagcgcaccaccgtgcgcatcgacaagccggaggccgaggcgctgtggaagcgcttctccgccgcccgcaccaccttcaaccaggctcgccgcaagtgggctcaggctcgcgacaacgagcgtacagccgccaaggaagccaaggaagcgattatcgccgaggccaatgagctcaaggattccaccgcttggggtgaaacttcccgcaagttcaacgatctgatggaccgttggaagaaggccggccgcgctggccgtaacgaggacgacgagctgtgggccaagttccgcgaagccgccgacaccttcttcaacgctcgtcaggctgatcgcgatcagatcaactcctccgagaaggagaatctggctgccaaggaggctctgctggtcaaggccgaggctctggtgccggtgaagaccgacgccgaggccaagaaggcccgccaggagctggccaagattcaggaagagtgggatcagatcggttacgtgccgcgtgacgatatgcgccgcatcgagaaccgtctcgacgccgttgacaagcagatcaaggccatcgaggatgccgcttggaagcagaccgacccggaggccgacgcccgcaagtccagcttcgaggagcagctcaacgcccagctcgccgagctcgacgccaagatcgcggccgaatccgacccgaagaagaaggccaagctcgaagccgagaaggccaccaaggagcagtggctgaacgccatcaagtaagggtctcgtgccaggttcccctctgagggaagccggcagcaaggctgactgaggggagtttacggttataccgcaagctcccctcagtcgcctacggcgacagctcccctcagcgaggggagcttcgtcatatttatgccgttttcttctgccctatactcataactccaccccatagttcctcagtcacccagcaattggtgtcttacgcctgagtccctaccggtgctgcaacaattgccgtgagcccttgatgtgcggccagatattcatgcaacggctggctgtatggcatattcagctcgccgtaattggttccggcacggaaggcgggataactgtcgccgccctgaagcagatatgaattggatgcgataatcaccaggtcatcgtccgcaatcggtcgaccgtcaacggcgaggttcacgatacgaaccgccgcatgttcgtcggcagcacactcgtcagcgtcagcgttggtatcagcggcggcatcagtatcagcggcggcatcggcattgccgctcccaccggtcgtaccgcattcggcataccgatacgtcacgttcgaggagatgccgagccagcgccgctccagtcgcccatcgtcacggtggaattgctcggcgagcactctcttcacatcgcgcccggtgagcgtctcatgcgcggccttgaactgcaaggccatgagactatccacctcgcgcacggtgactttgccatcgccattcatatcaagccgtggagtccgcagactgccattattcgaaaatccgattaccggcaaacgatttccggcatacacatgcttcatgattgactcgcggttcgcgtccgccaccagcacaccgaccgtattcccgtgcttatccgaaccttgtttgtcgaaattcacgccggaggccaaggtgccaatcaccgcgttgccggcatgattcgaatatgttgccgccgcctggtaaatatgctgagcgcgcgatacctcatcgttcgcctcagcaccggcagacatccaagcggcttgcgccggatgcgcattaagcccttccacgcccagcacgccgtcaaccgccgtatggctggtgccattgccgaggtccacatcggccactcgcaccgtggcgcgacgcccggcaccggtgatgatcaaatcctgcacggccatattccgcccgaagctgcccgcctcgtaaataggcgcaccaccagcggtcgtaccacgcttgatcgcgtgactgtggccggtgtataccacatcaacatctcgcccaatatcggcggcggctgaagcatcggcgtgcagcaaggccaccaccgcatccacctttccggagcgtttgagttcacgggccacgcgattgatcgcgtccaccgcccgttcgtcaagatcggcatcacgcgtaatctgcggagtggctaccgagccgagcgcatcagtaagggcgcccacgaaaccgatccgcttgccgttcaccgttcgaatcgtagagtcacgtacatggctcagcagtccgtcaggcgactcactggcggcagacgtgttggcgcacagccagtcgatgccattgctgggatcagcgatgcgattgttgaaatcggcgacaccgcggtcgaactcatggttgcctaccgccgaaatcgtcaatccccacgctttggccatgtccagcgtgggttggtccttctccaccgccgactcatacggggaacctcccaccaaatcgccggtcgataccgggatcatattgccgggattatggctgtcggccacggtgaaggcggtggcgttgtccgcaccacgttcgatatgcccgtgaaaatcagtgatgtcggcgatggtcaccgtacgggtgccgaaagatggattatcgccggaaaaaggaacggctcccgtggttcccgcacaagcataaggaaccaccagagccgtaaggataagcgctactgcaccaaaagcgatccccgatcgcttgccggcccaccgccggttcttcatattcctgctcacaccagtcacactaggatcgtcgattgaacggccatgcctaggaaggcgactctcaggtgaattcttagcggcgtcttgggatgggaaaggcctgaccccgtactatcagggtcaggcctttgcaacccgtgtcactacgaatgcgtcggcaaggggagattactcggcaaattcctcgacgcagatctcagctaccgcatccacgcacgcctcggcaatcaggcggccgcgttcggcgcttgagccggccggattggcgagtccgccgtgagcgggaacgtcaccttggcgcaccgggtagcgtacataggatttcgccgtggcaccggcttcctcgaccatacggtccatgtgcaccagttccggcgcgtagtggagcatcaacgaagtttcggtgacggccgcatgctccaatgcccagccggggaacaccaatccatcgaacaccttgtcgataaccgactgcggaaccgggtcccaccaattggtttccacgatggtggccactcccccggtttcgcgggtgaccaggtcgatggcctcgacgatgaacgcctcgttttcaaaatgcgcgttcatgacgacgatcttggtgaagccatcggcgatgagttcgctcagcacgtcgtgcatttgggtgatcactgtcacgccgttcatgtcgacagtacccgggaacagcggcccgccaccggagagcggcttggacttgtatccgtagctcagggtgggcagcacggtgccgtcgatgcgttccgccagatcttcggcgacccgcgtggcgagtaccgcgtcggtaccgatgggcagatgctggccgtgctgttcggtcgaaccgatcggcacgatgacgggatgagtcttcacctccttgaattccggccaggtcatgtggtccatatggcggttgctacccattgcagtactcctttgggttggtggtggattggatggtcaatgaatgcgcccggctccctcgggaaaggagccggagctgaggagatcagatgtgattcagatccttgtcggtgttttcatgggaaagaatcatcgcgaccaaggcgatggccgcaacacccaccatgtaccaggccggggcgatggatgaaccggttagggcaatcaggccagtggcgatgaacgaggccgtaccaccgaagatggcattggccagattgaagctgaacgcgaatccggtgaagcgcacggaggtggggaacgtctcggtcaggtagctggacagggtaccgtcgttggcggtcagggtggcgcacattgccagctcaaccagcagcacgggccagaactgggaggtgttgaggatgaggaaggcaggaacggtgaggacgatgaacgccacgcaagcaccgatgagcaccttcttgcggccgaatttgtcggagatgtggcccatgccgaacaccatgaacacgtaggcgaccaagcagatggtggtgatggtgccggactgggtggcgtccatgccgacggtgtcagacagataggtcggcaggtaggtgagcacggtgtagaagccgaccgcattcagcacgcaggctccgaagctgatgatcagggccttgagatggttgtggaagagttcggcgagcggggcgaacatgccgctcttggaaacgacttggccgtcagcggaggcggcgctcttggactcaagagcatcgttcattgactggtacacgggggaatcggagagcttggtacggatgtacagcacaatcaggccgagcgggccggccagcaggaacggcacacgccatccccaaccgaccatcgcgctggagttcatgttggcggtcatcagcgtggccagcgtggagccagcgagcagaccgatggcggtggacgccggaatcagcgagcagtagatgccacgctttgaggtgggtgcatattcgccgaggaatgtggccgcaccggcatattcaccggaagcggagaagccttgcaccatgcgcagcagcagaagcagaatcggcgcgccaacgccgatcaccgagtaagacggcaggcagccaatcaggaagctcgcaccggacatgaacataatcgagtgggccaatgcggctttacggcctttcttatctccgtagctaccccagaacagtgcgccgattggacgcaggatgaaggatagcgcgaacacgccgaaggtctgcagcatggcgacggtgtgattgtcggttgggaagaacaccagggcgatggtggtggcgaagtacgaataggaggcgtagtcgaaccactcgatgaagttgccaaggaaggaagataccgcgactttcctgaccatggcctgttcttcagtttgaggggtgaaattcatcagtcgtgcagatgtagtaatcgttgcggaactcatgatgtcaccgtcctttcaaggatgtgctgttcgtgtgactgaatgggattcaagtgggaattcgtttcgcagcaggtcgaccagcgccgcgatagcctcgactatgcccttgagtatttgctgaaacgtgaatcgtcgattaacccgttcggcgtagaagtggacaggttgctcagtggtgctggcgcattattcaccatgctgttcttgccatgatttcgtgagtttggcggcgaatagcagcatcgaccagttcggtttgtcgttatagtcgacgccgaccatttgtgtcactttgtccagtcggttgtacagggtttgccgtctgatacccaattgctcgcacgcgccggttttgctatcgaggttgtcgaagcagacgcacagtgtgtccagcaacaacggagaggcggcgacctcgaatccgatggtctgcaccacgagcatgcgcatcgccttgtccatatcagaggatgcgacgaaacggtcgacgagtgcggacatggtacttacgattcgcccgtatgccggttcctgattggcgatgtcacgcaataccgcgaacccgtcgaccagcgtcaccgtgtccaatgccactcggccatgcaccacgtacacaccgtcgccttccagtacggcaagcgcatccatgcaatggcgtccgaatgcggccgcaccgtctgaggaatcggtggtggagcaccatccgaccatcaagtcaccttccagcatgcaggagacggcgcatcccgaccgttcttcgaaccgttcgaccatcgtcgatacatggctgatgccttccaccaccgatctgaaccgaaaagcgaatggcatatagatgcatgatccggcaaaacccagcgcgtcgagcatcgcatgcgcttcctgcgcctcaaatgtattgacgtgcacgccgtcggccgggcccatactcagatgatgcatcatgcccatgcgcgcgccgccgtcaatatagagggcggccaccggagacacgatggtggcgatggcccgacgcatcgtggcgtcgaaagtcatgatgcgttgcgtgatctccaatgctcccaccggccgggagcgactttcaagggcgatgacggcgctcgattcgttgccggcatcgaacgcacgacccgctcgagcggccaacagaccgtcaccatcgaaaatggcgacgctttcgccgaacagcgacgcaatggtttcggccacagcctcgatattgccggtacgggacaatccctcacgtaatgaagtggacattgtgtccacctccaattgcaagtgcatctgttcgtgcacgatagcggtattgacactctgacagatgtcgacaaaaggtacgcgagatttcagaccaatcaacgtcaacccatgcagcctggccgcagacaccagttcgtccggcatccgcaccacaccctccaccagttcgaccaccagagcggcgacaccagcctgcgccaggcttgctacatattgtcctaacgtgccgtgccaatcggcggcgagcagagcgttaccctcgataatcagcatctcaccgcccgaaaggaaactggagacatcctctcgctcgttggtaaacacccatcgcactggcgtatcgaggtctttgccttcgacctccaccacaggatcggctcgtttgaactgcgtgttatgaagcgcactgcgaatcgatacagtcatacaatctgtccattcccccgcggaacaccggtcgttccggttaacctcaccgcaaagcgtgctgttgacaataacctcagttggttacgcgggcagtcggttcacgtaaccgttcggcaacacaccagttgaaggagcgacgatgactaccacactgttcaccaacgcacatatcgccaccggagaacccggcagcacggctgcaagcaccctgccattgcaggacattctcgtcacggatggcgtgttcaccgcattcggccccggactcgcgcaacaatatgaggctcagggtggtgatctggcggccattgaggtggtcgatctgggcggcaaacttgtctgcccaccgttctgcgatacgcatctgcaccttgattacgtattcacggcccgcaagcccggtgcggtgaatgaaagcggaaccttgtttgagggcatccagcgatggagtgagaccaagtccgacttgacggtcgacgagatcaagcagcgcgcgaaaatcggcattaagaaagaaatgctgcatggcgtgcagctcattcgctcccatgccgatgtgaccgacccgaacctgacctcattaaaggcgctgctggagcttaaggaggaattgaaggatacggtcactctccagatcgtcagcttcccgcaggagggcatgtactcctacgagggcccgcatggcgaatcgggggccgagctggtggaggaaggactcaagatgggtgccgactgcgtgggcggcatcccccatttcgaacagtgccgtgagtttggcgagcattccatgcacacggtagttgagttggcttcgaaatacgacaagctcatcgacgtgcattgcgatgagacggatgatccgaattcccgttacgtggagctactttcggcgttggcatataaggctggcattggcccgaaggtcaccgccagccacacctgttcgctgggatcggcggacaacgcctacttctttcacctgaccaagctgcttaaggcggcgcatatcaacttcgcctgcgcccccaccgagaacctgtatttgcagggccgtcaggataccttccccaagcgccgtggcatcacgcgagtcaaggagctcactgaggcgggtgtcaatgtgtcattgggccaggattcaatgcaggacccgtggtacccgctgggcaatggcaatatgatgctcattcttgattatgtgctgcatttggcacagatgatgagctttgaagaaatcgacgatgcgttgaagttcctgaccgtcaacggtgccactacgttgggcctgcgcgatatgtacggcttggaaacgggcaagccagcaaacttcattgtgctggacgccgatagtgtgttcaacgccgtgtatgagcgctgctcggtattgcgttcggtgcgcgccggccgcacgctgtttacccgcgaggagaccatcgacaccggactcgccctgctgcaataacccgacaacaaacagtagttccccttgacaggggagctatcgccagaggcaactgaggggtagaccaaaaacgtgcacattatgtgtacgtaggtctacccctcagtcagcttcgctgacagctcccctgtcaaggggagctttgctggtatgcgctagctacgctatcgaaacggactacttctgcggagcgtcaccggaatcggcgggagcggattcggctggttcagtggccggagtggcgtcggctggagtctcgccatcagtggaggcaccggcttcggacgaagtttcagcatcggtggcggcaccgtcttcggcgggcttatcggcggcggccggctcctcgaacttctcccccttgaaggtgaattcgccgaggataccctcgccttccgcatccacaatcacgcgctgaccgtcttcgagatcgcccatcagaatcttctcggagatggcgtcctcgatgtcgcgctgaatcacgcggcgcagcggacgggcacctagcagcgggtcgaagcccttctgcgcgagcaggtccttggcggcgtcggtgagttcgagcgacatgtgacggtcgaacaggcggtcgttgagctgcttgacgtccagatccacgatctggcgcacctgcggctcggtgagctgcttgaagacgatgatgtcgtccagacggttcaggaactccgggcggaactgctgcttcaattcggagctgacctggtccttcatgcgctggtagctggactcgttgttagcacccaggttgaagcccgtgttggcggccttggcgatgtctcgcgtaccgaggttggtggtcaggatgatgatggtgttcttgaagtccaccttgcggccctgaccgtcggtcaggtggccgtcatcgagcacctgcagcagcgtgttgaagatgtccggatgagccttttcgatctcgtcgaacagcaccacggagaacggcttgcggcgcaccttttcggtaagctcgccgccctcctcgtagccgacgtatcccggaggcgcaccgaagagtcgcgaagccgcgtacttctcggagaactcggacatatccacgcgaatcagcgcgtcctcatcgtcgaacaggaattcggcgagcgtcttggccagctcggtcttgcccacgccggtggggccggcgaagatgaacgaaccggacgggcgcttcgggtccttcagacccacgcgagtacggcggatagagcgggacagggcggaaaccgcctcgtcctggccgatgatgcgcttgtgcagttcggcttccatgttgagcagtttcttggactcggcctgagtcagcttgaacaccgggataccggtggtggagctgatgacctcggcgatcacgtcctcgtccacgaccatcttgacgtcggactcgccttcgcgccaggagtcttccttctgcttgcgatcggcttccagcttctcctgcttgtcgcgcagttcggcggccttctcgaagtcctgacccttgatggcctcgtccttgtcggcggcgatctgggcgatcttctcgtcgagttccttgagctcaggcggggcggtcaggcgcttgatgcgcaggcgtgcaccggcctcatcgatcaggtcgatggccttgtcgggcaggttgcggtcctggatgtaccggctggacagctcggcggcggactgcagcgcgccatcggtgatggtcacgtggtggtggttctcgtaacgggaacgcaggcccttcaggatctcgatggtctcggcgatggtcggctcgtgcacctgaatcggctggaaacggcgttccagagccgcatccttttcgatgtacttgcggtactcgtcggtagtggtggcaccgatggtctggagctcgccacgagccagcatcggcttcaacatgtcggaggcacccagcgcgccgtcggcggagccggcgcccacgatggtgtggatctcatcgatgaacagcacgatatcaccacgggtcttgatttccttcagcaccttcttcaggcgctcctcgaaatcaccacggtagcgagaaccggccaccatggaaccgaggtccagcgagtagacctgcttgcccttcagggtttccggcacgtcgccggcctgaatcttctgggccaagccttcgaccacggcggtcttacccacgccgggctcgccgatcagcaccgggttgttcttggtgcggcgggagagcacgaccatgacgcgctcgatctcgttggtgcggccgatgaccgggtccagcttgccttcagcggcttcgacggtcaggttgcggccgaactgatcgagaatggcggaaccggacttgttctgcttgtctgtcacgccgccggcgttggccagatcgcccttgccgtcaccggtgccggtgccggagttgccgcgaatcatatcgatggtcgcgctcctgagctcacccaggtcgacgtccatcttgatgagcacctgggtgcccacgccttcgccttcgcgaatcaggccgagcaggatgtgctcggtgccgatgtagctgtggcccagctgcagggcttcgcgcagcgagaactccaacacctgcttggcgtgcggagtaaaggggatgtgcccgttcggagccgcgttgcccttgccgatcatttcttcaacctgcttgcgagtggcatccagctccacgcccttcgaggcgagtgccttggcggctacaccctcaccttcgcggatcaggccgagcagcaggtgttcggtgccgatgtagttgtgctgaagggccctcgcctcttcctgcgccaacacgatcacgcgccgtgcacggtcggtaaaccgttcgaacatgcttgtccttcctcaattgacattccgtcttactctaccgattcacgatgacgtttattcatcggattccatgaattgcgccgtaagaggataagaaaacgatatgctggttctagattcacccgtagtcgattacaaggaggctcgaaatgagtgaagcgacaaccaagcccgacatcgttgtcggcgtggatggttccgatgaatcctttgccgcgctgaagtgggcgcttgaggaggcttcgttaaccggtcagagcgtcaacgccgtgtttggctggacgcattcgtgggatatgggttccgaaccggacagcgacgaggcctgggccaaggtccgccacgacatcgccaacgagctgcgtgtgtgggtcgacaaggccgctgcaggcatcgacttcgatccggcgaatctgaagctcacctcggtgaaggcctccggcacttcggccctgctgcagatcggccatgatgcgcagcagatcgtggtcggccgccgctcgctgagccgtgtggcccgctggttcatggggtccctgtccgcttcgctggccgaggccgccgaagtgccggtgaccgtggtgcgcatcgccggcagcgaggatgagaccgtgaccgaggccattgccaacgccctgactccgggagacaagcccgttcactacacgcagcctcagccggtggttgaggaggctcgccgcccggtggtggttggtgtggatggttccgagacttcccgccgtgcgttcgatttcgcactggaagaagcacgactgcacgacgcgccgctgcatgtgatgttctgctggcagctcaaggatttgggcgttattccgggctatgagaacgccgtggcaccggtgaaggtcggtcagcgccgcgccgaggagattctctctgagctgatggccaaggcccggattcccgatggcgtcaaggtcagcacaaacgccttccatattcccgcatccaaaggtctgatcgcggcctcgcggtacgccagccatctggtggtcggctcgcgtggcctgtccgggctggacgcgcacttcctgggatcggtgtcccgccagatcgtgaacttcgccgagtgtacggtgaccgtggtgcactgagcccgcgcagatggcataacacgctaatacgaatctcggtgatgggcttttgaggagaaagcatcccctctcaaaagcccatcaccgaataccaatttatggaagatttcagtcatccatttttgctctcccgcgttccctacgatcaagagaaacgaaacatgaagaatccactcactgaagtggcctaccctaatttgtcattgattatctcatcctgcagataatacacattccaatcagatggttcattcgccgaccccacggcaccatgcgtataaggaaccagcaggaatggcctcgatgtatctggttggacaaagccaactgaacattgcccatccaggcataaataccgacgcagggcatccgaatcaacgcctttgggaaaataccaaacgacggcttgataggacagcatgtcggaacgcggcacgtcatcgcaatcagaaccggaaccttgcatacatgtcgcctcgtcctccggcccggttagcgtcaggccaatgccatgcctataaagaaaatcctggttcttatcccctcctatggtcaaggaatccgtgacgttcccgctctgtaatggatcgttcacaccgacctgtccaacaatgcttccataagtgtgcataaaccagcaaacgccatcaagacggcaatacatgcccgaaatgctgcgatacgatccgtccaccgcagctctcacaatatcgtccatcgtgtaatcgtctcgagattttagcgatttgcttactgcatcaattgccacaggaagaccatcgacccatgaatgttcctcactgcgtacggaccgtagttcccgagcagatgcgtcgccatcacaactgaaggtctgattctttatgccgtcgtaagctgtggaatccttgcgaaaatcaaatgcactgatattgtcgagaccattatcggatagagcatttttccgcgccttcgaaaaacgccgatactcagctctgcaatcagcaaacgcatggttctgatcttgtattgccttcggggtaatccaaaagctattgacgatacacaatatgatgatcaatacacccgcaattatggcagcaataatcataagaaacgaagaacgtgcagcatgcacggaattgacagtgaaaaacgacgatgtctgacgacgtcgcttatcacgatgcaggacaaataccactaatgacaggatgattcccacaccggaaataccccatcctgccatgcgcatgctgccgatatatttaacgggcaacactcccataagcatgattcccatttgagcgaccaacgctaccaatgtcagtccgattgcactgaacagcaaacaggtcaatacacggatagacgattgcctcatggaggatgcaactgctacggagtctgcgccatctgccgccacggcaaaggtatcgaacgaggtctctcgcgatgccgttgattgcgcaacggttttttgctgccatacagtatcaagaggttgtccgcagtacgggcagaaattagaagcttccatttctatatgtgaaccacacaatgggcagaacattatgtctccttttgatgtgtctttcggccttaccagtacagctacaaacgactacgaagagctaaacatcattgctcatcaatcaactcctcaatgctccaaaatgacggtcagttcgtcatcgctgtaggtccatgtcgcggtgatgccattccatttatctgtttgcgtgccgtctatcggacgggtatggtcgattttcgtttgtatggaattgggcatattcagttcgtcgtacacacattgggcaatggcgtagttatatgaatttgcggtgatggtcagggttctgccattatcgccgatgttgaacatgttgtattcgccaccgacgttgctatcccaatcgtccgagtcaaattgggtctcacatgcgttaatcgcactctggaacgaacgataacgtgttgtccacaggccgacgccaatgtatacgattattgcagcgacgataacggctacggtgacaaccacggtcgtgctggtcccggacttggtgggtgccggtcgggaaaccgattgggcggcctgtatctgccaattcgaattcgactgagtcggcggattcgacgaatatgatgattccgcacttggagcagacaccaccactgacggagttttcgtttccggagatgtctgcgattgtgccggctcgccggaaagaatcaacttggtcccgcattgcgggcagaactgctgcccaggtgccgactgcgcaccgcatttatggcaatacatcatgttctccttcgagctcaagcatccttatcactgaccagcagcagaatgccgctgatcagattgacgaaaatcaacgtgcacacggcgaacgtggtggtattcggcctttcgccggtgtataagcgccagctatacaccgtcattggaatcatccaagccaagcaaatcagaaacaggaaacctgaaccggacgcaaacaaagtggcgacgccatatagtccataaagaccgcagaacacgatattcactatggcggcgatcagacgcaacgtgctgtcgcgactggttttcacatagccccttggcgtaaacgtctgcacaggttgctgcatatagatgtattgcggttggggctgcgtctgcgtaaactgcggcacagattgaaattgttgtgattgaggtgccgtctgctgctgtgttgacagtagtcttgccccgcatttgaggcagaatatttgcccttcaatactggttttcgcaccgcattggccacaaaacggcggcaccttcggctcctgcaccgcatgcaggaatgtggtctgcgtttccgtctccggcaatttcacgccacagcgcgcacaaaaacgctgtccgtcaatcgaaacctgtgccccacagttgccacatgtcaccatgtcgagctcctttctgcagcgctccgtctatgcagacagatgcaaactgccttttggaatacgatggaataaaatacacccgtgaaatcagccgaagcgtcctctctactcttcagaagaaccaccattcacgggaatggcgtgattccaacgtttctgagggtttcatacgggctccaaaatgtttttgcccacattttgcccacatttttccatgcttgtctccacctgcaccgcagcatcgagcatacgggcaacatccatcaggtcgctgtcgaacagatccgcgtacacatccaacgtcatgctcgcgttcttgtggcccagcatcctctgtaaggccttgacgttcgcgcccgcgtgcacggccagcgaggcggcggtgtgacgcaggtcatgcggtgtgggccattcctctttcggccagcccaggcgcaccagcgcgtgatgccaccagccggtcgtcttcgccgtgctctgcttcatgatcgggccgccccgcagatcacggaacaccctttcgtccggttcgcgttccccgcatatcggtttcagcgcttccatgacgatgagaggcatgggcacgtcgcgttcctcgctgttcttcggagtgccctcgacccatcgtgccccgacgtacacgaggttgccgcccacatgcagcactccccgaccgaagtccaggtcacgggccttcaacgccgccgcctcgccccagcgcaacccgcagaagcccaatgtcagcacgagcgcccgccgctcctcccccagatgctttcccctggcgcattcgtcggcgaatgcgagcagccgggatatggtcaggtacacgcgacggctcttgcgcctcggcagtttgggcagttcgacgttttcacaggggttgtcgagtatgagcctgtcccgcacggccatgcggcagatgccgagcatggtctggtacgggcggctcacggagggagcacccgagttctcgatgacgtcgctgatccatgcctggacctcggcgcgggtgacggtgccgatccgacggtcggcccaacgctcctcgcagtagagcctccatgagtcggtggcgttgacccgtgtggtttccttccaaaacggccatttttccttcagccactgctcatacaggtctccgacgagccgtttgccgccttccggatccacgtagctgttggttgccttggcgatggtgacgtgctcggccgcccagttctccgcatcgatttttctcttgaacccacgcttgtcggtctgcgttccatccggcttgcgatacctcacgcgatagcgtgcttcgccttttgatgtcttgtatctggtgacattcgccatgagtgcctctattccgatatatcctgataaggatggacgataaattcaaagtgccgccgaaaccgtggaccggagcaagcatcaaggcactccgagacgagatagtgcgaggcggcgaggaagttcccggactgagctaccagaccgtctatgtctggtattcgcgggtgttgctcgatgtggtggacaggcttggccgcatcgactatgtcggaatcatcggcgagcagccggaaatctccttcagggtcaaaacggtcgataccctgagggacaagctcatacggcaggacagcacacccttgtatcggatccatgacatcatcggcgcaagggtcaccgccagtatgacgctccagcagcagaatgatctggttcaggccattgcctcgctgttccccaagcaccagatatccgatatgagggagcatcctcatagcggatatagggccgtgcacgtcatcgccggtcttccccgcggcatattcgcagaaatacaaattaggactctcccgcaggacgcatgggccaactgctatgaggcgatagctgaccgttatggcagagaaataaggtatggagaataccccgactcccctaagggcagggagcttgttcaggcgattcagggtacatccgatgggataagaagcctggagcttcttgactcggaacaggaaatcgcagtcggggatatcctcgataacgtgaccaagatgatgcgtcatctgacggagtattatcatgcgccgaatcctcaggaacttgagaagataataaaaatcgctaataatactggtagtctgatgctcaaattgggaggcgaacatggtcggaatggtgatccggtacaaccggaagaccggtgacaggatcgtgcgcgaataccccggcccaaacgggtacgcgaatgcggtctccgaccccgatttccgcaaggacatgggcaagcatcttggcgattgggagctggccgtcatcggctccgactcgttcgatgcgattcgcaccacgcactcccggtatttcacgggacgtgacgttactcccgtgcacgcatgattaactagcattttcgggtatgcttcgccccgtgtaggatagtgggcgaagcgtcctcctttccatttctctggtgggattgggattcttcaagccctgctgacgttgcaccgtcagcagggcaattctcatttcatccagcgaagtctgccgtctgaggcgactcggcatgtcagtatgttaccggccgatgatgtgccggttgaaccctcgctgctgcagaacgagcctccgcgcaccgttccgatggacggaggagctgtttgctgctgtgcttgttgctgctcggcctgctgttgagcctgccgtgcggcttcctcggcagcggcctgctgctgtgcttgttgttccgcctgttgccgagcctgttcctcggcggctttcttctcttcctctgctttctgagctgcttcttcctccgctttcttcttttcttcctccgcctttctggccgcctcttcgtcggcggccttgttgtgtactcgaatcacgccgttgttcgctgacagaatctcccagttcgaatagagaatgaccgatttgccgctgtcgctttcgaccttgtagtccgaggcgtcatacccttcatcggtcagagcggtgatggccttgtccagcatcatgccttttttggctatgttcggcaggtcagaagtgtctcgcttcactgtgagcgtgatagatgtggaggtcttctccttttgccctgcttcgggcgtctgttcctcgactttccatttcctgtctttacctttggtgtcgggcgtgacagtgatggttttgaagccttccttttcgagggcaatcttggcttcgaaaactgtctggcccacgacgtcggggatggccttggacggtgtgaatatgtagccgatgacgccgatggtcagcagaacgatgatagttattccccaccagcgcttgtaccatggtttcttcgcgccgtgtgaaccgtgtcgtccgtttcttccgccattccctccgtctcggggaggcgttgtcggtgtggctggcggctgctgcagcacttcggtcggtgccagtatctccatcggctgttccgacgtggtgggcagctgctgcgttggggttgggaacgttgacggggtgtatgccggttccttttggctgcccatcgtcgtgttctttcttctcgccttctttgacggcttgtcgagcctagtctcgtagctgatgccggtgccggggattatcggggtgccgaaccgtgtgccgcctttgcctacggtcacgtgcggcgcgccacgcttgcccatggtcacgctggttaccccgcttttgccgaggttcaaccgcaaccccttgccgagacttatacttttgcgaatcctgaatcccatgactctcttcttcccctaaactgctacacggtcgtgcagcagtgtcctgttcttgaactagctggattcttcactcgccctgttggcgctgcaacgccggcagggcaattctttttaattggtcgaatcatgtagcgacggtgaatcgatgccgcagaaaccaagtgctatgtggttgtaatcgctgacgtcaaccttcaacccgtcaacatcgggattgtctttccatacgttgttcaggtcgccgttggcgtatttccaatcttttgccatcccgttgagcgggtaagtcgttccgtcgattgtcatgatgacggcgttgtggtctttgcattcgacggtcgtatcgtccgccgaccaaggccagtattcttccgaatacccgtaatcgtcaacgaatgattgcttgctgagctcatggttttttgcggattcaccgcatgctgtcagggatgcgaccattgccgcacttagcagaaatataacggctttcttcattgtcttctctttctctataacaatgcctaagcctggggcaaaaccattcccctagaattccacggctgggtcttgtgggatttccacggtatagcgttgcccgttgatggtggcggccgcgctttccacctgaactttcttcgcggtgggttgccgttccgcttccatggcgacgtatgcggtgacgatgcctgtcttgccgggctccacactggcgttgttgctcatcgacatgctgtccacgacgttgtcgttcgcatcgaggtaccggaaatcgaggatgatatcgtcaagggttttattcgtatcattgcggacaatgtattcgaccacgcgggtgccgcttgtgtcgcgcacgttccgctccagaatggtcaggcccgagctgccctcgttggcctgcggcttcagttcgtccacctgctgctgaagcgtttccacttgtccgctgagctcgttgcgctgatccgtaagagtctttgctttcgcttccgactgcgaataggattcacgaagattattgatgattgggttggcgtacaggtacatgccgccaatcccgccagcgagtccgatgaccagtccgacgaccgccgtgatggcgatgatggcgggtatcggaagtttcttcgctgccgggtgtggtgccggagatacagtttccggctgttcgtcttgtggtgccggtggttgtgccgacatgggggctggctcggtcattatttcttctttcttcagatggctacgctatcgtgtagccagtttttatatgccctgattatccatggcattacgttcagttctcttgctattgcgcattcgttactgccgtacaggagctcggcagtaacgtagtcggcttggctcatgagcattcgagcagcttcaatgtctgcccgctgttccgtgtaaatatcggttttacagccgatatcatggtgtttggcatggctgatttcatgtgcgagtacgcaccgacgctggataggcgaaagcttatcgctgaggataatctcattgcgttccgcatcgtacacgccctcgagcccgtccggcaatggtcggtcgcgtattctggtcgcccattgcagggcgacgtattccaaagcgtcctcgctcatatggcatcactcccctaatgttccaaaacggcgattcggaacattagaaccatgtgaatcatgtcattagatggttcaaatgttccccggcgcattacggcatctcctcataggcttcctgttcggcctcaatgtcgccgtgcttcgcggccatcgcataataatcacgagcggtcgcatcgtccgaatcaggttccaccgacaatgacaccgggcctcgctcggcacgttcaatgaagcgctcggcggcctcgattaattcgtgagggtatactccgaacacctctgcaagctgcgctagctgaatgacgttaatattgcgctcattttgcaataaacgaatcaaagtacgctcattcaagttcgctttttttgcaagttctttgatagtcaaatgtgccgcagagcgttctgctgcaatagcttttgacgttgcttcgttcatgtccatatgggcagtctacagcactttgtaaagccagcgtactgaccatatggtcggcgtgtcgtgcttgacggtgactatttggtcagtaaagtgaaccatatgaacactctggaatacagcaagcaagtagccgagaacgtgagtaaagccctcgatggtgccaatctcagcgtctctgccgcagctgaaaagaccggtatcccccgcaccacgctttcacgccatctgaaccatccagaaacagctccgtttgacgtaatcgaattaagtcgaatcgcttccatcacacgaaagacagtgagtagccttactcggttcaaggccactcctgcgctcgctggcaaggaggtggcgtgatgaacggtccgacggttcttataatcgcgcttttccttctgaatatcgggttgtccatcaagaacgagcttgaccttcgtgagatcgagcgcgctcgacgtaagcgcgcttcacttcaaccatcgataccgacaagcccaccgaacccaccaatgaaggaccacagccactggcaaaaggagataaacgattgcatacgaaaaattctaccgtcccagtgacggccgtcgagaacacccttccggcgctcgccgaaggagaggtgaagtgatggaagtccgcgacatgtacaggctggccgttcggttcatcgggtacggcgtgacgttgctgttggttggcggggcgatcgccgcgcacctcacggggtatgtgatggcgcacgacgaaagccttatggaacggatcgaggagcgactacgtcagtaaaggctccccacccgctgcggacgcgcctcgtcgacgaaccagtacggaataacggccggattgatcacgaggctcgtatcggtcgtggagttcgaagaacgccgcaccgaggtctccaccacggcaccggttttggcggcttccgaaagattctcaagcagatccttgacgtccacggaatcggcaagaagccaaatcttgtcctcatatcccaaatgcaaacgattggtcatttagttttcacctcctctcatcactggtagttaggcaatgtccagcttaggggaggtgaaccaacccttgaaaactagagaaaggaaacatcatggtctggttcatcatcgcaatcatcctcctgctcatcggagtcggcatgatcgccgtcgcccttgccaacggcggcgacggcgcgaccctcggctttgtccccatcgtcgtggcgggtctgctgatgattcccgcatgtctgtattcgcaggatgcgggcgaggtcgtcgtgctgaagaacatgggcggctccgcgcggggcccgcaggttaccgtcaacgacaagaacggcgcgcaggcggacatcgacatccaggtcaactattcgctcgacccgaagtacgcgatgaatctgtacaaggactacggcaagcagaccacgttcgtcaaaagcgtggccgctgtcgacgtgcgcagcgtgcctcgcgaggtctccggccgattcgacaccatccaattgttgaccgaccgcagcaagtacaccgccgccatccagaaggcgttgaccgcgaaatggaagggcatgggtctgcgcgtcgagcaggtgtcggtgcaggaggttcgctacccgcagtccatcacctcgaagtacgcggaggcgcaggccgccgagatcgacaagcagaaggcgttgaacgagcaggaggtcgagaagaccaaggccgagacgaaacgcatcaaggcgcagggcgaggccgacgcgaacaaggttttgaacgattcgctgaccgacaacgtgctcagacagcactacatcgacgcattgcagaatgccgaccagctgatcgtcacgcccgaggggtccaacaccctcatccaacccaagtgaggcgaaccatgaacaccaaggaatacggccaccacgcgagcggctatcgcaaggccgacggcggcccgtcgaaacggttcatgcgcgggctggcaatctgcgccgtcgcgttcgtggtctgccttgtctggctgatgacgcacttggcttgtgccactcccctcgccaacggcgtctgctcgctggtcgcgttcctgggagtccccctgcggctcctgtgcctcgtggcaagcgaggcgggagtcgaataaaggcttgccggggttcttccttccccggcaatcgacaaggacagtcgctaacaccatcgcgccgcacccttccccagctggtgcggcgcgcggggccggcaggttcgcccccgccggagatcgcgcggtgtcatgtacgcgcggcaaacggcgggaagccgttcgattcggcacggtccactccccctgcgggaaagaaaaagcccacgcggcaacgtgggagaagcaaaacagctacaaggaaaggatacaccatgagcgccatgattccgcccgacgtcatccaggacggcgtcgcctattggaaggccgacaaggtgagcgcctatttcgggggctctcccaccgtgggcacgctcggcgtgtggagataccggggcgaggggccgaggttcgtgaaactcggctgcagacgcgagcaccgccaacgcgatacgcgccgcgtcgtctacccggtcagggaggtgatcgcatggggagagcgcaacggtctccagcagcagacggtcgccgcgtgagcgaaggagcatcgatgacgagccagccggatgattacgactatcgggaggaaggcgaaagcctgttcgaatggccgctcgacgccgcgggcatgcgcatgggcgccggcgaactattggacagcctgctcgaggtcatccagcatctgaatcgcgcggacgcatggccgctgaccatattgccgccccggttcggcgacgtggtggtcgaccgtggccggcgcacgatatcggcggtgtgcctgtggaaacgcaagccgtcgaacgattcgaaggaggtatgaacatggcgggcgagacagtcatcacgatcgtcggcaacctgaccgccgaccccgagctgcgcaccatcgccagcggcgtcgtcgtctgcgggttcaccatcgcgtccacaccgagaatctggaaccgccagaccaaccagtacgaggacgggcaggcgttgttcctgcgctgcagcgcgtggcgtgatctggccaaccattgcgcgcagtccctgaagaagggcacacacgtgatcgtgatgggccgtctgcagcaacgttcctatcaggcgcaggacgggtcgaaccgcacgatcgtggaattgcaggtcgacgagataggtccgagcctgcggtatgcggtcgcggccgtggtcaggcaatccaagtccaacggcgtccagcagggccagtcgtattcgggtggatccacttacggcaatccgcaacagtcgggctggcagcaggccgcgccgcaaccacccgccaccgacccattcaaccagcaacagcagtcgcaggaaccggacccgtgggctgcgccgcaaccgacgccaccgtccgacggtttcgacgcggaccccgaattctaggcaaaggaggaatatcatggccatcaccatcgtggacattccggtatcgcaattgatgccgaacccgcataacccgcgcagggacgtgggcgatgtggaggagctggcggacagcatcagggcgcagggcatcaaacaggagctgctggtcaccccgaccgacagcaagtctcccgagggcaagcccctgtatcgcgtggtgatcgggcatcgcaggctcgcggccgcgaagctcgcgggcttggaaacggtgccgtgccgcatcgaatccatgagcgaacgcgacgagcgcgccctgatgcttgtggagaacacgcagcgttgtgatctgaccccgttggaggaggccgacggctatcagggattgttggatttgggtgtgaaggtcaaggagatggccgagcagaccggccgcagcacacgcctggtgcgcggccggttgaagatagccgccatcccccagtcggtgcgtgacgcttccaaggatttcgcgcagctctcattgtccgatttggaggccgtcaccgagttcgacggcgacgaggacacgcagaaggaactgctgtcgttcgcgaagcagtggcaggcatggcgtacggaacacaagcaggaagtggtgctgtgcattctggaaaacggcatcgccgtatacgagctaatcccgcaacaggaagagaccgaggatacggcgaaacacaaggccaaggacgaagagaaacgcagggagaaggaacgcaaggcgaagctcagggagttcaccgacaccgcggaacgcctgcgcatcgaatggatccatgagcatgtccccggcatgaagaaggacatgctgcgtgaactttcggaacgcctatgcctcatctcaatcatgggaatcggcgaagggaagataaggccggtgtctgatttcgactacgggtggacggacgcgctcaccgcatattccggaatgacgaaaccgctgccgtcgcccgccaacccggaggacgacgatccgttgtggttcaacacggacgagaacggcaaagagcttcgccgccgccagcaggccaaccctacgcgggagctcgccttgctcctgttcgcgcacatcgaggcagccatcaccgtggacacgtgggacaggagcgacgcacgcggcagatatgacggcccgatgctcaacgcctactacgcggtgttggaatcggccggctacacggtgtcggacgcggaacgcaagggcttggaactgtgagcgaaatcgttctggcctgcatcgttgtcgtgttggcggtgctggtcgggtggattggaggcaggaaatgaatacgagggtttgtctgacggtgcggaacggtgatgatccgccggtgtccgtggagcgtgtggtggttgattcacggcccgaggtgggtgcgggggtcacgccgatgatgctcatggacatgctgcacctgttggacgagtcgtgtcatgtgaccgagatcaggataaggggggggcgaactgtgagtctgaaggcaactacgtgggcgttgtatgagacgccgaagacgttggatgcggtggagttgcgactgctgcttatcatcgcggacaataccgacgattacgggcgtggtttcgcgaagagcaatgggaagctggccgaactggccggcatttcgaagcgtacggtgcagaccaagctcgcgaacctgaagaaccttgggcttatccgcgcgggcaaccagaagcttgtctcctatctggctccgaatcgcaggccggtggtgtatgacctgtgcatgacgcgcagacacgcagattttgcaccccagtctgatgcggtcgaaatcaccgacaccgacacggcttctgcggctacttctgaaacgcccgtattggctacctccgattctggggtgcagctggggtgcaacaggggtgaaactggggtgcagctggggtgcaacaggggtgaaagcatggttgcacacaatacgattaatccgatagaaacgagagaaacgagagagaacgcgcccgcgagcaaaaccgacaccaaccgaatcaaggcgctcgccgaataccggccggacgaagccacaaggaagctcgcctccgaatacgggctcgatctcgacgcggaactacgcaaataccgcgaccacaggctttcccacgaccgcatcccccaaggcagcatcgatgcggactttcgcctgtggctccaacacggggccgaaaacgggtacggcacacccgccacaccagcgccccaaccgaaacagcatcagcacacgtggcgatgccggcacgtgctcgatctcctgcaccggaccgccgatatcgccatggaagtcggacccgacgacacgagttgccgtctcgccgacctgctcaaccaaggaaaaaccaacgatgaggcgctcgccgcactcggcctgcaccctgacgaactggaggaaatcgcatgaccaggaaaaccgaagccctcttgtgggtggatatcgagaccacgggtacggatccacgtaccgacctgatgctggaaatcgggttgaggtgcacgagcatggacgcgaaaaccgagcacgcgcgcttcgagtcggtcatcaaacccggtgtgctgccgaccgacaggagcttcgctttcgcccacaaaacgcatgaggcgaacggcctgatcgatgaggtcatcgacgccagccccgaactatgctccacggctcgtgtggcgctcgcggtcatcgatttcacgcagtcgatggcggaaacgcatgtgctgcatccagcggggacgaacatgatgggcttcgatctgccgttcctggaacattacctgttcgccgaggaccagtgggggcgtttccaccgcatgctctcctaccggtctttggacatgacggccatccgtttgacgcaaaccgcgttgggagccgacccttacgagcattacacggagccgaaaacacatcgcgtcaaggattgcctggacacggacatccacgaatacgtcgaatggctggaactggtcaaatgagccgcaccaaccccacaagagaaacacaccggctgaccgccaggcgcgaccactaccggtgcctgcgatgcggcaacgagctggaccacatctggagcggccacagcctccaccaccggcacatgcgcagccacccgttccccggactccacctgccatcgaacctcatccacctgtgcggctctggcaccaccggctgccacggctgggtacacaaccatccaaaaacggccatggaatacgggtggatcgtcagcatgggcgaagaccaccccgaaaacatccccgtctatgacgcacaccgaggctggctgctcctcgacaaccagggcggatacacgctctgcgaccgagacggcaacccacgataggcaaccagccgaaattcgacgcacgccggcgctcgccggctggggaagagagaaacatgaccttcgaacagacgaacaggaagcaacgccaacgcatgaagacggacgccagatcgcacaaggcgacggccaggacgattctcgacagcccgctctacgcaaggctcaagggcggcgaggacctgtatacggccgtctgggcgttgtgggaatcactcgccggcacgggattgtcgaacatgacggcgggcacggtatgccacgcatgcaagacccgtgacctcagccaattggaatgggcgttgaggtcgacggccgaaacgggacagatcaagccatccgccccacccgccagaacacccgtccactgccaggcatgcggcaaggaatgcaggccgcacgccggcaccccgatcatgtgcagccaatgcaaggagaacctgagacgaaggaaggcgaggcaaggcgagaggaagacgaaaccatgaacgacctggacgagtacatccaccgatgccggttgaacctcgaaccccaccacctccggcccgcagacgaaaacgacgacaagcattgcctgatctgcgacatcagcagcgctcgccgacacatccgcatggacggtttatgcatcaactgccacctcaaatggagacgcaaacacgatcccgcataccgcaagcgggtcaacgcctaccagcatcgatggcagcaggagcatcccaatgaattccgcgaaatgaaacgccgctacgagcagaggaaacgagcaaaggaacaccaatgagcgtcaaaacctacacagactccaccacacgaatcgtcaccgaaaccaccgaaacacgcgtctgggaaatccactgcgacgccatcggatgcaacaacagcctcgaattccgggaaaaccaggacaccggagacatcacagcagacggcgactacaccggccccgacatggacaacgaatggctcaacatccacgacaccaacaccgccatccaaaccgcactccaacacggctggcaagaaggcgacaaaggcatccaacgaggccacatctactgccccacacacaacgaaaaccaataaaacaccaacaaccaaaaaagaaacaacgccggcgctcgccggcatagggaaaggagagccgatgaaaggcataggccgtgcgctcgggacgaagatggcgttgcggctccaacagctcgaacagttgcaggaacccaccgaggcacgacgtatacaggcacagtccaaggcgttcgaacgggtgtgcgacatcctcagccgccacggctaccagatcagccggtggacccgcaccgaggatcttgagaccagactgaaggaactggacgaggcgctttcgagcgtggtgcccaccggcacggtggaccgcgagaccctgtacgccatcagctgcctgcaacagttgagaacgactctgggactccaagaccgaaaggagcacggacgatgagctataaggcgaagaattcaccccgcgaggagtttcgagaggtcgtcgcagccgccatctacgactacgaacaagcgcccgcgaaatgcctctacacgaccaaggatgcggcagaccaactctacggccattacggcgaggaaaccgaggtgaaggaatgaacggagtacagcttaccaaccatctgaccgcgcaattcatggcctcagccctgagccggtacgaggccagaatcaccgaggacggcgacttcagagcctacatatacgccatgagcctcaaacgtctcaagcgcaaatgcgagaagtatgcgaagcgtgaacgcaaggctatcgcatatgtcgccacgctcaaggaggaatcatgagcgtaagtagtctcaaacgcgaggaaatactcaaatggcatcgaagcaaagcggccacgcccgagtacacggcgaagctgcttggcgtgccattggatgaggtgctgtacatcatcgcccatccggaaacgcccgcaccccacaaggacgatttcacgcccgaattcatcgaaccattgctctgaattcagcgtatcaacactgaattcagcgtaaaaaacgaaaccctccaccgaaaagatggagggcacgctcaccaagcaccatgatagccagaacgtggagggtttcaaacaatgttcatcaccaccgaaccatgccaatactgcagcaaacagcaggtcgaggcaccatggacgctctgccaggactgccgacgcacctacgccaaaacactccaccagctacaccgcaacatgcagttattgcagcgcgtcgcacggcatgagtacaagctcaccgaacccggctcaggcggtaaaccacaaggcggtgaagcaccggcacccgtcaacatgcacgccatcgacctgctcgacgaagccgaaagactgctgcaggacgcatggtacgacgcgggatccgtctggtccgacagatggcagcggctcatcccccgaatgcagtcgcatctcgcatggctatgcaaggccaccaatgcaggccggtccctccgccagttgattcgcgcgaaccagcgcatcatgccattggttgacaggaggccgcgcacccgcaggataatcggcgtatgccccgaatgcggacacgaggtcatggccgcgaagggcgaatcactgctgctgtgcaaatgcggcaaccccatcaacgtgcaggagcttcgcgaacaaagccaagccaaggccgaatcaatgcacctgaccaagacgccggcaggcatgagccaatggctgcgcgagaactacgggtacgaggtaagccgcaagaccatcaccgacgcattgcgccgcggcaaactacccagcagcaaacccatcgaagacggttactgggagttcaacatccgcgaaattgtggccttcgccgtgtccaagactcgacattaaaacgacatccaaaacacctgacacgcgaaacacaaaacccaagcgggagtaggctgccgccaccccgtggtatactccgtatcaggattagtgtggaagcctctgaatcaaccggttcaggggctttactcatatccacccaatggtcatgtgccatggcaatcaaccggcatgaccgcctatgcgcgtagctcagcaggtagagcggcggtctccaaaaccgcaggtcgttggatcgaagccaaccgcgtatgccacacaaaacatccgcaatgcgaggtgactgcaacatggtcagctacagtcgtcaagtccgcaagggcggacgccaattcgaaaaagaccgcaaaaaattcttcctcgaatgcaaagcggaacaccgtccatgctggctctgcggaatgccaatcgactacgacgccccgcagaacaccacagacgacagctacaacctcgaccacttctatcccgtcagcaagcggcccgacctgcaacacgaccccgcaggcttccggccatcacacacccaatgcaacaacctgcgcggcaacaaggatccagccacgccaatcggcacactctcacgccaatggatccgagcagcataggaggttcaacgctcatggacatcgacgaaccagtcaagacattcaacggcgaaacggtccgcgaagcaacctatcccatcgtgctccacatcagcgccagcctgtccaacagcaacaccgactacgacctaggcgagatcgacgtggacctgccaatcaacctcgaaccaacggtctcgggagacggacgcaccgtcgtcatacccaaggtcgacagtcagtcattcaccagacgactcaccaacggcgtcaacgcgttcatcgacgcgttcaacgcctgaccaaccaccgggaggggcggtagaatcccaaaaccggccacgggcgggacacgacccgcatggccgctcttcctctccctccgaatttgaccaccccatcgcgcacgcgcgggaacggagccatcatgcctaatttgaaggtggagacgttcaaaatctccgacctgagcacgtatcacaaaaatcctcggcgcggcgatgtggatgccatcgccgaatcgttgaaggcgcgcggccagtatcggcccatcgtggtcaacatcggcacgcacgcctcccacgattacgagattctcgccggcaatcacacgtatctggcggcgaagaagctcggttggaagacgattcaggcgaccacggtcgatgtggacgatgaccaggcggcgcagatcgtgctggccgacaatcgtctcgccgacttgggcggctacgatgacgagactctatccgctttgctgtccgatgtgagcagtctcgatggattgggctggtctcaggatgatgtggatgagcttgccgccgcgttggagcctgagcgagacgattcggaggttgaggatgtcgaggtgcccgatgatgctccgcagcgtgtgaagcgcggcgaaatctgggtgctgggcgagcatcgtctcatgtgtggcgattccaccaaacctgaggacatgcggaaactgttagggggggggaggccgatctgtggctgacggacccgccctataatgtcgccattgtcggcaagacgaaaaaacatctgaccattgagaatgattcctgggcgaacgatgacgagttcgtggagtttctgcgtaaggcgttcgtcacggcgcttgacgtgttgaagcccggatgcgcgttctatgtctggttcgcgcagactcaagccgagaatttcctcgccgccgccgacaaggcgggcatgactattcgtcagacgcttatctgggccaaaagcacgttctcgcttggccgtcaggactaccagtggaagcacgagccgtgcctttacggctggaaggacggtgcctcacaccgctggttctccgaccgcaagcagaccaccgtgctggaattcgagaaacctgcgcgcaacgcggagcatccgaccatgaagccggtgcccctcatggcctatgagattcgtaacagcagtcgggtcggtgataccgtgctggattcattcggcggctcaggaagcacgctcatggcgtgcgagcagacgggccgcaagtgcgtgaccatggaactcgacccgcactactgcgacgtgatattgaagcgttgggaggattacaccggccaaaaggccgaacgcatcagcgaataggaggtgagtgatcatggccgaggataaagaccagaaggccctgcgcctgttcctcggtgccatgagcctgcaggagatccgcaccgtcctcaacttcaagacggtttcctccgccgaggccgcaatccgccgcgcgctcgccgcgaaccgcaagggcaaggacagggacaccgaacgctccgccgaactggaacgtatcgacgccctgtatcgcgccgcatacccgcaggccatccaaggtgacttgaaggccatcgactcgtgcaacacgttgtccgaacgccgtatgcgcatcctggataaaccggatgacggcgcgactatcacctcgaattacgaggcgacggtggccgcactggatacgaccgaagcggacgcggcggcgattgcctccggcagagcgatagcccgccaaatcgattactcgctgcagcatggcactggtcaggaggtcaccaaggcgctctacctcgtgccgcatctgatgaatgtgctgcgcgagttgggagcgacgccggctgcacgcggcaatatccagaacgccgccaaagaggtcaagccggtcgccgatgagcttgaggagtatctggcgaaaatcagctaaacgggaggcgtcatgggcatcggtgaaatcaatgacgacgcccacggcatcaccactccccgcatattcactcccccgctgcgcgaattgacgccggaaacgtcgaacgggttcgcggtcatcgaattcgccgaaaagttcctccacgtgcatctctacccgtggcagaaatggctgctgatccacggactcgagcttctgccggacggctcataccggttccgccgcgtggtgaccgaggttgcccgtcagaacggcaagaccacgttgatgagcgtgctggttgcgtggtggctgttcgttgattctggccgtcatccggaattgtcgccggcttggaagtttctcgtggtcggtgccgcgcagacgttggacaatgctcgtgccccgtatcaggccgtgctgaattggtgtaatccgaatccggcttccgagggcgaggccgcgcttgcggtgcccgtattgcagaagcgtgtgcagcgggtcaacaattcgcatggcgaagaggcgattatctgccgtaacaaggcgcagtatatcgtgcgcgccgataagaacatccgttccaagtccgcgagccgtgtcgtgttcgatgagctgcgcgaacagcataccgacgatggctggaacgcagtcagtcaaaccacgaaagccatctggtcaagccaattgtggggcatctcgaacgccggcgactatcgtagcgtcgtactgcgccgagtcgttgacgagggccgtgccctggctgaatcatggaatgcgtcggtcgagaccggcaagcagtcgccggacgaatgggccgatgaacatgacccgtcctatgggtattttgagtggtcggctccggataaatgcgagctggacgatctcgacggcattcgtcaggcgaacccctccatgggttacgggccgatgacgtatcggagtatcgcggccgacatcaacggcatgaccgaagccgcgtaccgcaccgaggtcttgtgccagtgggtgacggccgacatcacgccgtacatcaacccgaagctgtggaagcgcggcatcgacccgaagtcccgtatccccgatgacgggcgcgtagtgctttccgtggacaccagcgccgaccgtgagaccacctatatcgccgccgccggctaccgcgaggacggattgccgcacgtcgaactgattgtgcgccgcgacggcatgctctgggtgccgaaatacctcaaaatgcttcgtgaggcttggccgaacatccacgaaatcgccttgcagtccaagggctgcccggccgtggacttcgccgacccgctcgcggaggccggttggacggtgcatctcatcgagggctttcgcatgggagccgcaaccggccgtttccgtgaccgagtgaaggaaaacaaactccgccatctcccccagcccgccatcgaacagcaggtgagtgtggccgtgtcccggcgtcttggcgaggtcgaggtgtgggacaggacgaaatcagcattgcagatttccggattggttgccgaatcgcaggcattgtacgcgctggagaccatgcaggctgtggatgtcgaaccggctaaggcttccgcctattcggggcatggattgatgattctttgattttttgaagcgattggaggtgccttatgggcctttggagcgccttgaggaacgttttccagccgcgctacagcatttcctttgatttgtctgaccagatggccgtgattcagggtcagacggaggccgagcttttcaagacgcagccgcatttgcgtaccgtgattacttttctggcgcggaatgtcgctcaggtcggtttgaaggaattcgagcgtgtcagcgacacggacaggcagcgtgtgaccgatgatgtgctgataaatctgctgaagcagccgaacggcacgatgacgggctatgagttgatgcgtcagcttgtggctgacttggcgctttacgataacgcttactgggttgtcatgcagacacctgatcgtgatgccgacaagttcggtagctggcagattcagccgattccgccatgctgggtgcaggcgaagcgtgatggcagtgtgttccagccggcctattatcgcgtttatcctaatttgggcacgtcatactatgatgtgccggccgatgacatgcttgtgttccacgggtggaaccctgatgacccgacgcagggcgttactcccgtgagggccttgaaggacattatcaacgagcagattcaggcatggtcgtatcgcactcaggtgtggaagcgcggcggccgtatcggcagcgtgctggtgcgtccgaaggatgcgccggaatgggatgacgccgaccgtgagcgtttcctgcgcggttggaaggaattcaccgacaggggagcgcaggccggtgccacgccattgcttgaggatggcatggagttgaagcgtttgggcttcaatgctcgcgaggaggaattcagcgaggtcacgaagctttcgctgtccaccgtcgcaagcgtctaccacgtctcgccggtcatggtcggcatccttgataacgcgaatttctcgaataccaaggaattccgcaagatgctgtattccgagacgcttggtccgaccatgcgcatgatcgaggacaggataaacactttcctcgctccgaaggtcggtgcgccggacgtgaattacatcgaattcgacatccgcagcaagctttccggcgatttcgaggagcaggccagtgtgatgagcacttcggtgggagctccgtggattacgcctaacgaggcgcgcgccagtcagaatctgccgcgcgtcgatggcggtgacgaactggttgtgccgctcaatgtcaccaagggcggccagtcaagcccgcaggatggcggtgacccgtcgcgtccagccgacggttcggccattgaatcggacgacggcgagaaaacagcggcaatcgtcaatgcttggcgcgaccgcttggagaagagcgtcagatcacgtttcggcgccggtatgggcgtcgatgacatcaaatggctcaaatggcagaacgaactgcaggccgacctgaccatcaaggccggtttggggcagttcgatgccggtgtgagggcattgcaggagacagaggacatgcgaacgcatttcaaggaggtgcatgatgcactttaaggatttcgattgccgattcaaggccgacggcgaggactcggcgctcaaggacggcgaattcatcgcctacccctccactttcacccgcgaacccgactgttacggtgaagtggtggcgaacggcgcgttcagcaagacgatcaaggcatggcaggacagcggcaacacgctgccggtgttgtatgggcatcgtatggatgaccccgattacaacatcggcggcgtcgattcgatgggcgaggacgatcacggctggtggattaaaggccatttcgacatggactctccgaaggctgcgcaggtctaccacctgatcaaggaaaagcgtctgagtcaactgtccttcgcgttcgacgtggtggacgagggcgaggttgagcttgatgatggcaccaaagcgaacgaactgcgcgaattgaaggtgtatgaggcgtccttcgtgccgatcggggcgaatcaggataccggcatcgtggacgtgaaggacgcgctgagccggttgaagaccggacgccccctctcacagaagaatctagacattctctcgcagatcgccgatgacctgacaggtcaggcgaagaaactcaaggatttcgtggctgagaacaccactcagtccgacaacaacaatgacaatgaccagagtgacgatgcgaaggcatcggatgccggtgcagccaagaacgaggagcctgaaggggccaagtccgaggagccggacggtttttccgaagcggaagcgttgcaactcgcaataaagattgcccaagttgggcggaaaggagagtgaccgtaatggcatctctcaaggaaaagcgagccgcgcttgtcaagcagctcgaggagaagcagggtctgctggccgctggcaaggcggatggcgacaccatcgcattcgtgaagaccgcgctggctgaggtcgagggcatcgaccgtcagatggacggtatgaagcaggccgatgatctgctcacgcagatcggccagctcaacgccaagtctggtgtgcggcatgtcggtggctccgatgccatccatgccaagagcgtcggcgaatattacgtccagtccatgcagacggcgggccttgacgtgaagtccgccatcgctcatggttacgaggtcgagtgcaaggcgaacaccgacaccaatgtcgagggtgcgccgtctgccggttacacgccgtatctgacccagaccgataccgagcctgctcgcccgtatcagcgtccgctggtcgtggccgacctgttctctaccggcgccatcaccggcaccgtcctgcagtacccggttttcgatgagctggaaggcaacgccaagatggtcgaggagaccggcgccgccccgcaggtccattggaaggacccgacttggaagcaggacaagatcggcaaggtggccagcttcttcggcatcagcgaggacatgatggatgatctgtcctgggtcatcggcgaaatcaacgacgcagcgcagtatgacctgaagctgcaggaggagacgcagctgctgtccggcaatggcagtgaaaacaatctgaccggcctgttcaaccgtgaaattcagacgatgaataaggatgaactgtccgacgccgaccgcctgtccaaggccgccctgcagatcaccaccaccaccaacttccaagccgacgcctacgtgatgaatccgcttgacttttggaagctgaccatcgccaaggatgcgaacggcaactacctcaacctgaccgatggggccaagctgtggaacatcccgaccgtggccaccgccgccatcaccgaaggcaccgcgctggtcggtgccttcaaaagcgccaaggtgctgcgcaagggtggtctggtcgtgaagatgaccgactccgacactgacgatttcctgcacttcaagcagaagtgccgcgtctccgagcgtctgggcctgcaggtcaagtatccgaaggccttcgtgaaggttactctcggtaaggcggcctgatcatgacgcagaagtatgtgcgcttcgccactccgaaagaggcgaacgtcgacaagacgcaggacgtggcggagcttgtggcgcttgacgccaagggcaagccggtcactatcggcggtgccgtctctcttccggtggcgaagaatgtgccaaaggcagcttctaccgcgccgaccaagcaggaattcgatgcgcttatcgattctctggtggccgctggcctgatggcagccaagtaagtgattgggggtgcggcatgactgccgtgattggtgatctgattccaagcgccgactctttccaagtcgatgccggtttcaagatgagggccgctcaggctgcgattcgcaagcattgcggctggcatgtcgcgccttccgtcacccgcacgattcgcttggatggtcatggcggtgactcgcttctcttgccatccaagcatgtgaccgcgctttcaagtctgaagcttgatggcgtggagcacgtgcaggacgcgcgtttcagcgaggctgggagccttgtgctggtcaatggcgccaccttccctgatctgccggggagtgtggaagcgaccatcactgatggctgggatttggaggacgtgccggaagtgcagatgatcctgctggacatcgcgtctcgtgtgatgcaggtgcccggcacggtatcctcccaatccacgaatggctcaagcgtcacctaccggtcaggttccgatggtggcgtgcctaacgtggcgcttttcgattccgagaagcgcacgctgcagccttaccgcttgtcgtggggggcgaagccgtgacttccgcgttggattatctcggccgtggctcgtccttcagcatgccgggcaccaccaaatggcggcgactgcgtgccaaacgcaagaccaacccgtacaatccggcgcagaacgagccagactggagcgtgcctccggacgagctcaccatcatgggcgcgctctcatccagctccagcacacgcacgccggacacgctcgacacacaaaccgaatcaacggcgtacctcaccatcccagacccggacgccgacatcagaaccggcgatcggatccgcgccgaccccgacgacggacgcttgtgggaagtcgacggattcccctcgaaggatgtgaacgcattcacggggtggcgtccgaccttggaatgccgtctgacggaaagaaagggctgaacaaatggcgaaaagcaggatatcggtcaacttcaacccgaaattcttcgacgagattctcaatagtgcgggagtcaaggcgcttaccacgctggccgcaaacagggcactcgcctacgcgaaggcgtccgcgccggtcgaaacaggcgcataccgcgacggacttggcatagaggaggtcaaaagggagcaccgaacgaccgtcatggtcgtcggccacgacccgaagaccctgatcgtggaggcgcagaccggcaatctggccaagtctttgaagaaggcgaaggtctgatggcaagcgtcatcccaccagacctcgagcttttcctcaccggctggctgcgctccaacatcacggacatccccggcctgcaggtcggaaaccgcatcccggacgattacgacggttcctatccgctcgtggtcgtgcgcgatgacggcggcacgcaatccgccgaccgtgtgacgttcgacagggcgataggcgtcaacgtgctcggatggacgcgcaacgacacgaaaccatgccgcgatctggcggcccgcgtgtacggcgtgctgaccagcgagcccggcatcctcatcggattcgccgaaggcagccgcatctgcgccgtcgtgtctgacggatgcaacggcccgtacccggtcggcgaggacgcggcatggtgccgctactacatgaccgtcgaatattcgacggccggaatcagacaaccatagaaaggaaacgccatggccaaagacagtcagggcatggatctgggacaggtggaggcgctcgtcaccgcagccatcatgatcgtcccgtactccaccgaaaacaaaatcacgccggaaatgatcgcacccagcaaggcaacgacggaacttccgaccgcatacaatcggtcgaccgcatgcatcggactcgtcaagtccgacggcggcaaccaggattcgcgcgacggcgacgaccccatcgagtttttgcaggacgggtacaaaaagcggccgctggcgaccagcctcacgcagactttcagcccggccgaaaacaatgcgctgacccgcaaaatcaccatcggcgagccggactccaatggcgtctaccacgtggccgacatcatccaggatgcgaaatggatggtgtacgaggaggagacgttcgacaccggccgtgtccaccgtcgcgccggcgtcatgcagatcaacgacaacaaacctgaccagcaggagcgtggctcggccacaggccgcgagctcaccgtcgaatggatgaaggacccgttgtacgtggatcctgagcatccgaacacgcgttggatcgaaagctggtacgacccaaaagcgtgacggcggtggccgtgacttcggctgacggcaatacgaggccgtcggtcgtccaaggcgcgaagctcgcgctcaaggccgtcgccacccatgtggacaagaccaccgtggacgtgaccggacaggccatgttcaaatccaaggatgccggcgtggcgaccgtcgatggcggcacgctcaccgccgtcaaggccggaagcgcgagggtcaacgccatatacgacggcgtggcctcacccgatctgacggtcactgtcaccgcacatgccgcctgaccggcggacgaaaatcttcccggaccgcctatctcgcctgtctgcgcggtccgggaaccctttttcaccgcaggcaggcgaaaagcagataggacaagacaatgacttccacttccaccgacttcaagccgaccgtcgaggatttcgaccagtggacggaaaaaaacgacgaggaggcgttcgcctccatcgcgcaaaactacaaggtgcgtcacatcatcaagggcgatgtgtattgggcgctcgtgcccggcggacgcacgtacaagctcccattgtcgatgagcatcgacgatttcacgagactgtcgaacacgtccgatgacacggaaagcgtcgaacagctcaaacgcattctgagcgccttcgcaggcgacaaacaggcgaaagcgctgaacggtgaaccggtgcaggtcgtgttcaacctcctgtccgactatggcgacgcggtagtgcgcgcgcagggtgcctcactgggaaaatccaatggttctcccgccagctcgccgaccacgggagcgtgatccgagccgatttcacggcgcatgggtggagtctgcaggccgatcttggcggcaggctccgctacggcgacgcgatagcgctcctcgagcagctcatcggcgatccgtcgacctacacgggcgcggaactcaacggcttggattatccggcccggtggggtgagataccggtcgtctacgcgcttggcagcgacgagtatccgaaacctttcgattcgcttgcgaaacgattgcgggcggacagggagaaggccgagcgtgagcggctgcgcgaacagaccaagggcatgagcccggtgttccagacgctctacgaggactgattttggacaaaactgaatagtggaggtgctgcatggcgttcggcagcgaactcggttccgcgcacatcagcgttttcccgtcgatgaagggttttcgcagcgcggtcaacaaggaggtcggcgcgagcggcaaggccgcgtcgaagaccttcgattcaagcatgaacggcggcaaaagcggtggactgttcggacgcgcgttcaaaaacggtttcagacagtcggcgaacgatttcagcacggacgtgctgaaatcctacgagcgcgacgtggcgaaatccacggccgcataccgtcaggccatgctccagcagagggcggcggcgaatcaggtgcgtgccgccgaggagagcgtcgccaatgccatcgccaagcatggtgagggtagcacgcaggccgaggccgcgaccatcaggctcgaacaggctcggctgaagctgtccaccatgaccgaccgggcgacgcagtccgagaaccggttgaaggatgcgcagaaggcgctcaaggacgcgcaggacaatctcgccgccagcagcgagaagacagccggttcgctcggagcggcgttcagaaacctcggcagggcgatggccgccccggcgttgggtgcgatcgagaaagtgcgcgccggctgggcgaacgccgacatggccatgctcgacggggcgggcgtgttcggcaagattggcggcatcgcccgcggcgcgttcgatcaggtcgcctcgaaggcgtccgcgttgggaggcaaggtcgccagccccttcaagcagggcgcggccatcgcccgacagttcggcgacgacctgtcctacgggctcggccagcgcatcgacggcatcgccgcgaagattcctgcaccatttaagaatgccgtgggcagcataggcggttatttccgcaacgtcggcggcgcggtcggcggcgtgctgtcgcagattccgggggccgccggcagcgccgcgtcggcgatgggttcgaagctcaaaagcggagccgacgccgcgtggagcgcgatcagctccatgtcgggcaaggccgtaggcgcgttgaagggcgtcgccacggtcggactggcaggtgttggcaccgccgtcgcggctttggccggcgtcggcaagagcgctctcgacgcatacgcgacctacgagcaggccgtcggcggcgtggacacgctgttcaaagacgcgtccggcaccgtgcagaaatacgctgcggaagcgtaccggacagccggagtgagcgccaacgagtacatgacgcaggtcacgagcttttccgcctcgctgatcagctcgctcggcggcgacaccgcgaaggccgcggaactcggcaacaccgccatggtcgacatgtcggacaacgccaacaagatgggcaccgacatcgagtccatccaacagacctaccagagtctggcgcgcggcaactacgccatgctcgacaacctgaagctcggatacggcggtaccaaatccgagatggagcgtctgatccaggacgcgaacaaggtcaagcaggcgaacggggagatgggcgacctgtccatcgacaagttctccgacgtggtgcaggccatccacatcatgcagcagcagatgggcatcagcggcaccaccgccaaggaggccgcgacaaccatcgagggctccgtcggcatgatgaaggccgcatggcagaactggctcgccgaactcggcaaggacaatgccgacatcaacggattgaccacccaactggtcgattccgtgagcaccgtcatcaagaacgtgggcccgcgcatcgcgcagatcatcaccggcatcaccgccgcactgccgcaactgttctcctcattgggcggcaccctgccggcattggtcatgcagatacttccgccggtgctcggagcgttggggcagctcggtacgatgctgctgaccagtgcgaccgcatggatctcgacgagcctgccgcaactgcttgcccagttccaatcgtgggtgacgtcgaccctgccgtcgttcctgcaaaccggattgacgatggtcacgaaccttttgcagggcatcgtgcaggcattgccgcagatcgcgtccacggcggtgaccgtgctgatgacgctgctggacggattgtcggcccaattgccgcagctcatccctatcggcatcaacgccgtccttaaccttgtacaaggcatccttaacaacctgcctcagatcatcgacagcggcctgaagctcatcctcggactggcgcagggcctcatcaacgccctgcccgacttggtaggcaaggccccgatcctcatcggccagcttgtcggtggcatcatcaatcgtctcccgcagatcctgcaggctggcgtgcagctgctcggcgcactggccaacggtttcatagcgtcggtgccaaggcttattggagccattcccggcatggtcggccagatcatgcacgggttcctgtcggccaactggtttagcgtcggcctgaatatcatcaccggaatcgcgtccggcatcgctggcgcggcaggcaggctcgtgactgccgctgtcaacgcggccgacaacgcgctgaattgggtgaaacgcaagcttggcatccattctccgtcgcgcgtgttccgcgatcaggtcggtgagatgatcggcgagggcatggcggtcggcatcgacgagagcgcttcgaaggtgaggaaggctgccggacgattgactggcattctgccttcgcaggacgcctcgtattccgtcggcgtcgccaacgcctcgcgtggagttaacgctgcagcctacggcaatggtgggagcgtgacgaacatcactcagacatttaattatccggccatcgcgccgacatcgataagcacgcagcagaaactgcagaccgcggccatgccgcaatggtgatcggaaggaatccggatgaaggtcagctattcactcaacggccagcagctcgactccgagcatatgcgcgtgcttgtcggcacgacgcattacacgtcgctgtcgccgatcgtcgacacggtgcaggtgagcggccgcaacggcgtcatcgtaggctcctcgattccagtgctggacgcgccggagctgacaatcaaggtcgcggcgtggggcgcggattccgatgcgctgatctcgcgtttccgcgccatatgcctgtctgccgcgaagctcacgctcggcaaaacggagacaacggatgacggctattcgcgcagcatggtcactcgcgttgtgtgcacgtcctgcgagccggacgatgacgaaagaccgttcagtgacctgcgcgtcatgaccgccgtatttcaactgccggacgtgttttggcgtggcgcgcagtggcaggaggcgacgttggctgcgtctggcggcaggctgctgccgggcgtggtttccaagccgagcggcaaggggtattggactcgctggcagggattgcctaacgccagcccgtccgagcttttcgacatcctgccggacggctggctttccaacgcgccgatcggcacgctggtgcttcgtttcggagcggccactggcgttaccatcgccgatccggtgagtggcacgaacctcatgtggggcggcaaacgcgacgcctcacgaccttacgtcttcgtcgatgtggccaaccgcaaggcgtggacggcggccaatgccgacgcatggtccggtggtacggatgagactggcggcatcgactggaccaccgaaccgttgcaggtgtggcccgacatcagctccggcgactatcgcatcaccatcaaacagaccggcggaaccgacaaggtgacatgccggttcctgcaatcatgggagtagttaatcatggctaagtctttgcatgctcgtctcgtggcctacaggccgttcggcgcgcgtatcggcgtattggcggagccggtgagcttcagcgcttcgatgctccacgatgatgatggtgcgatcagcatcgagtattcgatgttgtccggtgacgcgcaggcattcgaccgagagcttaccgacggcctcgaagtggccgtggaggtgtcggatggcaccggctatcgcgagcctgacaacgctcgctatgtcatcactgggcgcagcggcaagaccgacgaccgtaccaagaccgtcacctattccggccagtcgatcagctggctcctgagcaaggcggagaacaatgattccacccatctgctcgcggacggcgacaacaagggcaaaaggcctttttacagttcgaatccgggtgcgatcctcaagaccttgctggacgagaacaaggcgcgtggcggcgtggccaccggcctgacgctcggcttcgacaccgcgaaggacgcgggcggcgcggcatgggcgaagaaatacacgctttactacagcctcggaaccgacctgcagaccatattgagctcgctggtcaatggtggcggctgcgactggcgcaccaccggtaggacgctcaagatgtggaacgccgacagcgcggcattgagccgcgacctgagcaagcaggtcgtactccagcttgcgcgtgatatcggcgaggccccatacgaggagagtatcagcgatctcgcgtcgacgatcctcgtggagggcgacaacaatctgcttttccgcatggacaatccggctgctccgaccccgtggggcaagtgggaatcctacagcagccaaggtggcgtgtctgacaaggacaccgctcaagcattcatgcagagcactctggatgatgctgcgagagtgagaggccagtacacgcgcgatctggtcatcagcgaggtggacagtctgccgctcgtcgactatcacgcgggcgactggatcaccgcgcccaccgtcagccacggcgagaaggtgcgcgtgcaggaaatcgacctgagcatgcgccagggcgagggcttgagcgcgtccatcgcgctgaacgacatcaagtatgacgcttctgtccgtcaggcgaagaagatcaagggcatcaccggtggcgccgcgttggccggcagcgagggcggcacgaccgcctcggccgaccgtgaccatcgcgtaccgaaagcccctctcggattgatcgtgcagacggacgcgtatatcggctcggacgggtatgcccatggattggcgaccgccatgtggagcgcggtcacgcaggccacgaatgacacggccatcgagatcagcaattacgccgtcgagtggcgcaagcacgtggatggcgcgccctggcattccgccggcacgactgataagacgcagctcggtttcggcggcttggattgcggcacgcaaatcgaggtgcgcgtcagggccgtgccgacgtattcggacaagctcggcgaatggtcgagcgttttcgtggccaccgtcgaatcggacacgatgccatgctccgtgccgtcgaagccggtattgtcgtccgagcttggcgtggtgaccgtccattgggacggcaggacaagcactggcgctcagatggaatcggacttcgaccatgtcgaggtcggcgagggcgtcaatgcggacggcatgaccgtcatcagcgccacccagtccggtcaaggcgattatctcgtgaccggtctggccgccggttcccggcacgcctatgcgctgaggtccgtggatcatgcgggcaaccggtccgactggtcggcagtcgcctcggtgacggtcgcgtcggctgtctcgcctgaagaggtcaaacaaatccagcaggatttggctgacaacaagacggctttgaaggacaatacggccaagctcgatcaggcgcggaaggacatccaagccaacaagtcgaatctcgacacggcgaacaagacgctcacgcaggccaaggccgatctgtctcaggcccggaaggacatcgcgcagaccaaaagcgacctgaccgcggcgaacggcgagatatcgaaggcgaaggagtcggcggcgcaggcgtatgccgaagcccactcgaagaaccataccttccgtgggcctgacatgccgaaggacaatctgatcgtcggcgacctgtggctcaagacgcagaagtattggactcgctggcaaggcgagaagaacaattcgccgtccatgctcgcggacttttacacgtactggctcgggactccgaataattcgccttccgtgctcgtgccgttgtccgaccgcgtgatcgacacgctcgtgtgggacggctccaagtggaaccgcatgggttatgccgacgtggaggacaatgcgaagcagatcgagcaggcaaagtcggatatcgcggataatgccgcgaagaccaccgacgcgaagaaggccgctgagaatgcggctgccgcagcgaaaaacgcgcagggcacggctgatacggccaatggtgcggccaagacagcgcaggataccgccaatgcggctaccgctgccgcgaagagtgccaccgcgaccgccggtcaggccaaggatgccgccaatgccgcgcagaccgccgccgaaagcgcgaagaagacggctggcaatgcgcagactttggcgaatacggccaatgagtccgccaatgccgccaagtccacagcagtcaatgcttcgagtgtcgcgacccaagcgaaagccactgccgacagcgcggcccagtccgccaccgatgcggcgaatgccgcccagaaggcgaatacggccgcagccgccgccgctggcgtggcgaacggcaaggccgacgtgctcatccaatccacggcgccggatgcgtcgatgcgcaagccgactaccttgtggatcgacacgacgaatggcgcgaacacgccgaaacggtgggatggcagcacatggatggccgtgaccgacaaggcggccaccgatgcggcgaacgcggctgtcaaggcacatgctgccgcgcagacggcgcaatcaacggctgacaaggctcagaccacagccgcgaacgccgcgtcgcaggcgaatcaggcgcaggccgccgccaagaaggcgcagaccacggcggacggtaagaacctcatctaccgtgggccggacgaaccgtcccacgacgggctcaagcccggtgacatgtggtggcgcacgcagaagtattggacgaggtggaaaggcgagaagaataattcgccgtccatgcttgccgacttttacacgtactggcagggcgctcccaacgccagcccgtccgtgctcgtgcctctcacagaccgcgttatcgaggtgctgacgtgggacggtacgcgcttcacgccgtttgacctcgtggccaataacattctggctgccggcacggtcggcgcgaagaccatcgcagcgaacgcggtcacagccgaaaaggtcaaggccaatgcgatcacggtggacaagctggccgccaattcggtgaccactgaaaagcttgtgtccgacgcggtgaccgccgcgaaactcgcagccgacagcgtgcaggcgcgcaacatcgtctcgctcgccatcaccaccgacaaattggccgcgaactcggtcacgaccgcgaagctccgcgtcacggaggacatgaccgtggccctgctcaacgcgcacaaggtcaatgctggtgacatcgtggctggcgctgtcacgaccgacaagctggccgctaacagcgttaacgccgacaagctggccgctaacagcgttaacgccgacaagatcgtgtccggcgcgataaccgccgacaagttggccgcgaactccatcactgcggtgaagattgcggcgggcagcatcacgacggacaaggttgcggcaggccagttccgaggctacgtcttcaccggcgcgatattccaaagctccgatgcggcgaacactggtatgaagctcaattcgacagcattgcaaatgtgggacagcagtcataaccagaccgtctacttggatggtgagggtaagggcaatctgctgaccggcacgttccagacgagcctcaccggacgtcgaatcaaaatctcaccggacttccgacagtcgcttatcaacagcgatgacaagaccgaaggctcaggcctcgaattcaagcacgggcgcgacggtcacgacgcctacatcgcgtcggaatccagaacccaatccaaaggcgaagtctccaccatcgtaatcaacggaggccaaatgagcgacaccgatccggggtcgttcatgcgtttgggcgaatacaaggctgcggacaacgccaccaaaatcggcgaagccttcctgtccacttacagggattattccaaaggcaaccagaacggtttcgcgcaactgttattgagggccgacccgacgctcaaataccatacattcgccgaactctcagcggtagattcgaacggccgcgttggcgtggaggcggacatcaactccgggtatctgttcctcggcgggttcctcggccgatacgccggtgggagaggcacgattcacacggcctattttcgtggcgggataatgagcggcgaagggtggatgacgcagacgtacacgtatgcctccccggccaaatacggcttataccatgcgcatgtctccgccgactcaatggggtcggtcatagtcggctcgaacaacgattcgccgagcggctgcggcctgtgggcgcgtggcatcggcaacggcgtcaatatcctatacggcactcagctgctcgccatcctggccaaacagtaggaggcgtgatggaaacgaacatctacggcgacgtgttggccgtgaccggtgacgacgggacgcgtcatctcatcccgttggacgcgatcgcctcgtggggcgagctcctcggctgcgacacggacgcggaagcggtcgcggcgatcatacgggtccggtcgaacaggtcagacccgggcgtcatcgacccggccaccggacgaaacgcttggaccagcgcctacgagcaggtggagcacgacgagttggcggaccgtcagcagacgcgcatggccgcgttgcatcccgtgctcacggcgtccggcgcgttgtcgccggacggtcgcgaggaggcccgtcgcctgctcggattggacgcgatgcccgtcatggaggatgcggacggtcgtctcgccgacacgctggccggtgtggccgaccgcatcgccgtggcgcgcgaccggttccgccgacggtcgatcgattatctgaccgaccgtcggcgttgacgcgggccgtggacggccacgcgcatcgactccgccgggatgaccggcgggaaagggaaacaacacaacagcaaaggagtaatcatgacagcatctgacgtcccgcaatccaacgtacgaccggcgacggatggcgtgctcgacctgcgtccgccgaaggaaagcctgcgagcggaactgtgccggctcggattcgagtattcgtccgccgaccagacgggcgaatcatggcgcgactaccagcgcggcgtgctcgccacgttcgacggtgacggcacgtccgtgaccatcgcggacgtgaagacgaatctgtccgccacgttgactctcgaacagttgcggaaggtcactcgcatcgacacgatgaccgccgccgactaacccctgcttttcacctattttttcaacccctgcaatccaatcggattgtgggggtttcgcattgaaaggagacttattttgactcagattccagccgacgcgaatcaggtcatcgaccagctcgcacaacagatcggcacgctcaacaagcagatcgcaatcctgactagtcaactcgaaacggccatgaaactgatcccgaaggatgtgctcgacagtctcgacaaggaggacacgaatgcagaggattaactggttccccgatccgaacatcaccggcaccgcgcccgtcggagtggccaatgcgaaggttgactacctaatcgttaacaaccgcaaatggatacgtgcgaccagcacaggcacgggagacccccacgctgattatgccctgtccggctcgcagattccgccggccggctcgtaccatgtgcacgcccttgcctacgcgcagaaggccacagcctatttcattgtctccgtcagggttggcggctcatatcaacaactgctcaccgtgccggtcggcgacggccagaccgtcacggtgaaccagaccatcaccattccggccggctgcgatcggctgatcgtccgcatcggtcctaacagccaaacggtcagcgtgataggcatgatgagcgatatcctcatcgaacgcgccgacacgtatgacactgccgttggggggggggcttccgggcttcttctcgggggacacgatgccgctcgcataggagcgtccgtcggacgggtggtgtccgatgatggtgacgaactggcacaagcatccgaaaggggacatcgcatttggcgggtggaacgatgtgaccgtcaccgtgaacggggacgggacgagaacctactccaccgccagcttcggatcgctcttcccctttcagaacatgagcgggaccaagatcataccgtcctcgttcgtcgttgccgtccgattccgggaggcgcgtgcggatcaggtggaacgcgccgttgccgtgctgcgcaatggggagaaggacggtatctgggcataccgtgtcacccaagacatggcgggggaaaatatgacgtatccggctttcgttctggcaaagggctctctgaccccggtcgcgttggcgatttacacgcccgaagactgggagagattgcagtcaatgggagtgacgttgttcgacggggacacgatgccgttcgcctagccctcatgggggtggtggcatgatgcgcgttaacatgtatcccaatccgcggttcagccctgacggcgcctcgaccggcacgtggcattttgactacgcgaacgacatgcccggtgacggcacgctccgaccgtcgaactctcaggggtacgacgagctgcgcatccccgagctggaacccggcgtcgagtacgtgtttagcgtcaggtccgagaaccgcctcggcagtggcatgctggttatcgccgataaatactcccagcgagccgtcccggacggcagcgggctgatcgtcgtccggctcaccgcgcccgcaacgggaagtcagcaggaaaaccgcgtcgtttttgatgcccccggagtgtactcgcaaccccagttggagctcgcctcgacgtatgacgcggcgctcgggggggggtatcctcgcttcttcaccggcgacacgatgccactcggctgacgccgcgcaccgggcgggtgatgcccgatgatggtaacgaacctatgcacgagcccatcctcgaccatcgccctgaaagccggcaagtgggtggatatcacgaatattccgaacaagccagggacgaaatattatgtcagtgcctatacgaacgtcaccggcggcactatctcgatgagagggtatggcgacctcactgcaagccaacgtgtcagctacgcgctaaccgccagcgttgccggtccgatgtcaatgaattattccgtcaagtcaggcaatccgaccgtcaccgtgacaaatattctcatctgcacgtgggacgaatatcaggcgaacaagaccctgctcgacggcatcggatatttcaccggggacacgatgcctcaagcctgaccctcacgggggtgatggcatgagcctcatcaccaacctatatggcgatccaaaagccttgcagccactcaacacgtggctgtgttctagcacgcaaaaccacgacggcaaatacacctacaccagcgaccgcaactactggtctgtattccttccggaaatcaaaccaggctatgtgattgcggttgatttcgacacgaccagacgcgacgccttcaaaatggaaaactgttccgcgatatacagcggtcacacgacattggccggcatctacaacagtggcaattgctcgctgttctgcagcaacggcaaaggcgtttcggtgacgatcaaccggatcggcatatattcgcaggacgattggaaccgcttgcagcagtacggtcttgactggttcgacggcgacacaatgccgctcggatgatggtttttccaaaaaaggaggaatgcgatgtgatccagacatttctagccggtttcggcggggtgggcggcgcgtgcgcgctcatcaccctgttgctcaggatatggccgggcgctttggacgcgttggcgaccggcctgtactcgcacgtgcggcccgaacgcctgccctatgacagtccgctttcccagcatttcgcgaaaacacggactttgggagagcggacatcgaaaatcgacgaccgtatggacgagctctgccgcgacatcatcaagaacacgatcatcagcctgatctacggcgaccagtcgcacgaccacagcgaggccgtccgatacgagctcgccaaactcgaaaaactcgacgcgcaatgctgggtggtcaacgcagccgaaaaatacttggaggaccggcaatggcgcatttcatgatcgcaggcggcatatacctgctgctgctcgcgctcgtcctcgtgttcaattttggcgcgcataggcattgattttcacaccggttttcaaagccatcccatttcgggatggcttttctattgcccccttgactcggggcgggaaggacaaagagcatgacaggcgctagtttcgcgcgatggcgcggcagcccgaaccactacaacgggcgcaacggctacgccataagccacatcaccttgcatatcatggtcggcaccctcgccggcaccgacagcgttttccaacgcgccggaggcgcttcggcccactacggcatcggcggcagcggcgagattcaccagtacgtgagcgagagcgacggcagttggagcgacgcgaactatgcgagcaacaacggcacggtgagcatcgagcatgagggcggcatggccggcgtgccttgcacgcgcgcgtgcatggacgcttcggcccgcctgtgcgccgatatcgcgcgccgccaaggctggggccgcctgtggtacgacggcctcaacggcaacgtgtggctgcaccgcgagatacccggcaccgaccattacgggtgtcccgacaaggccgtcaacggccttgacgtcaactatgtaatcaacaaagccaacgagatattgggaggtaacgacatgacaagcgcaggagacgtttggaactatggtcttggagcggacgccacggccgggaaagacaatctgcccgcgtggatgcgcctgagctgggtgcaccacgacaccgccgcactgtacagcatccttacgcgcaccgacgacggcggcaccaaggacggcagcagcggcgacatttacacgcgcgtctgctacatcgacaagcgcgtgcgtgaaatgagcgccaccgtcaccgcacaggccgccgccatcgaagcactatccaaggcgttgggaaccaacccggccgacatcgcggccaccgtggaaaaggccgtgaaagccaaactggacgccttggacatcaccgttaccgccacaagcgggaaggaggattgaccacatgacaagcaccgaaccacagcacgccgatggctacacgccggtgttcgacgcgaccgtgcgcaccatcatctacgtcgtgacactcatcgccggtatcgtaggactcggcgtcagcgcgttcggcgacccgcaggtcggagcgttcatcagcagcgccgcaggcatcatcgccgccgcattcggagtcacctactcccccatgcgactcggcaccaaataagacggcagatttttaccgtcccgaagtcccagcggaacgatcagcaccctgattcaaaattcggccccgcccggcatcgcagacagctcgcacagagcttgactgctgccggacggggccgatttcgcgttgtggcagagggcttcgcgggctcgatttctgcccacattttgcccacatttttcgtaaaaacaggttaaaaaccgttaaaaccggttaaaacgaaaaaagccgctcagccctactcccgcaaggcaaagcggccattttccaacccgttctcagctcagtgcgtcttttaacttgctgaagaatcagtggaagacgatttcatatggcaatacaacatgctgttgttagcatcatacacacaacgggcatcaagatcaccatcgacggattgatactccattttcgagacggccgatttcgcctcatcgctagaatatacatatttcgacgggtccgaagccgccaagccaaacagctccgacatcaattgagtaccatcctgaaaactctgctgcgaaaaagacgaaccatcgctactgccgatacccgcctgtgaagcgatgcagcccagtaagcggaccgtttgcatggttccggaatcatccatagacaatgcaacacgaaggtgatcgccgtcatccgcaaagtccgccgcagcagcatcccgcactccatcacattccgaaacaacctttgcggtcaacgggtcacgatttgctgaatcggaatcagggttaccgttattattatttgatgtttttatccagcccaattcggctatcttgccgctatcgctcagtacatgccatcctgcgatgagcatggcaattccaactacagctgcgataataatggtaatgatcttcttttttgatgagatattatccggtcgcacgctctcagttgaagcccactgtacggccaaaggttcagccgattccacccacaatgatggcgtctgcactttgctggtccgttcgccggatattgcggaatcggtactgctggaattctttgttgtccgtttaagcaatttcgctccgcaacgcatgcagaaatcctgattatcacgagcttttgccccgcatttatggcaaaacatgattatgctccttcgtatgccgttcaatgattgttgcaattactgtttgtagaacacagagtcatcggaaaggaggtcggtttgctgccaccccattgatttgagatttataccggaaacccacaaatacggtttgtcaccggcaggtaaattagaataatccacggaatctacttgaaaatgagagcaatattcctcaatatccgtaccaggcataacatagtcaaactcaacctgcgttctgccatcattcatcatctgacaacgagcaccatcatctacatcagatgcacacaaatagaggggtacaaggacactcgggtatccagcgcctcccatatttccggtatgtaggttatacgcgacaggtgttccgtcatcggccgccggtagtggactctccccagcagatggtgcaatgctattgccagcgatgactacgcaactgccatctttgcggcaatatgtcccctcaatcggagtcatggaatcaccttcatagacggttttgtaaaggtcgaggaactgatcatagttcggcgtcacgggactttccgattgctgacttttgttttgcggctgctcctcgatatcctttttatcctgcgattgctcttccgcgtctttattgtcctgcgacttgttctcctcatccttgttatcttgagattttgtctgtgcttgtgccgcggtcttgcgagcctcattcgcggcctctaccacgttgatgctattcactgtcatcacgcatattgtcgttgcaagaaatgccgacaataacgcaatacataccggcgcaacggaacgaacgatcacgctcaattttggcgcagaccgcatcgcctggctattggtgtcatcaatcactttccggatatggctttccaaagcatcgacatcaatatccaacgacatggcctcatgctcggaatcggcggaaaacgaatggcccatgtccgctttcaacatcgcttccccggccgtgggcataaaatgcacatatttgccaacggcaatcaggaacgaactggttctgcatgacttcggcaataccttgagcagcggacgcatggcatcatgaatttccgtgatcgccgtgctgtataccggctccattcttttgtcagacaccgtctcgcggcattttctatagagttccggtgtttgtatcagcgatacgaccgatataacaatggcaatcgctgcgcacaccaacgaaggcacacctaatttcagcaacaaatcatgttgatgtgtctttccaaccgcaaatgcaatggtgatacccgctgaaacgataagagaaatcaccagaacggcgactattctcagcagatttttatgccatttgttttcggcgacatatgcatcatcgtttttttcttggaattgattgatagcagtttgcgccatatacaatatgcgtaatattttataggaaacatcttcgctgagacctataagttgatccgagagtacattctgctgttggggagcaggattggcgtttattttgtcggtgtaatataccgatgtattggcatcaatacaaaacttggaatcatccacaccatcatctaagaattcttgcaacgaaacaccacatctgccgcagaacaatgaaccttccggcagtttcgtgccacatttggggcaaaacattatggattgatcatccttgtccatcacagtgcatccctttcacgcaacattgcgatacgcaggaagtgcagatatacgcccttccctctggctctgacgttacccccccggtatcttgtcaaaagggctgacggatcggccgcggcgacatcactttccgcgctgatgttgctcaaacaaattcagcggcggcattccgagaaagatatgttctttctggaataccgccgctgaaaacgaatggattatgggctattcgaagattattcctcgtccgccctgttctggcgcagctgctcaatgagatcgatgacggtttcgagttcaggagtcacatcgtctgaaggacgaacgttatcctcttcgtcgtccatctcatcatcctcatcatcatcggcaacggtgttgttgaggatgtcctcttcggtggcctcgtcgtcagcatcagacttggactcgtcgctggaatcagctgcatcaacatccacaacggaatcggatgcgttctgtgcaacagactcatcaccggcagactgggattgcgaggtcccgtcgcctgccgcctcctcagcgggctcagtatcgacggcgttcccgtcaacagtcttctgtgcttcgatatcatcaccggcaggctcgcctgtcttgtcggtttcgccttcggcctcgtcctgggcaacctgctcctgcttgcacggacggttggcaaccacgtcgatatgcagatcgtcaaaggctggcttggactgcacccacagctggcttggctcgggaggttcgatttcggaatgctcaccgcagccgtggtccagggagaccacgcggccgtcatccggactccacttgttggcgcacacgccgaacatacggtcgagttcgcccgcgagcggcacgaagaaaccacaggtggagcacaggttgccttcggcggttttggtgctcaacgctttggggcctcgcggaccttcataccagcgcttggcagcctgcgcacgacccaacgaggtcagcacgtgacggcgggtcagtcggaaggtctcgacggcatcgttgacatccggcagcgaggattcctcgacttcgccttcctcgatgcgctcgtcatccggatcggtaccgatcgaatcggtgggagccagatctgtgggctcaaggcgatctttccaaggaatccacttgggcggcatcaacgcgccctcagtggggatcaaggaggattcgttgacggtccaggagtcgatctcctcgtcgtgatacagcgtcaccgaccattgccatccttcgtagccacggatattcgcggcgaagcggaagtcagtgacgtgatcctcaagatcatatgaggtaacgaaatcccccacctgatcgctctcgtcggccacttcgagcagcacggcgcgcgcgatggcgtgagggtccggtgtcacgatggtttcggtggtatcagtcatagatcagatcagtcctgtacatcgaattgatccgccaccgcacgcagcaacgtggccagctttttgctgtcggcagcagatgggtaacggtgacggcgcaacgtattgccggccgcatcaagcatcttgataaggtcctcgcagatggcggccatgtcatccgccttcgggcgggtggccttgaccaagctgggagtggaggcgatcaggcgaacatccatggcctgcggcccacgacggccgtccaccacggaatactccaccttggcccccttgcgcaacgtggtggcgccagtgggtagggcctgagccggcaaaaacacgtccttgccttcctcactggtgatgaagccataacccttggctgcgtcaaaccaacgaactcgaccggtgggcattgcgaaccttccttaatcctcaatggaaatagtaaaccgaaggtacagtttacctcacagggcttgacctcacgctttgggctgagtcgcctgagtcttacgctcagagctgaaccaagaagtcttctgtttggcgtccttggttttgccggtgggccgcttgggctcaggagcgacgatctgctcaatcggcagcaccacggtgaaggtcaggcctcccccatcggtgccggtggcgcagataaagccgtgatgtgctttgaccacggattgcgcgatggccatgcccaaaccggtaccacccttttcgcgggcacgggatgggtccgcggtgtagaagcgttcgaaaatcttcgagcgcgattcaggcggcacgccggggccatggtccacgaaacgcaatacggcgtatcgatagccggtctgcatcgaggcacctacttcggcggcgtcgatgaaccgccgcattgacgcgtcgctggcgggcatgcgagcgagctgtcttggatcgatggcggccggcatcacaccgagcgcggcctcggcaggcgaatcggcaggcgtgtagcggtggatgttgcccacgatgttggtcaccacctggcgcagtcgagaggcgtcgccgggcagcacgacctcgggccaatcgccttcggcaaggttgaattcggcgggatggttcaaatcgcgcgccggttcgagggaaatctgcatgcggcgaacggcacggtccgggtcgagcgcatgcaggtcgtcgacggcgtcggtgaccagcgacgagagtttcaccgtgccggtcacatcgatgccgcgcccctcatcgagacgggccaaagacagcagatcctcaacaagaacagtcatgcgctggctggaccgttcgatatgttcgatggactcgtccgcacgctccaaggcaccaggcatatcgcgctgcatcttatacagctccgcatagccatggatggcggccaacggggtgcgcagctcatggctggcgtcggagacgaaccgtttcatcttgtcggtggtctcctcctgttcatggaaactggattctattcgggtgagcatggagttcagcgaggcggccagggagccgacctcggtgttttccggcgcggaaggaatacgttggctcaggtcgccggcggcaatctttgcagcggttttctcgatgcgcttcagcggcgtcatcgtgtgctggatgatcagcgtggacagggagccgccgagcagcaccacggcgatgccgaccacaatgcagtatcgggtgagtgtgttgacggtgtcgatctggtcggccagcgacaagccgatgtacaccacggcacggtccttgccgttttgctggaaggtcaccggcagaatacgccatggtgccctcgccgtgacgatggcggcatggttggcattgacagtggggttggccagtaccttggcgatggtgtcagaggaattggagtttccgttggccggatcgttctggctgtccgcactgtcggactgcaccgtgatgatctgcttggccactgcctgcgtagtgaatgcctggccgagcgtgatgccactggtatcaccataggtaggaagaatcggcaccgatacgataccgtcctgcatctgcggcatcagcggggtcacgaccagaggattgccctctttgtctttggtgccgtcggtatattgaatctgcagaaagtacgagttcggccccgatgagtcattttttgacagcagatcgatattgttgaccaccagctggctttgcgagcttaactgggtgtcggttttctgcagcatgtagttgttcaccaacgcacggatggagaaggaaatcaccgacacgccgataagcagcacggcgatggtgcaggccaccagcttgctgctcaacgagatacggtcgatatgccgcatcagcatgtttttcttacgttcgcgccgctcttggaaatgggcggcgaacggcggcattgcaggcatgggattcgtgttcgggacggcgttcggcgtgctgctcggcggtacgccgcctgactgcttatcggggatactcatgagattgcgatgcgttatggatggggcgactagttcttcggttcgcgaatcatatatccgatgccgcgcttggtttcgatcagcgaagtcaccttgcgcttgccgccttcgccgtcgtcgacctcgatgccgtcgactttcttgcgcaggtaggagatgtacgattcgacgatggctgcgtcgccgccccagtcgtattgccagacatggtcgagaatctgtgccttggacagtactcggccctcattgtccatcaggtagcgaagcagcttgtattcggtggggctcaggtcaaccggctgccctgcacgggtcacatcgtgggagtcctcgttgatttccaagtcggcgacgcgaataatcgggtcgtcttccacctgttcgcgggtacggcgcagaatggcgcggatgcgagccacgacttcctcgaggctgaacggcttggtgacgtaatcgtcaccgccgacggtcaggcccatgatcttgtcttgggtgtcgtcacgagcggtgaggaacagcacaggggcgttaatgccttcctggcggatgcggcgggtgacggtaaatccatcgatgtcaggcagcatgacgtccaacacgatgagatcaggctgcactttttcgataacctcaatggcttcggaaccggaagcggcggtgtttacctcgaatccggcgaagtgtagggaagcgaccagcagttctcggatggacggctcgtcgtcgacaacaacaatcgatgcttcaataggcttactcatgcttcctagagtgtcgcgctcttctgggcgtttcctgaatgtcatcttggagttcggccttggaatccttcttgatctccttgcgccgacgaatcaccaccatgaccacgatgatgatgaccagcgccaccaacaccacacccatgatgattatgcctacggtcaccgtggatgatgaggtggaggcttttttggatttcacgatttgatccatcattgccgttgccgcgccagaccagctcggcgggttttccagtaacggctgctgtgcggcttcggatagcttatcgacggttttgttatcgagaagccacttatcggagttcttggacacgacgaccaccaggttgccgtcattcgaggccacggcaagcatcactgtgttcggcttgggattcatggactccatcacggttgccgcccaggcttccggtttctgttgactattgaaactggaaagatacagcagatgcacgtgtacaccggtttccttctcggttttggcgatggcatccgcgacttcggccgcatgggagcccaggagattttccgtatccgtgatgttctcggtgatggtcacgccgctgtcggtgctgctgctggagctgtcagagctgtcgcccgagttatccccataggcatttgcggttatccacattgcgttcatcgctactgcagcaagggcgcaaatggcacaaacaagccattttcggaccatattcccgaaggccgaacaggacggctccgaagataggaccacaatagttgtttttccgtcttcccgattcgttgttgacatatcctccaccttagcggccggtattggcaagcggccgccatacataccattaaccctctagaaaaggagcaacgatgccccaatatcaggtagattccgagcgaatccaatcatcctcggccgcagtggccacttcgatctcgcagatcaggcaggccgtgggcggcatgtacaccaatctcaatgccttgcaggacgcatggcgaggttcggcggccacccagttcaccgcggtagccgaacagtggcgtgcggcccaacagcagatggaggcctcactcgagtccatccaacgctcgctgacgcaagcctccaccgtgtacgctgacgccgaaatccaagcttcgcgcctgttcgccagctagtttcttggctctcctccctgaggggagctcgatcgcgaagcgaaactgagggagtatccctacaccgcagctccccttagtctcactgcgttcgacagctcccctcaaagaggggagccagaatacaaaaaaggggactcccgaaggagtcccctttcagctcaatcagctagcgatcgcttgcggatcagtagcccatgtcggcaccggcggccggggcagcaggcttcggctccggcttgttggcaacgacggcctcggtggtcaggaacagaccagcgatggaggcggcgttctgcagagcggagcgggtcaccttgaccgggtcggtcacaccggcggccagcaggtcttcgtaggtgtcggtggctgcgttgaagccttcgccatcaggcagggaacggacggtgttgatgaccacgtcaccggacacgccggcgttctcggcgatctgcttgatcggggcctcgatggcgcggaacacgatggcggcaccggtagcctcttcgccggtcagggaggtgacggcctcagccttctcggccttggcagcagcctgaacgagggccacgccaccgccgggcagcaggccttcctcgatggcggccttggcgttacgcacggcatcttcaatgcggtgcttgcgctccttggcctcaacctcggtggcagcgccgaccttgatgacagccacgccgccggccagcttggccagacgctcctgcagcttctcacggtcgtaatcggagtcggtgttctcgatctcagcgcggatctgggccacgcgagcgtcgatgtcttccttggagccagcgccctgaacgatggtggtctcgtccttggaaacgatgaccttcttggcgtggccgagcacggaggtgtcgacggactcgagcttcaggcccagttcgtcggagacaacctgagcaccggtcaggatggccatatcctgcagcatggccttgcgacggtcgccaaagcccggggccttgacggcgcaggacttgaaggtgccacggatgttgttcaggatcagggtcggcagtgcttcgccgtcgacgtcctcagcgatgatcagcagcggcttgccggtcttcatgaccagctcggccacgtgcacgatgtcctgctgggaggagaccttgccggaggtcagcagaatgtacggatcttcgagcactgcggtctggtcgtcagcgttggtgacgaagtacggggcgatgtagcccttgtcgaaacgcatgccctcggtgaagtcgaggtccaggccgaagcggttgttgtcttcaacggtcacaacgccgtcctggccgaccttgtccagagcctcagcgatcttctcgccgacctcagggtcggcggcggagatggtggcggtagcagcgatctggtccttggtctcgacgtccttggcggcggcgacgagttccttgacgatgacctcggtggccttctcgatgccgcgacgcagggcgatcgggttggagccggcgaccacgttcttcagaccctcgtgaaccagggactgagcaagcacggtcgcagtggtggtgccgtcaccggcgacgtcgtcggtcttcttggcgacttccttgaccagctcggcgccgatgcgctcgtacgggtcttcaaggtcgatttccttggcgatggacacaccatcgttggtgatggtcggagcgccgtaggtcttgtcgagcacgacgttgcggcccttcgggcccaaggtgaccttgacggtgttggcgagcttgtcaaggccctccagcatgccctgacgggcttcctcatcataagagatgatctttgccatggttgcgtattcctccaaatggctaggtataccggttatcactcgcaagcgtcgagtcgtgacgaccagccgtcagctgctgattatcactctcgacctccgagtgctaacccagacattagcactcgcgaccgccgagtgccaacatcatcggcggcgattgcgctttgggcatgaaaaggccccaaccgtcgaaacggtcagggccttcaatgcacatccttgcgtgcgtgttgctcactcggagcgggcttcacccgaagacagcttgacaacatcctttgcctgcgtgcctttgccggacgaagcgggcgtatactccacgcgatcgccctcgtacagcatcttgaacttattggtgctgccgtcgtccttgatttccgcgtagtgcacgaaaacgtcctcgctgccgtcgtccggctggatgaacccgaaccccttcttggcaaggaagaacttcacggtaccttgtgccatatctgatctttcctttgttcccttaggcgtcgcgacacaaaacctatagggaacgtagaaagaaccgcatcgcgctcccctacctcgcgactagatgacgattgtacagtgacgagggaacaatcccaaccgcagtggcacatttccggtacgaattatttcatagacgtgagaacgctcacagttttcgatgtattccacgccgatatcaggggcgcatcaacaacgctagttgagcagcaccaccgtaatgggaacggcgagtccttgcacctgctccacagccgaaatgccaagcgtggtcgccacatcttcggcggtggctttatcggcttcattctgataccataccacggaagaagccggcaatgtgccgcgcggattggtcgcctcgacgctggtgtaaccggcggtctgcagcacatcggcctgctgacctgcatatccttggattcctgtggcgttgaccacacgcacctgcgtggccttattcacagtcgcggtggctccggactgctgagactgctgatcggagtcttgattctcattcgaggatgtcgtatcactgttggtatcggattttgccgaatccgaagtcgagtccttggacggatcggtcgaagtggacgaggaatcatccttggtgctgtttttggtctcagccttgctggacgaatcggacttggaagcagtcccggacgtggtcgcagtctgggacgatcctcctattgcattcctgtattccccggaaatccatgcccagaccccgacaccgcacagtgcggccaccagaataacgacgatgaacgggcagaggcgggccactgccgaacgagcgccacggtgaactcccaccggtcccttcggaggattgtcgaaggaatccggttcataggattcgtaggtcatcatgtcgcgtgccataattgccctttcttcctgtcaaaactacccatgagtgtaatcggcaaacaactcatcagtccaccacaccacgcctcgtgcaccggatatgcacgtttgactacagtggtgagtcatgatcaaaccattgagcgaactggtagagccggggtgggcccatgccttggccgacgtggagcccgccatccaccatatgggcgattttcttcgtgcggaaaacgccgccgggcgcccgtggctgccggcaagccacaatattctgcgcgcgttcaccatcccgttcgattccatcaaggtgctgattgtcggccaggacccctacccgaccccgggtcacccggtgggtttgagcttctgcgtggcgccgaatgttcacccgctgccgaaaagcctggtcaatatttataaggaattggttgacgaccttggggtgcccatgcccaccaacggcgatctgacaccgtggacggaacgtgaggtgatgttgctcaacagatgtctgaccgtcggcgtcgggcggccgaattcgcatcagggcaaaggctgggaggaagtcaccgaggccgcgattcgtgcgttgaacgcgcgcacggacgccgacggcaagcccaagccgctggtggcgattctctgggggcgtaatgcgcaaagcctcgagccattgctgaccaatgccttcattatcaaatcgcctcatccgagtccgctgtccgcttcccgcggattcttcggctccaaaccattctccagagccaatcaagccctagtcaccatgggtgccgacccggtggattggactctttagacagaccaacagtcattgtgagtagttacagtgagggcatgactttgttccccacgcaaccgaacataccttcgccgaccaccgccgcacgaccggtcaccgttcccgcgcccggcgtgtcggctccgctgggtgccgatgacgccaaacgcgcacgtatcctggccgacgccattcgggcgaggttcgcccagacactggtgggtcaggataatctacgcgaatcgcttatcgtgaccttggtggccggcgggcatattcttatcgaatccgtgccgggcttggccaagaccacggccgcccagacgctcgccacctgcgtatccggctcgttcaaacgcgtgcagtgcactcctgatctcatgccatccgatctggtgggcacgcaggtcttcgattttgcgtcgcagaagttcaccacgcagatcggcccgattcacgccaatttcgtactgctggacgagatcaaccgttcgaatgccaaaacccagtccgccatgcttgaggccatggccgagggtgccacgaccatcggcgggcagcgtatcgccttgcccaagccgttcatggtgatcgccaccgagaatccgattgaggaggagggcacgttcaacctgcccgaagcccagatggatcgtttcatgatgaaggccgtcatgacctatccttcgcccgacgaagaggctcgcatgctggccatgctcacccaccgtggctccgatatgatcggtcccgacaccatcaccggcgaacgcatttccgtgtctgacgttgattttctgcgcaaggcggcacgccgcgtgcatgtttccgacgcgatcatgcgttatgcggtcgatatcaccgccacgtcacgaggtgccggctcccgccccatcaagggactgtcgtccttggtgcgtttgggtgcctcgccgcgcgccaccatcgccttgacccgtatcggccaggcgaaggcgttgctgtccgggcgcgactatgtggtgcccgaggacctcaaggcgttcgctcatgaggtgctgcgccaccgtattatgctgacgttcgaggcactggccgatggcgtggtcagcgatcagatcgtcgacaagatcgtcgaaacggttcctgttccgtgagttccgattccgttcgcaagaaaatcgaggcccttggcactcagctgagcctgcctaccgtaaggaaggctttgggcgtgctggagggcgaacacgcatccgggcgtcgtggcggcagcggcgatgcgatggatgtgcatgcctatgagccaggcgacgaatcccgtcttatcgattggaagaccagcgcccgccaaggccgccccatggtggtcgagcgcgagcgcctgtcgacgtcacgggtctggttgctgatggacgtaggcctggagatgactggcgtatgcccttccggagaacgcgcatggcaggttgccaccaatgcgctgcgtatgttcgccgcactgtcgttgcgccggtcggacgatatttcgctggtgttcggcgatgagtccagcatcacccgcgtgccgttcaacggtgggttcgcgcagttcgaacgcacgctggacaaggcgcttgatcgtgattgggatcatcaccgtaatatcgacgcgctgctggaatatgcgcgccgtatcaaggatcgtgaggcattgatcgtattggccaccgatgagcatgcgatggaagagcggcatatcaccacgatccgtcgtattacccgcacccatccgatggtgctgatcgatgtggcgacgatgaatccgttcaaggccgtctcatcccgccacgctcccgccgacggcttgagtgcacggcgtgtgccggcattcctgcgcaacgccaaggcagcggccgaggtcgatactcatcgcgcgtatatggccgcggctttggaacaggagctcacccgtgccggttcccatatcattcgagccgcatccagcgaatccatgttcgatcgtttcgtcgccctggtgtcccgggcattggcccgcaccacacgcaatagactgggcactgcacccgaactggtcggactgactttggcgggtgatctatgatgcacagcatgttccccatcatcccgctcgccactgatcccggcgatctcaggcccgtggagtcgttggccttgaccactcccctggtgatggccatcgtcgcatgcctgttgctggcggtaggtctgatcgcgttgatcatcatgctggctcgccccgcacgcaaacctcggaacagcgaccgtgcgcgtggcactcatagcaatgccagctccaaggccgagtggcgtgcccgcatcgacgatgtggtggcccgtcatgaatccggagcactgccccggcatgaggctttcgtcgaattggccgtcatcgcccgtgatttcgccggtgccgcatcaggcaaggagcttagttccagtacgctgaccgatttggcgtacctgaatcgcacgcccgcgaatcgccaaggattggacgcattgaagcagaccattagcgcgttgtatccaccggaatttgccgatgatgcccgcaaccgaatcgcccagacgaccagcgtgcagcaggccgccgagtgggtggcgaatctggtggaaaggtggcgttcatgatgctggcatggcattggccttgggccgctctggccggcgtcttggcagcgctggcgattatcgtgctgattgtcgtgttcgcccgccgtaacgccgccgacgacacccctgtattctcgatggacgacgatctcaataccgagcacgcttcccgtctgttccgtcaatggcgcgctttgggccgtctcgccatcagcgtgctggtgcttgcgctggcgctggccattgtgctggtggctcgccccagccaagtggatgccggtgacgaacgcgcttccagccgagatatcgtcctgtgtctggatgtgtcgggatccacgctcccctatgatcgcgaggtcatcgatacctatttggaactggtcaagcatttcgagggggaacgtatcggtttgagtatcttcaactcgacctcacgcacggtgttcccgctgaccgacgactacgaactggtcaccaaacagttgacctccgccagcaaggcgctgaaaggcgtcgagtcgcaggatgacatcgataagatgtccgatgccgaatatcaggacatcgccaattggctcgaaggcacgcagaaccgcaaggacgccacctccttgattggcgacggcgtggtgtcttgcgcggcgatgctccccggtttcgcttatggcgaagccaatcatgcggatgccgaccgtcagcgtgcggcatccatcgtgctggccaccgacaacgtcgtgtcaggcaaacccacctattcgctgaccgaagcgttggacttgacccagcagaccaaaatcaccgtggacggcctgtattccgggccgaaagccagtgaatcggaccaaaccacaacggatatgaagtccgcgatcgagtcgcatggaggcatcttcctcacccaatcgaacggcgcgtcgatagatgagctggtacgggatattcagtcgcgtagagatacggatgtggagaacaaggcgaaatcctcaatggtggacgctcccggtctgtggacgcttgctctggccgtgatactcattatctggatcgtatgtgcatggaggttgaggcgatgaacggattcaccttctcccccgccttgggctgggtcgccggcggactgctggcggccgggctcgccgtactggccattctcgaaatcgtattgtttgttcgccgccgtgcttccagtgacgagaccgtgtgggcttgcatacgacgtacgcttatgctgctcattgtcgcggtgatggtactgactcccagcgtggtatcgtctaccacctcacaggtcatcaatgccaccgacgtcatcgtggcggtggataccaccgggtcgatggcggtggctgatgccacatacgggtccgagaagaccattacccgcatcgatgccgcgcgtcaggccgtgcatgatgtgaccgctgcttacccggacgccagtttcgcggcgttacggttcggtgcttcgggaacacttgatgtgccgctgaccccggatgcgccggccatcgataattgggccaacacgttggcggtggaagccacatccgtgtcggcgggatccagtctggatgctccgatcgatcaattgctgctgaccgcgaagtcgattcgtgaagcgcacccggatgatgcgattgtgctgtacctcatcactgacggcgaacagacctcgaatgtgacgcgtcgtacgttctcgtcactgcgacagtatctcaatgatgggtttaccgtgggcgtcggctcgaccgagggcggcaagattcccgtcatcgccgatggcgtcagtgccggcgattccaacaccacggaccactgggtggtcgacccggataccggcgaacccggcatctccaagatggatgagaagaaccttaaagacattgccgacgagatcagcggcacatatgtggccgtggacgcttcacagactttggcggattcggtttcggccaagtcgtcgaagcagtggcgcatgaccaccacggtcaaggaacgcacacgcaccacgccggtggtatggccgttggccattgcgttggcgatattgcttgccatggaagtcggtgcatggatcgcgacctcaaggaggctgctgtgaggaacagtaacgaaatccacaagaacgatggctcggcgaatattcggatgcgggcgaaatgcccgctttgggcacgtatcgtcctggcttgtggcaccgtattgctgctgctggttgccggcgtggcggcagtaaacctgtccgcttcgattacgttcaatcaggccaccgcatcattgaatgccaatatcaaagcggctcaggatgagtccactgatatcaccacgctcaaggcgcaacagcagcagaccgatgcgcaattcgccgaggccgggcgaatgcgtacgcttctgttgccgcaagtcaaggacgccatcgacaccaatgcttcgatttcttccgagctgacgaagatcaccctgaaacaggccgaggcgcagaacagcggttccgattccgggcaagcccagtcggcgcagcaatccgagagttcctcagccaatgccaaaaagggcggcgcgttgaccgacgagcagaagaagcaggtcgaggagctgatgaaggccaatcagcaatccaccgatacccagtcgaacaccacccaatccgagcagaaggcgacgcagaacaagggtaccggggccaccaagccgtggtaagcagtcgttcacggttgctctttttctcacatcctcacgggtcatggccttatcgcggctgtttcccggtttcggctgtcggctttggcgtttgtctgatcccgatagcccatggctgatccaaggtgtgcccaaacaggctatttgtggataatcgttacggctatacacaacacttgtgaataacttcgcccaaaatcggcaagctagaaccacattggtcgttccgctggacaagcatgagtcctgtccttttagctggatatatgaatacctacaccagcaccccagcacccatcgatcccgccggcggctttgccggcaatacggtgacgccgttcgattacggcacttgcccttgccatgcggcggtacagcgtagtcgcgacctcgtgtccgtccaacgtgcggccacactggcgcaatcggaccagatggcggtggccgtgaaccgctcccgcaacatcgtgtggaccggtaaagccgccgacctattccgatcgcggctcagtcgcaccgcacagtattcggccagtctcgcgcaagacatggagaccacccaccgattggcttgggggtcatcatgagcgagcacgattactggcaggtggaatcgtccgtttacggcggagtgggatatgcgccagccactcttgaagaatatgccgccatagccaaggctctcgatgacgaggcggcaggatttgcggccatagccacggcttgggaatcggccgcattacagttgcagtcacatcggcatagtgcgccgatgtgcgtcaccttgcagtcgggcgatccgagcgccgttgttcccggccatgtcactgcaccatatgccgcgctgggcaatcggtgttatgaccatgcaacggcatgtcagcggttgagcgatgacctgcgtggcgcggccgatctgctgattcgcgcacactctctgtattctcaggcggagatgacggctcggcgcatgtttaccgaattattgcaggccggtacacaggccaaaccgggatatgccgcggtgggtgttgccgctgtggcggcgggcggctttctggccggctgggctattgacggcaaaccgaacccagcatggatgtccacgttcacctatccgttccaggaaggagtgctcagcggcgcgggcggaatcattggcggcgtacctattggcaagagcattgcgcacaccgatgaggtcaacaaggctgcggggaaaatcgccaatttctccggcccggcgaaagacgtcgtccaaggcaatcatctgaacgtgcgcgaggtgcaggcgaatgccgacgttgtccgtgcaagcagatcggtggccgagtcaatggagaatctgcgcaggctcgccgaagaacggctcggcaaaatcgagctgaacagcggactcgaatatgggaccatcgccattcaacgctatgaacgggctgatggaaccaactcctggctggtcaccatcccgggtaccgatggacaacctgactcaccattcggctgggcgcagaacgtggaactgatgagcgccgatcaggagcgccgcaggaaagcggacagcgctcgcacggttgccgaggcgatgcgtcaggctggtatcggcaaggacgagcccgtggcactgatcggccactcccaaggtggcatcgttgccgccacgcttgcctcggattgggcagaggaatataccatcgagcatgtggtgacagccggatcgccggtggccaatcatccgattccgcaacgcacgtgggtcaccagcgtggaaatcgatgatgaactggtcgccgcgctggatggtgccgccaacccggtcaccgataattggctcaccgtgcaagggcatgtatcgcccgcgcccgcggcaacaccatccacagtgcattcggacgtctcatgcactcccggcgcaacgcccatcaacggtctgaccccatatgacgccgcttccgtggctggttcgaccaacggcagggagttgtcgcattggctcaaataccatcaggccgcttatcagaacgccaccgacctcggctcccccgccgtgcagcgccacgaagcgcattttcaggaagtcatcaacggagaactcaaggaaacccgctattaccaaggccgcatgacccagtccacaaccattgctcccggcgagcgcaccaccgagttcagcacgttcggcggttaaaagtaaataccacacttgacagagttgtcaagaaaggagttaacaatataatgacgagtaggagatggctcatcaaactgatgaagcaagcggcgaaacgcaagaatattacgtttgagagtatcaggcaaagagggagtcatgagatattccaactcgatggactcatgattcccatcccacgccataacgaaatcgacaacgacctcgcgaacatcatttgtaaggaagcagaagccaaactcgggaaaggctggtatcagcagtgaaaacatatcaggtcatcgttcgtcctggcgaaaaatactggattcttgagattcccggtatcggtttcacgcaggcaagaacaacagcagagattgaaagtatggcacgcgaccttatcaccgtcatgacgcaagatgctgatttcgcactcaccatagagacaaaactgccgcaatccgtacaagagcaccttgatgaagctcggcgactgcgcaaggaagaagcggaatgcagatcgaacgcagcgcgggaaactcgcgccgcggcacaagaactacatggcatgggtctcgccctacagcaaataggcgatatactcggggtctcacggcaacgggcacatcaacttgtcaatgctgtcaatgcttagcatcaatcggctacccccccacaatgcaatcaccgcagagacgcggctagcgccactttcccgggattgttgcgctagcatgcccgaaaccccctctatcagcgcaacatccccgggaaagtggcgcgcaaagagtgtcaggcgcgtcgctcgatgagtgcgcggccggatgcgaggcggtcgagcacaccggttttggcgatggccagcatcagataccaggccatcacgccgctgataagcacgccgccggtgacctcggaaatcatgtgcacgatgccacgcgggctgacgaatgacacacccacgtagcgaaacagcatcagatatgtgccgtattccaaggcgaccaacgcaccggatgcaatggaaatcggcagattgaacatgcggtaacgggtcaaagcgaacggaatctcagcgaaaacaccctgcagcagcgccgagataatcacgaagcccaaatcgaactggctaccaatcaccgtttcgaccagcgtgccgataaggttcacgtacagcgccgctccgggtttgcgcagaatcagcaccgccagcgtaccggagaaataccagacggcgtgcacgatgctggcgaaaccgggcagaaccgcaccaaacaccgaagagatcggcatgtacgcgaagttgaatccccagaagatcacgccgcaggccgcgcccagtgtggcaccgaccgcgatgtccaacggctgccatttcagcgacgatacggcgaccgaacgtttcggaagagtatgaatggtggttgcaggcatggtgatctcctagccttaaaggccgcacacagtaatcgaatcacgggcgttccttgacctgtgcggctcgggcgggaacgccacaccacagtgtagccgctcggttcacggctggaagtacccttggaggttatgaagcttaccgatatttcccccgcaatcgcattgaccccgctcgacggccgttaccacaaggccaccgccccgctcgtcgaatacatgagcgaacctgccctgaaccgcgaacgcatgcgtgtcgaagtcgaatggatgattcttctggccaacggctttgagggcaacggcaaccagccaatcgttgacggcgtcaagccgttcactgccgaagagcaggccttcctgcgcgccattcccgaggacttcggcgccgaaggcatcaagcagcacgccgctcatgaggccatcacccaccacgatgtgaaggccgtggagtactacatcgatgatcagatcgacaaggctccggccgagctggccaacatcaacgacgagctgaagaccctcgtgcacttcgcctgcacgtccgaagacattaacaacctctccatcgcccgttgcgtcaagaacgcgatggaaaacgtgtggaccccggagttcaagcgcatcatcgaccacctcgccggcaaggccgaggaattcaaggatatgccgctgctctccctcacccacggccagccggccacgccgaccacgctcggcaaggagctcgccgtctacgtctaccgtctgaaccgtcagctcaagcacatcgaaaaccaggagtacttgggcaagatcaacggcgcgaccggcacgttcggcgcccacctggccgcatgcccggatgtcgactgggtcgccgtctcccgcgaattcgtcaccaaccgcatgggcctgacctggaacccgctgaccacgcagatcgaaagccacgactggcaggccgagctgtactccaccgtctcccacgccaaccgcatcatgcacaacctgtgtgtggacgtgtggatgtacatctcccgtggagtgttcgcccaggtgccggtcaagggtgccactggttcctccaccatgccgcacaaggtcaacccgattcgtttcgagaacgccgaagccaacttcgaaatcagctgctcgctgctcgacaccctctccgccacgctggtggaatcccgttggcagcgcgatctgaccgattcgaccacccagcgcaacatcggttccgcgctcggctactccttgctcgccctgaccaacctcatgggcggccttgagtccatccacccgaacacccacgtcatcgagcgtgagcttgatgagaactgggaggtgcttggcgagccgatccaaaccgccatgcgcgcctgcgagctcaagggcctgccgggcatggacaagccgtacgagaaggtcaaggagcttatgcgcggccacaccatcaacaaggaacaggtcgagcagttcatcgaccagcagtccttcgacccggaaaccgccgctcgcttgaaggctctgacccccgccacctacaccggtgtggccagccagctcgtcgctttcgaccgctgaaataggtgcgatgcgagtccctcgagcccatcgcatccaccacactactgcgctgagtcacaaaccaaaccgcaaactgaaccgaacaaggacaggcgtcaggtaaccatttcatgactactgaacaggagcagtccactacggaagatcgcccggacaaggcgacctcctccactaccgaccggccgatcgcctctggtgacggccggtcggccagttttgctgtcagcggaccggacagcccggcaaccgacgacagcaacgattccggaccgtacatcgacgacatcgctccgcgccgcacgcgcgacttcggcgatctgacccgggccggtctgtcgctgttgatggccgccgtggtcatggtgttcgccgtgtatctgggcggcatgacgcgcggcgtcgaatccgacgcacacaccgcagcccaggtcatcaactggttggctgacttcccctccaccgtgctgacgcagctggccaccatcgtcatcgtgatcatcgtgctcgctcaattgctactggcccgggaatggctgcaggccgcggtgtccgcgctggccatgttcgccggctacggcatggtgtgggtcgtatcgacggcaatcagcagtctgaacgatttcaccctgccaatggcactagtctcagccgccacctcatacggctccgggctgttgcccgacatctacgccggcatggcgtccttcctgaccgccgccgggccacgccgcacccgctccacggtcaaatggagctggaatatcctgtatgccatcgctgcggtgatggtggtgctgtcgtggcattcggtcaccggcatgctggtgtcgatggccgccggccgcacagtgggcatgctgatccgattcgtggtcggcacgcagaacaagggcgtgtggggccaagatctggtcgccgccctgaaaggcatcggactggacaccgcctcgctgattcggcatcaggagcccggcgtcggccacggttcactggccgtcacgctggacgacgatctggccgaaggctcgcgcatctacgatctggataccacggacaaccgtcgtttcatcgtttccgtcatcgacgcgcagacccataccgtcggctatctgaagcagttgtgggactgggtgcgtttcaccagtgtgtccatccgacgtgaccgttccgtgcgtgacgccgtccagcatcatttcgccatgctgctgggtctgcacaatatcaaactgcccgcgcccgcgccctacggcatcgccgataccgacgaatccgcgattctggtgctggatgcacacaccatcgaactgcccgccaacctgaacacgcttaccaaggcggatgccgtggcctacatgcgctacctgtccgtggcgagccggcgcggctatacgcaccggcgcatcacgccggacacgctcgcccggcttgaagacggcaccgccgtgattgccggctggctcaacggcgacaacgcttccggtccggccaacaccgcgctcgacaaagttcagctgctagtgctgttcgccgcgctgatcggcgtggaaccggcggtggaggccgcccgcgaggcgtggggagacacgactctgacggccttggccccgttcattcagaaggtcgcggtcccctcccccacgcgcgcgctggaatcctgggacaagcagctgctcaagggcctgaggagtcgtatcaccgcgctggctgacgaggagacggtggaatccgccgaaccggtgacgctggcccgattctcctggcgttcgatgatcaccatgctgctggtcatcgtggccgtggtcgtggtcttcacccaactgaagcccgaggagatcatcaccgcgctgaccaacgccaacccgttgatggcggtggtgacgctcgcgttcggtgtctgcggctggatcggctcgtcgatttcgctcggctccctgatggcgcggcacaagcgtgacaatatgggcgtcttcatgagccaggtggcaggcggcttcgccaccgtatccatgccagccggcgtgggcccctcgttcgtcaacctgcagttcctgcgcaaatccggctatcgcaacacccaggcgaccgcaattatgagcgccgtgctcgtggtgtattacgccgtgtacttctccatgctggtcatcatcggcctgttcaccggccgcaacatgttctccggcgcaatcccgacaaacacgttggttatcgtgctgggcgttgtggtcgtggtgctgtccattgcgatgatgattccgccgttgcgccactgggtgacccgtcgtcttatgccgctggccaagacgtatatcaaccagctgctggacgtgctttcccagccccgacagctcacagtcagctgcctgggcgcgctgttccagaacgcgaccactgggctcgctttctgggcggccctgcaagcgttcggccattcatcgaatccgattgaaacgacgttcgtcttcctgctggcctatgcattgggttccgcagtgcccactccaggcggtctgggcggtgtggaagcggcgctgacattcgcgttcgtggcggtcggagtgccgcagggcgtggcgctttccgccactttgctgcaccgcgtggtgttctactggctgcgcattccgctgggcgcggcggccatgaagtggcttgacaagcataatcttgtctgattcgtctattttcatacccccttcggggaaatagatgtgaaaacccttataaaacgcgggttttcgcagaaacatgcgctagtatcattgatgacaacatggactaagcaaaagtgcttgtcccctgacccaagaaggatgctttatggcatacaacaagtctgacctcgtttcgaagatcgcccagaagtccaacctgaccaaggctcaggccgaggctgctgttaacgccttccaggatgtgttcgtcgaggccatgaagtccggcgaaggcctgaagctcaccggcctgttctccgctgagcgcgtcaagcgcgccgctcgcaccggccgcaacccgcgcactggcgagcagattgacattccggcttcctacggcgttcgtatctccgctggctccctgctgaagaaggccgtcaccgagtgaccttctgctcgtagcgattacttcgagcattactgacgacaaagaccccgaccgagatggtcggggtctttttgttgtggtgctgtgacgtgttgtccaaccgtattattctggactagttcagcgcttccataagctgctcgaatcccagggtgggctcggcctcgaagggatcgaggagtatggcttcccggcgttcgggggcggtcagggtcaggtgagtccagtcggcggagaactgggctccgacgttcagggccgcgtccacgaaccggccacgcagggcggcacgggtgtcggtcggcggattgtgcacggcgtattccacgttgtctcctgtcagcagctcacgcatctggttgcgggctacgagcgaaccgtacaggcgaccgttggcgatgtcgtggtagtcgagctcaagctgttccatctgggcgaaggtgacgtccgggcgacggcgtttgagcgcgtcgaacagacgcttcttggcggcccagtccacgcggtcggcgagcgcatcgtatgcaccacgctccagcgcgtccagaacgcggctccactcccccataatcgtgtcgatcgtggtggccggcagcgaacttgccagcgcatcgccatgggtttcgatgaaggccttgaccgccgcataataccggcgctgcagacccagtgcggacacggattcgcctgattcgagcgtcagttcggcgcgcggatcgtcaaggaatcgactgaccgtgcgattggcggcagccggatcagcaaaggcatactgctcgaatccggacggaacgccatggcggaaggcgtcttcgatcgcgcacagcacaaggtgcgtgacggcaagcttcatccatgtggaccattgcgaacggttcgagtcgccgatgatcacatgcagccggcggaaggagtcggggtcggcgtgcggttcgtcgcgcgtgttgaccatcgggcgggagcgggtggtggacgaggagacggcctcgtccaggaagtccgcgcgctgggtgatctggaagccgtccggggtcatgcggccggcaccggtgtacagctggcgggtgatgaggaacggcagcagctggtgttcgatggtctccaacggcacgaagcggcggaccaggtagttttcgtggcagccgaaggcgtggccggcggagtcgacgttgtttttgaacacatggatcgtggcgtgtgcgccgtaggattcgcgcagcttgtgctgggccttcagggctaggttgcgcatcacgtgttcgccggcgaggtcctgggccagggcctcgcgcgggtcgcgcgcttcggcggtggcgtattcggggtgggatccgacgtccagatacagacgtgagccattggccagatacgtgttggtggagcgggaacgggagacgatgggctggaacatggtcatcgccacctggccggcgtccacggggcgttcggcaccggtgaccgccacgccgtattcggtttcgacgccgaaaatacggcagaacccgtccatctcggcggatggtacgggttccgtggcgtgcagggagcgggtgccgctgtcacgcagttggggcatcactcgccgcctttttgcacgaagctgttgacgtattcctcggcgttggtttccaaggcggattcgatgtcgtcgaggatgtcgtccaacacgtcggcttggtcggtggactcggtttgggcggcggcctgcgtggtggcgagggcgtcgtcttcctgggtcgcggcctgctgtgcttgaggttgttcgaattgttgtggcatgttgtcttctttttgggctgtcaaactcccctcagtcagccttcggccgacggctcccctcacccgaggggagccggaggagtcaaaaaattatcgctggttgatggagtcgagccacggatactgctgcaggtaatgctgcagttcgcggatgatgagtccattggaggccactacatcgttatcgtgacgccagtggatgcgttcgccgtcccaacggctcagcgtgccctgtgcctcccagaccactacggtgccggcggcgatgcccgcgatatcccacacgtgcagcatcggctcgaagtaggcgtcataggtgccgtcggccactttgcacaggtcgagcgagacggggcccacgcgcttgatgtcggccgggcgtccggcgagcgaggaggccacgtcgagcgcacgctgcgattcgctggggatgaaggacatgccgtagctcagcacagaaccatccagcgaggaggtcatcgacggcacgaccttgtcgcgcttctcgccgaccgcggttttgtggatgcgcacggcacccgctcccctggcggccaggtaggtcaggccgagggccggggcgtgcacgatgccgatgatcggcttgggctcgttgtccgggccgaattcgaacagggcggcggtcaccgtccattcgctcatgcgacgtacgtagttgatcacaccgtcgatcttgccgatgtaccagtaacgctggccagggcggctttcggcggggcgggtggtccagaagccgtcgaagtgggcgatgtcggcgattctggcgctcatgaagcgcatgatcttgttgtccacttcaagcttgtagcgggggccacggtccgcgttctcggtgctcggctgggcgaggttacgcggattgagttggtcgtggagggcatgctggccggcttcttcgagcaggccggcgactttgagcgcaaggttgcgcaggtcctgtggggtctcttcgcgtgtttcttccatagctaccaagtctatcgttcggcgttgatggccagcgacttcagcagatcgatggcgtgttcggctgaattgagttcggtttcgcagtgcgccttggtgaaggcgagcggatcggagatgtcgagggagaacaggtgatggtcggtagcggccatatggccggcattgccgtagaattcgaccgcctcgccctcgtctgcggcgcgcgggtcgcgaacagtgagtcgggaccagctggcggcggccacctcatcgccgaattgcgccacgagttttgccctgagccaggcgcgggtgtcttccggcggttcggtggtggcgcgtgcgatgtcggcggcgctcaccacccgttcggtgcggggttcgagtttggtgaagatgctgtccgcggggtcgagcgccgcccatttcaggtcgatgaccttcagtcgcggatcattccatccgttggccacgccgggtgcggacgttgtggtgattttgcggcgcagtttttcgagcagctgccatttgagcagccattcgatgcggctggcctcgccggtcatggccagacgttcgtcatcgtcggcggcatggcggatggaggcgcagtcgatgagcgcctgctgccacatcgccataatggatgtggtggatttgtccggccaggcgggttcgccggcggtgtcggtaccttcgaccagtgcggcaacctggtagacggcttggcgcagtttgagctggataagccatgcgttggtttcgccgccgttggccagcggcaagattgcccccagcgtcaggtcgcgggaaacggtgtgtatggcctcgactgggtcagacagttcgagttcgtcgaggaaggcgttcaggtcgaatccggcctcgtccgcatgttcgagcagccacagcagcatgctcgtggtgccgagtttcagtgcctgcggcacctccatgcgattggcgtcgccgacgatgacgtgcagacggcggtatgcatcggtggagtgggattcgtcgcgcgtattgatgatcgggcgttcgaaggtggtttgcaggccgactttggcgtggatgtagtcggcgcgctggctgagctggtagcccgggatctcgctgttctcgccaatccctacgcggccggagccggcgtagatctggcgggtgacgaagtggagggtcatcaggcgtgtgaccaagtcgaatggcaccgcgcgggccatcatatagttctcgtgcgtgccccagcaggagcccttgccatccacattgttgcgatgcagggcgatgggggtgccggtctgtgtgcaggcgcgttcggtggcggcctgcatgatgaggtctccggcgtggtcgtatcggaccgcttcgaacgggtcggtggtttccggcgccgagtattcggggtgggcgtggtccacatagacgcggccgccgttgggggcgatcacgttggtgatgttgagctgcggggcgtcggtgagcatgtccgggcgggcggcggcgcgttcgagacgggtgccgcgcgcgtcgttgaccgggtcctcctgccggtagtcccagcggatggatttgctgtggctgtccgcggcgccgttcaccacgtcgaaggacagttgcaccggattgtagcggtccggggtgttcagggataccgcgtattcggtttcggtgcccatcactcgtttaacggtcatgtagtgctccttgagcttgagctattcggcggtgcggatgcggcggatcgggtccatgccgttgatgcgcgaccattgttcggggtccacgtcggccatggaatcgcgggtctcgcggtattcgtcttccacggcggcagcgagcagcggcacggtgagtgccacgtccaagccggtttcgatggattccttgaccgctcgggtcttggcccggtccacgatgttcttgagcatcgcgccggagaccacgtcggccaggaacaacgcatgccactggccgttctcctcctgcacgtcgcatagatggcggcgttcggaggttccgtagatgtcatgcaccagcacggcggacaaggcgtgcgcgtcgacgccatcttccagaggcaggtcgtcggtgaggtaatggtccacgatggcgatggcctgattggttttgggccggccgacgcgaatcttgacgtcgagacgccccggtcgcaacacagccggatcgatcatgtccacgcggttggaggcaccgattaccatcacattgtcgagtgattccacgccgtcgagttcggagaggaactggggcacaatcgtggtctccacatcggaggagacgccggagccgcgggtgcgtagcagcgaatccatctcatcgatgaacacgaccaccggattgccgtccgcggcgcgttcacgggcgcgctggaaaatcaggcgaatcagtcgttcggattcaccgacgtatttgttgagcagttccgggcccttgacggacaggaacacgcccttgacatgggtttcggccggactgattgcgccgtcgccattcgaatcgtaaccaccctcgcatagggcgttcgccacggccttggcaatcatcgtcttgccgttgccgggcggaccgtacagcagcacgccctttggcggcttcaaatcgtagcgctcaaacagcgcacgatgctggaacggcagttggacggcgtccctgatacgaccgatctcactatccaagccgccgatgtcggcgaacgtgacatccggggtctcctccagcaccagatccttgtcgccctcggcgggcagcacttcgatggcgaggcggacggacggatcgacgataatacagtcgccctgattgatgcccgcatacgcgagcgcgccggaacggcggatgagcacgggattgccggaggcgtcggtaacgatcagtcgaccgtcgtcaagtacctgcttgacactgcgaatctggcccacggtgtcagcatcgcgctgctcgaccagcacgagcttctcgttgagcatcacggtggccccggcggtcaggcgggcggcgttgacgttggaggccacgggcaccaccatgcggcgggtgccggaaatgacttcggccgacgcgtgctggatgccgtcttcatcggtgcgggtggaatcgaccttgaccatggtggcgaaggtgagcggcggctgagcgagctgggcgagctgtgacttcgccttggtcagttccttgccggcgcggctcagcgcttcggcgagcgcatggttcttggccatcaggcgatcgttcagcgcggcgagatcttcggtgtcgctcatgcgggttcttcgcttcccttctatccgggattttcggcaacttatggcagtcggcagaccctattcgttgccgtcggcggatttcctgttacgtataacagtacgcacttttcgcaccacgaaccatacgatgaccacaatcacggccgcgatgaccacgtcctcgaacacgccgagcgcgccttgaatcgagcaccactggtcgccgagcaggtaaccggcggaaacgaggatggtgttccacacggccgagccgagcagggtccagccggtgaagtgcaggaagttcatgcggttgaatccggcgggaatcgaaatcagcgagcgtaccacgggaatcacgcggccgatgagcaccgaccatgtgccgtatttggtgaaccagtcgttggctttgctcacgtctttgcggctgacgccggggattttgtctgccgcgagattgatgcgatgcaggcccacccagcgggagatgccgtacaaggtccaggcacccagtacggagccgatggcggcccagacgattgcgcccggcagactcagggtgccgcgtgcggcggtgaagccggcgagcggaaggatgacttcggacgggatgggcgggaagatggattcgagggcgatggccaaggccacgccgataccgccgatggtttccatcagcatgatcagccagtcggtgatggtgccgatcaggccaggttcggtggtggtgcagatgggtgtggggtcggttgcaagaatagtggcggctgccatggaaaaactcatagagggcattgtcccaaggttttcccagaatcagaagcatgacgcaagaagatgtgcattttgttgacaagtccgccgagagcgaagttgggagcccggctgattctgcggtttctgtgccgacgctgagcaagcccggcctgctggttatggatgtggactccacgctcattgacgaagaggttatcgacgagttgggcgtggtggctggctgcggtgaggagattgccggagtgaccgcacgcgccatgcgcggcgaactggagttctgcgatgcgctgcgcgcacgagtggccctgttggagggcctgccgatctccgtgttcgacacggtgcatgacaagctgcatttcaccaagggtgcactggagcttatcgacacgctgcatgaacacggttggaagatcggcgtggtgtccggaggcttccatgaagtggttgacatgttggcggccgagggccatatcgactattggattgccaaccggcttgaggttgccgatgggtgcttgaccggcaaggtgctcggcgaaatcgtgagcaagaccgtgaagttgcacgccttgcaagcgtgggcggaccgtttgggtattccgatgagccagaccgtggctgtgggcgatggcgccaacgatattccgatgattcaggccgccggcctgggtctcgcgttctgtgccaagccaaagacccagctcgccgccgacaaagccatcaacgaccgcgacctaacccacgtactcgattacctgcgccggtaaaattttaccgacctcggctccggcacttatagttgagccatgactacttcaggcgcagaacagttgacgcttgcggggctggctccccgcaagcggcgtaaacgtgcgcctgcggagcatacgccggccgagcagcatcccatagcgcaagtcgtgctggatgtgcaggcgctccacctcggtcagacattcgactacttcattgatgaaaaagacagcgaggccgcacaaccgggtgtgctggtgcgcgtgcggtttggcggtcagagggtcagcggcgtgatctgggcacgcaccgataccagcgatacgccgcgctcttcgattcgctatatcgagcgagtgctaagccccgatgtactggttcccgcttcgatgcgtgaggatatcggtctggttgccaaagcctatggcggcacacgggccaatattctgcgtttcgccgtgccaccgcgcgtggccaaggtagagaccgagcagcggttggccgcgtcgttccgtcggccggtcggcggctcattgccggataatacgcagggtggttttgccgggcgtggcaccaatcccgatgggaccaaacctgctggctctacctttgccgttgccagtaccgtttcggagggagctgcgcaggggtatcgtcgtctgaccgccaattacgccgatgtcaatgtgcttcatgacgcgcttaccggtcaacgtttccaatcttttgtgtttgattcgctgcccggtgcacaggagtggcaacgaaacatggcatggatggtggccactgcgttgagtgccggtaaggctgccgtggttgaattgcccaccatgcgcgaggtcgaagacctgatgcctatgctacgcaattatggactcaaaccgttcgccccggcacccgccggcggctgggtgggcgacgtcgccgtgctcaatgcggagaccatgcctgcggccgaccggtatcgcacgtatctggccgtggcgttgggccaggtgaaggtggtgatcggcacccgcgcggtgatgtatgcgccggttgcaggcccggcactgttcgccattctggaggatgccgcctatcagaacatggacggtatgatgccatatccacaggcccgtggcgtgatgcggctgcgctccaagtcccatggcggcgtgttcgtggccatggccaatgcgcgcaccccgcaaagccagtgggaaaacaccggcccggatacggtggagaccccggtgagcggctattccaccgcgattcacccgctcgcctcgccgctgaaggatgccactccttgggtacgttggctcaatcgcgatgagcttgcgcgtcttgccgacccgtccatcggcgcacgtgtgccgcatacggctgtccgcgtgctatctaaggctttggagagcggccccgtgctgctgtccattccgcaagacagcgtcagtgagactctgagttgtgcgaaatgccatcgtcaggcgcgttgtgccaagtgttctggaccgttgcaactaccggccgaccgccgggattccacaccgcgatgccgctggtgtggggctgctgccatcaattggaagtgcccgggctgtgggcatgaacgtatgcgtgtggtgcgcgtgggtgctgcaggcactgcggctgaactggccgggttgttccgcggcgtgccagtagttttgtccagcaagacgcagggcctggtgcgcgatgtggcttgtcagccgatgatcgtcatcgccactcccggtttcgaaccgcgcgtgcgtccggtcagtgccgagcagggatcggctggccatgagtatcgtgccgtggccgtgctcgacgcttggaccagcctgtatgcgttgggcgtggatgctcggttggatacgttgaccgcgtggatgcgtgcggtgtcgttgtgcgcgccgcgttcccgtggcggccaggcgttgattctcggcgaaaccgacccggccatcgcccaatcgctgatgctctgggattcgaggattcttgcagccaaggatcttgaggagcgtgtggagaccggtatgccgccggccgtggccgccgcctgcgtgtggggccgccgtgatgcggtgatgatgctgatgcagcgtatcggcgccctgggcggcgattggacggcctgcggcgagctgcccggcatgttgggcccggtgccgatcgcgcaaccggacacggtcgacgcccgggagctcgaagccacggccgaccgggtgaaggcagtaatccgtgtgccgcagagtcggcgagccgagctggcggcccgactgcaccgggaaaccgctcgtcatgtggcgtcccgcgaacccggcgagcttcgcttccgagtagatcccaaggacctgatctaatcgtcttcaacacgtgaaacgataattacagaatgaacatcgctagaaggaggacactatgaagggttggcctggagagccggatatggattacgacgtgctggtcgcggatggcgaggccgctgcgaacgccggcaagccgatcaccgacgtgatcttcgatttcggcaacgtgctgatttactgggatccggtcgccgtactcatcccccgctacagccagaagaccatcgacgaattcctcgacaacgacatctccggcttctacgatgtcaacgacctgatggacggcggcaccagcaccgacgaggccatcgccatcatgcgccgtgacaagggcgataagtgggcggacatcctcggctactacatcaagaacttccgcgactccctgaccggcatcgtgccgggcgcgcgcgtgctggtcaatgacctgaaggctgccggcatcggcgtgtggggcctgagcaactgggaatccagtctgttccacgtggccgaggaacagtgcgatattctgcagcagcttgatggcaagctcgtctccggttttgtcaagctgcgcaagccacacaaggaaatctacgaggccgcgttgaaccagttcggcatcaaggccgatggcgcgttgttcatcgacgacaaggccatgaacatcgtcggctcgaatgcggccggcatccgtggcgtacgtttccaggatccggtcaagctgcgtgaactgctcatcgccaatggcgtgaacattccggccgtgcagtgagcatcgacatttcaaggaggaccatgctcaaactcgtgttcgccggcacccccgacgtggcggtgccctcgctcaaggcctttgccaccgatccacgttttgatgtggtcggcgtcattacccgccccgatgcgcctaccggtcgcggccgcaagctcacgcccagcccggtcaaggcgacggctctggagctcgggttgcccgtcatcgatctcaaaccccgctcccccgaattcatggaggcgttgaacgacctgcatgcggatatcgccgctgtcatcgcctatggcaatatcctgcccaagaacgtgcttgatgcggtgcccatgggctggtacaacctgcatttctccaacctgccgaagtggcgtggcgccgctcccgcccagcgtgcgatttgggcgggcgacccgaccaccggcgccgacgtgttcaaggtgggcgagggtttggatgatggcccgatcgtcgcttccctgaccatcgaactgaccggccgtgagacttccggcgaactgcttgaccgtctggccgaggaaggcgcgcccatgtatgtggatgcgctggccgccgtaggtgaaggcaccgccacattcaccgcgcagccggccgagagcctggaatacgcgcacaagatcacggtgaaggacgcccgcatcagttggacggacgaggccgaggccatcgaccgtcagattcgcgcctgcacgccacatcccggggcatggaccgaactgtttgcggaagggccaatcgccgataatgacgagtcaaccgctaaatccctcgccctgcatattctcgccgcacaaccggccgaccagtccaatcccaacactccggccgagcttcagcccggcgagctgaaggtgggcaagaagaacgtgtgggttggtaccggcagcacgccgctggaactcacccaagtcaaggcgcaaggcaagaaggccatgcgcgccgccgactgggcccgaggcgcacgcctctcccccgccgcctgcgtgcgataacaagcaatatcgctcccgccttcggaagcacagtaaaggcccggcatcttcataaagaagatgccgggcctttcagctatgcaatcggcgatcagttgagaccggagagcttgttgatcagctccgggtcacgcgtcgcacccttgtcggccgagcgggcgaaggcggcgtacgccttcagcgcctgggagacgtggcggttgcggtgagccacgtagccgtcgccagcctcaagctcgcgacgacgctcgtccagctgctcgtcagtcagttcgacgttcacggaacgggcttcgatatcgatatcgatgatgtcgccgttcttgatgagcgccaccgggcccttgttggcagcctcaggcgccatgtggccgatggccagaccggaggaaccgccggagtagcgaccgtcggtgagcatggcgacctgtttgccgatgcccttgcccttgacgaaggaggtcgggtacagcatttcctgcatacccgggccgcccttcggaccctcgtaacgaatcacaagcgccatgccaggcttcagggtgtcgttcagaatgacctcgatggcctgctcctgggagtcgaccaccagagccggtccacggaacttccagatctccggcggaacaccagcggtcttgaccacgcagccgtcgggggccaggttgccgcgcagcacggcgaggccgccttcgtgaatctccgggtggttgatgtcgtggatggcgccgttggtgcggtcgcggtcgagcgagtcgaacagggtggtgtgcgtccacggctccggggagatgatgtggccaggagcggccttgtacatctgctgggcttcctcggtgcaggtcgggcgcatgatgtcccaatcggccagcttggcttccagcgtcgggtagtcgatggaatgcacgttggtgtgcagcttgccggcgcggtcgagctcgccgaggatgccggtgatgccgccggcgcgatgcacgtcggaaatctcccacttgccggacggcgaggccttgcagatgcacggcacggtgtgggaaatacgctcgatgtcgtccagggtgaagtccacgtcggcggactgggccatggcgaggatgtgcagcacggtgttggtggaaccgcccatggccacatccatggtcatggcgttctcgaaggcttccttggtggcgatggagcgcggcagcacggaatcgtcggaatcgtcgtagtactggtgagcgatcttgacgacttgcttggcggcacgcttgaacaggtccttgcggtaggagtgggaggcgaggatggtgccgttgccgggcagagccaggccgatggcctcggtcaggcagttcatcgagttggcggtgaacatgccggcgcaggagccgcaggtcgggcagacggtcttctcatagttgagcagttcctcatcggagacgctgtcgtcagcggtggcgtacatcacgtcgataaggtcggtgctcttgactgtgccgtcggcgagcaccgtggtgccggcctccatcgggccaccggagacgaacacggtcggaatgttgaggcgcagggctgccatcagcatgcccggcacgaccttgtcgcagttcgggatgcagatgagggcgtcggcgcagtgcgcgttgcactgatattcgacggtgtcggcgatgatgtcgcgggaaggcagggagtagagcatgccagtgtggcccatggcgatgccgtcatccacggccatcgtgttgaactcgcgcggaatgccgccggcttccttgatagcctcggaaacgatgcggccgaccttgttgaggtggacatggccgggcaggaactcatcgaacgagttggcgatggcgatgatgggcttcttgcccatgtcgtctccgctgacgcccgcagcacggtagagggctcgggcgcctgcaaagacgcgccctgacataatttttgcagatcgcatttcagtcatggttctattcaagcctttgcgagggacacgccatttgtcaagagtcgaataatggaatttgcaaaaacgtaatgtttctcacacatttttttggaatacattcctctggcgagagtccggtatagggctgacagaagtccccccaaacggctacacttgcttcggttgagatagattttccaatgtttggagataagaacaatggcttttggtactgacccgacacccgacggtcttgcgaacccgccgatcgacgatctgatgaagcacgccgattccaagtacgcgctggccattttcgccgctaagcgcgcacgccagatcaactcctacttcacgcagctcaacgagggcctgctgcagaacgtcggcccactggtcgaataccagaacaacgagaagcctctgtccatcgccttccgcgagatcgacgagggtctgcttgaggagaccttgggcgaggacgacgccaacgagggcaactgatcgattcagacgattcgtttggattgtttggacagatcgtcgccgaatgatggtgtgagagttctctcacaactgattttgagcgacacgcttgcctgagttatcgcaatcagctataactcatcatcaggagcgaacaagacgtaaggctcgagccaccgcgctggttggcacgggcctttatttatgcccgcttccgcagtgacaagtaaaaattgacaccgtatcattgtgcctcgcaccccgcggggcgataagtcctgaagaaagggatgatatgacagaagaacatcggcttatctccgccgaatccgtgaccgaaggccaccctgacaaggtctgcgatcaaatctccgacgccattcttgatgatctgctggcccaggatccgtccagccatgtggccgtggagacctccgccgccaccggcgtgttcctggtcttcggcgaagtcacgtccaaggggtactgcgacgtgcagtccaaggtccgcgaaaccctgcgcaacatcggctacacctcctccgaagtcggccttgacgccgattcctgcggcgttgtggtggccatcaccgagcaaagcgccgaaatcaaccagggcgttgcccgtctgactggcgatcaggagaccgccgccagccgcgaagaacgttacgaagcacagggtgccggcgatcagggcgtgatgttcggctacgccaccgacgagactccgacgctgatgccgcttccgatctatttggcacatcgcctcgccttccgtctgaccgcggtccgcaagtccggtgaagtgccgcacctgcgcccggacggcaagacccaggtaaccattgagtatgacgataacgataagcccgttcgtctggacaccgtgctgatctccacccagcatgatcctgaggttacgcaggattggcttgctgttgagctgaagaagcacgtgattgacccggtgcttgatgaggtgctgggttccaaggtgccgcatgacaactaccgccagctggtcaacccgaccggttcgttcatcctgggcggcccggcggccgacgccggtctgaccggccgcaagatcatcgtcgacacctacggtggcgccgcccaccacggcggtggcgcgttctccggcaaggacccgtccaaggtcgatcgttccgccgcgtacgccacccgttgggttgcgaagaacatcgtagctgccggcttggctcacaaagtcgagatccagatcgcctacgctattggcgttgccgacccggtgtccgtcaacgtggagaccttcggcaccgagcaaggcgtgacgcgcggccagatcgccgccgccgtacgcaaggtcttcgacctgcgccccgccgcaatcatcgacaagctcgacctgaagcgcccgatctacctgaagaccgccgcttacggccacttcggccgtaccgacgttgagttcccgtgggaaaagaccaacaaggtcgaggagctcaaggccgcgattgctgcggagtgaggtgctctaattaggacagagagatcataagaataccataagaatagggtgctttccgctgttgatggcggaaagcaccctatttgtttttcgcagtgtcctacgaatctgttcttatttcaatccacgcaccccagtggggtgcgactaaatccatacgggatccgtgacgtggcggtatcatttcaatccacgcaccccagtggggtgcgacttcgtcggatggaatcttatcaaggtgtaccttgtaatttcaatccacgcaccccagtggggtgcgactttattcaattcacttgatttcaagcgatttcgtatttcaatccacgcaccccagtggggtgcgaccggctgtcatgctggacttccaccagcaggatgatttcaatccacgcaccccagtggggtgcgacaaagcagggggggtaagggattcctgggacagatttcaatccacgcaccccagtggggtgcgactcgacactcacctctataaaatcaacactaacgcatttcaatccacgcaccccagtggggtgcgacaccccgaatgacgcggcgcacacggtcatcgtccaatttcaatccacgcaccccagtggggtgcgaccatcgacggcgtgctgccactgatcgaccggatgatttcaatccacgcaccccagtggggtgcgactcgcacgtgctgcgaatccgaaagatacggcctatttcaatccacgcaccccagtggggtgcgactcgtgtttggagcttccgcccgtacatcggtaatatttcaatccacgcaccccagtggggtgcgaccaaacatgttgcgacttggcaacgccgtacgtgtatttcaatccacgcaccccagtggagtgcgacaatggaactgcaaaacgatatacaaaacacgtgatttcaatccacgcaccccagtggggtgcgacgggtacttcatcgccctcagtcaggcgggacaagtatttcaatccacgcaccccagtggggtgcgaccgttcgtccacggtgggaggcaacccacgccaactatttcaatccacgcaccccagtggggtgcgactgacggaggtctcgccatcgccaatccgatcccaatttcaatccacgcaccccagtggggtgcgacaataagcattatattggtttcattcccctaacgggatttcaatccacgcaccccagtggggtgcgaccgcgttgcctgagctcgcgcaatcgtttgaccgcatttcaatc

SEQ ID NO: 117 - DNA, 16716 bp, Unknown
  R206_24m  MAG No. k141_32737
gccggctggtagggtatttgacggtttgcatataactgtctggttcattgggctggcagctcaatacaagatttaggactcataggaaacacatgggcttcgttaatttcatcctcgaactgctgaaggatccgcgtgccgcgattgccggttggattgccatgggcgtggcgccgaccctcggcttcatcttcctcatcgtatttatcgaaacgggtgtggtgttcttcccattcctgccgggcgactccctgctgttcgccgccggtgtgttcgccgctcccgatgccgcgaccggcaaggccgcgctgccgctgttctggctgctgccggtggtctggtgcgccccgattatcggcgaccagtgcaattacttcattggtcatttcttcggccgtcgcatcatccagtccggcaaggtgaaggccttgaccccggagcgtttggccaaaaccgagcacatgattgagaagtggggcccgctggccgtgttcctgggccgtttcttcccgttcattcgtacgttcatgccgttcatctccggtatttccggtatgcgttggagccgtttcacgccgttctcagtgctcggcggcctgtgctggtccacgttgttcacgctgctgggctacttcttcggtaacattccggcagtacaggaccacttcgagctggtgatcgtgctgattctgctggtctcgctcgccccgaccatcatcggtctgctcaaggccaagttcggcaagaagaagccggccaaggtgaccgatgctcagttggatgctatggaagacggcattaagaacctcgataagtaagcaagaaatgtagattaccgcataaggaatcgtcgtgaaaatgaaggccctgactgtgcatgtgaggtcagggccttttctgcatgagatgggcgtgaaacagcagcgtggttatccacatttgtcgtggacgacatgccggggtgtggataactcagcaagctagaaccacaatggtcgattcgtgttgagcattgaacttggacacgtttcaatcggcttatgaatagcaacaccacaccccgcgtggcgcgtaggatcacctcgccagcggtagcacctccgggcattccgctgcccacggacgatgcgccaattccagcgtatcgctactacactccgccgcccaggccgttggcctcatgcgaacggcagagatcgggcgaggctccggcactcgccctaactacagacaccagcttccataacattgtaacgatgacgtcaggtcatggaggcgtggggttgagtgtcatggcttccatgcttgcatggacattggcgagacgtgaacacagctgcgttctcatagacgctgatttcgtggccggatgccttgacctgctgcttggtgtagaacgagagccgggcttgcggttcagccaagtcgacgcgcccctcggccgtatcgagggtgaggcgatgaaccatgagctgatgatgtgggagggtgtgcgagtacttccctatgacccttggagcgcgcgccagcctgactggtgggaagttcaagcggccattcgggctttggcggaaacgaacgacgttgtcatcgtagatgccggtcagggtggactcattgagaccgtacccgatctgcgcagtggcctgcaggtgattgccgcggaattgtcggtaatggggctggccagagccaagtcgcaccggtccagattggattcatggggctgtgaagcgccacatatcgtaggtgtggaaccacgtggcgctccacgtgggagaggccacgtgggtattggcgaggcgcaggactatttgactgccacggtattggggcccatcaagccaagtgtcaatctgtgcggagacgtactggaaggcctcggcatcagatcggtgaccaaaggcagtcgcaaagccatgaacttgcttgccgatctcgtagaacaggccattcgcccggtttcgggagcttctcacaaggaccagtgatgctatggctgccgtcagcacgcgagccaatgaggctggcacagcgctcagaaccatattcttcggtctgctggatgacgtggcatctgacccgcaggttaccgatttggcggtgacctgtgatggccgcgtttgggcggaccgcggcaatggcatgcgcgaaacagtattgcatgtgccgttccgctcgccgcaagtagttcgagaatacgccgtccaactgtgcgcgcagctcgggcgcagactggatgatgcctgcccgatagcggatgccgccagtccggatggcatccgcgtgcatgcggtgattgccccattggtgccacaaggtgccgcgatttccatacgattccctgaccgaaccatggcatcgctacagcacctgagcaaattaggcgtattcccggctgcttggctgccgacgttcgtgggattggtgcgcaaacatgccacagtgctgattaccggcggaacaggcgtgggcaagaccaccttgctcaaggcgctgctggcgcaatgcgacgtgaacgagcgcatcgtcaccgtagaggaagttcgtgaactgggggaactgggacgcgacgatcatgtctcgttggtaacacgcgaggcgaatgtggagggcgtcggagccataagcctggcggacttggtcaaagcgacgttgcgaatgcgccccgaccgcgtggtgctgggcgaatgccgtggcgcggaaatcgtcgacctattgcgcgcgttcaattctggtcatcacggtggcatgaccaccgtgcatgcggacggcgtgaaccgagtaccgtccaggctgatttcgcttggattactcgccggagtcagtccacaggcgttgaccatgctggcggcaggcgctttcgacgcggtggtgcatttggagcgagtgaacggacagcggcgtatcacgcagatcggcgaactgcgcgtagcacatggtgaactggcaggaacaccgctggcggtatggaatggctgccatcctcctcggtatgccgccgaatgggggcacttcattgaacgatggggcatcgttcccaggccgagtggtggtgggtgatgatgtggtgtgctgttctggtggcgctcgccgtgctgatatggccggggaacaagtccgggaggctgtaccggctggcttaccgcgggcgcgcggtcgattccgcagccataaacgaacctcgatatgccgactcacctcgcgtgggcgttgcgcaggtgattacgtccgccatcgcgcgattgcgaggtggcggcacattggttgaagcattcgaggaacaatccagcagacgcttcgccactcatcgcattactgtggaacggctcataacggtgttcgaacagcggcgtctgcccgacgaatcaccagcgcaggtacttgaagctgcacgcggggtcgccgccgcagcggttttgagcgatgagctcggttgccaagcggtgccatgtctggaagcggtattgactgcttaccggcagatgaggctgatgcagaacttgcgatcgcaagcatgtgccgttcctaaagccactgtggggctgctgagcgcgcttccggccgtcactgtggcattgggcgagcttctgggagctagaccattggcgttcttgcttggatcgccacgcggtgtggtctgcttgacattgggaggatgttgttatgctgccggcttggcatggatgcgggcattgttgaaaggcagcggattatgagtacggtgtgggtacacgccgcggcaggctgtgcggcgattgctggttggctgtataaggctctgtctcgtcatgacagccgcttgccgggcgaggagccggccgtagcgcatgattgcgggtcgtcatggaccatactcatattgcgtatgttgcaggtgtccttgcgtcagggctcctcgattccccgggcgcttgacatggtgggcaaagccgtcggcggcgactgcggcgctcgcatgagcgaggtcgggaactccctgaccagaggggttccctgggccgatgcgtggcatgccgctatggctgttcagcatgagggtgcgccagctgatagtccatccaagggaaatacgaataccgcgcaacgagatcttggcctgctgcaatcggctttggaatcgtcatggacgcatggcgatatgcctggtgtgcgcctcgaatccgccattgaacagctggaccgtgacgagcgtgctgctatcgaacggaatgccgcgaagctgtcggtaaagctactgatgcctacagggctatgttttctgccggcattcgtgctggtaggagtcattccggcgattgcgtccttcatgatgtgaatataggcgtgaactgagtgcgcttaggctgaatcttgttgtattgctcggtattgtacttggctgcgtttggttatccacatttgtggtggacgacacgtcgaggtgtggataactcggcaagctagaaccacataccccgtttttcctggtgcatgaagcgttgatagtccacagtggtatgcaccccgcgtcaacccggcgcgggggccaaccactcacatacgcatggggaaggtgcgaagccactgcgcagcttcccctccttaccgaaaggaacgccaatgaatacccctatccccgtcatcgtcgacgggcaggccggcatctttgcgcacagcaaggctcgtgtggccacgctgaacgccaaggcgaaagaacggctatgcctcatggacgcacgcatccgcgccctcatggctgagcccgaagaaggcgcagccactgcggaatacgcagtcgtactcgttgcggctacaggctttgcggcggtgctggtcgccatcctgaagtcggatgccatcaagacgttgctgaccaacatcatcaaacaggctctgaaagtcgggtgacagccatgaagaccatgagatgccggtggaggctcgccagactgccgccagacctatgcacgggatcggccaccgccgaattcgcgatcgtattgcccagcgttatcgccatcgccgggctgatactggcaatgggacgtgtggtcatcgtttccatggactgccaaggtgccgcgacggcggctgcacgcgagtttgtggttaccggtgacgaatcatccgcgcgcagcatagctgcggacgttgcagggggagatccccgcgtcagcattgcccacaacggccaatcgacgagcgtgatggtcgaatgttcggtactgcccggcccactggatgtcactccaacgcgggtcaccggcaacgctacggcgataagccaataactggtcggctgctggctgggcggccgcaatagaaaggaactgcggtgcagggaatgcgttatgaggagggatcgggcacgatggccggagccatgctggttatggcggtgggcattgcgctcgcggtggcggcaagtgtgggcaacctcatgatctgccagaatcgagcgcgttccctcgccgatctcatcgcctttgacgccgcgtatgcgctgtggcatgtggatatcggtgatccatgcgcgcttgctgcaaacatggctgaagcgaatggcgtcacgctgggctcctgctccgtgcgggatgaagacgtgttggtaaccatcaaggtggaaaccatggttccggtggcatcatccgtggagcggatggctcgggccggaccggtgaattgtacggaaggagacaattatcacaataatggaccgtaagcactgatgctctggcgggcttctggacctttggttaaggtgagagcatgagcgagagtgaacgcacagaacgccgtcgcgtggtggccatggtgggcaatcccacttccgataagggccgtggtgccaaggtggatgcgcgagtattgggactgctggaggacgccggccgtgcccataacttcgacgtcatcgacatcaccggcgtaagtttcgacgattccctgaaccaggcgcgtgaacgcgcgcacgagtacgactatctggtggtggtcggcggcgacggcatgatcgcactcggtgccaatgccgtgggttgcggcggtaagccgctgggcatcgtggccatgggctcgggcaacgatttcgctcggggacttaagctgccggtcaatcgcatcgaaaccgcagtggaaggtatcgtcggcgctatcgtgcgcggatcacacattgatgtggacatgggacgcgtgacctctttggatggtggctatgccgtgaacccatccaccggcggggaatacgagtaccgggagaacaagtctgccgagcacccgattgaccggtactatgcgggcatgctgtcctgtggtcttgacgcaagtatcaacgaccgtgcgaatcattcgcatctgccgaccggcaccatgcgctactttgcggcggtgctggtggagctgacgcatatgaagcgttatgggtaccacgtcaaggccacgctggcggacggtaccacggatgaacgagacatcatcacgccgttgctgacgattgcgaattcgcgtcatatcggtggcggcatcgaggtctcaccgtactcctgcttctccgacgggctgttggacctggtgtggatgaatcatgtgccgaacttcggcgaatgtgcggtggccatctcgaacgcctataacggcaagctgctcgcctcaaaggtgttcgggtggaagcgcatacgcgagatcgaagtcacgcgagccgcagaaggcgacgagccaccggtgctgatggcggacggcgaatacatcgggcatctgccattcagggtagtggccgaggactgcgcgctacgcgtgctggtaccgccggccgtagccgcccgtgaggtggactcccgacaggaagtgctcgacgccatcgcccgagacggtcgcgaccccgtaaccggccagttcgcctgacctgattatattggctcccctcattaggctgagccgtaaagcaaacagcccagtgggatgtttgtaggcgagggttcgacgatagtcgaaccagaagaaagtcagccgtaggctgtccgcaattgcggacgagctggccgcgaagcggactgaggggagtgcgggagagcggtaccagagccaatggccgtcagacctcagacgacatagctttcgatatgcagcgtctgcgccatgacctctttgatggttcggtcgctgatgttcggatgcgagcgaaccagcgagataagccccacgattagcgtgaagaatgtctcatggacgttggtgattggcagaccatgcatctgctcgaaatcacgtacggtggtctgggcaatgtagtcggcaatacggtccgccgcgcggtcaatgaacttgatatacagttcggcgttgccatcttggatcatacggtttgagaaggggctctcgtcggcgattagggaacggagcacatgcacgatgtcgtctaatgccttgttcacgttgcctgtttcgcgcgcttggttccactgcttcaacgtggtgaggatttcgtcgatgacgtcatcgagtactgcgtcggctacggcttccttgtcttcgaagtagtggtagaacagcgaacgcgtcataccgacttcgcttgcgatgtcggaaacggtgattttggagaagcctttttccagacacaccttgcgcgcggcttgcacgatggcgtcgcgccgggcatcgccacgggtggggcgtttctcgtcgaggatatcgctcatgggcacctcctgactacaaccgttattgacactatgttaatacaaagaaagcggttaataacaataaaaatgcggtaaccgttgtcagatgaatgtcgttggaatataaagagttttcccgattcggcagctatgagcccggtttatcttgactttttatcggttaattctgagggcaaaggtaggttagtagctatggcacttgcactgtatcgtcgctatcgtccggacaccttcgaaggggtcatcggccaggaccaagtcacggtcccgctgatgcgcgccttggacgaaggcaagcttacgcatgcctatctgttctcagggccgcgaggatgcggtaaaaccagctccgcgcgtatcctggcccgttgcgtcaactgtgccaaagggccgacttcccacccctgcggcgaatgcgaaagctgcaaggacctggccaccggcggtccgggttccatcgacgtggtcgaaatcgatgcggcctcgcacaacggtgtggatgatgctcgagaattgcgagaacgcgctggtttcgcccctgcgcgcgaccgctataagattttcattctcgatgaggcccatatggtcacgcagcagggcttcaatgcgctgcttaaaattgttgaagagccgcctgaacatgtgatgttcatcttcgccaccaccgaaccagacaaggtgatcggcaccatccgttcgcgcacccaccactatccgttccgtctggtgccgcaggaagtcatgggtccctacctggagacgatctgcgacaaggaaggcatcaagcccgagcccggtgtgctgaaactggcgatgcgcgccggtggcggctccatgcgagataccctgtctgtgcttgaccagctgatggttggttcggtcgaaggcgttatcacccatgatgccgctatagccctgctcggcttcacgccggaggcgctgatcggtgaggcagtggatgcggtaatcaatcacaacggcgaagccctgtacggcgttatccagaaagtcgtggtcggcggattcgatccgagacgattcgtcgaagacctgctggctcgtgtgcgtgatctgctggtgcttacgttggccggggaccgtgcggaatccgtgctgtccgacacggctgaggccgaggatatggacgatctgcaccgccaagccaaggcgctgggactgggcgcactgaccgccatggcagacatcatcaacactacgttgggtgccatgaccggagccatttctccgcgtatgcgcttggaactgctggccgcacgattgttggccggcagtgaatcaggctttgcaacagccgctcccgcgccagcttcttctggcatgccgcctgcggctgcttcttcgacttcgactacgtcagccgcttccggtacgggtgccagtggttttgccggcgcatcgcgaggcgggtttgccggagcctcacatggtggattctccggtgctgcacgcaaccagcaagcagccgcgcctcagagcaccgcttcccatgaatccgctgtgggagacaatggccctgtcagcagcccagtcagcgaccggcccgcgggctctccgtctgcgcaacctgccgcagcaactgctgctgccaatgcctggggtgctcccgccacgtcgccggccgtcccggcccaaccggtgacctcgcctgcggcatcggataatcggtccatcgacgagaagtgggatgcagccgtcgccgctttgccggaaaccattcgtgaatatgtgtcacgagacaaggtgccgaccgtaaaattcggtcccaaccgtaagagtctgccttgcctgtcgatgacgttcgacaagtcgctgagccagcacgctttcgccttggccgtggacaacagcggtaagaaggcggcgtccgtggtgttggatgccgtgcgcaacgagttcggtgccaatgcggttattgcaccttctgcggtcgcggcgaatggcgagcgagtcgaatccgtcaaacgtatgagcccggagcaattggccaaggtcaagcagcagattgccatggccaaggccggattggccgcgtcgagtttgggcgcgggtctgggcattcatatggggagcgagccgaaagctccgaagccgactgcaacaggccaagccgaggatacggacgacagccatcgagccggccaatccagtgcatccacggcggcgaagagctggagtgacgatgacccttgggccaagccggccgtaagcaacgcttcaccgcaatctgcagacgggttcgcacctaacgagcccgctgctgcgcctgcgcccgaagagcatcacaagaagcatgttgcggttccggacatcagtgatggtgttgatccgtgggccgctccggctgctcctgttgcacccgctgcgtccgttgcgtccgctggacccactggacagtccacggggcagccagccaccgcagctcccgctacggcagttgccggcgcaagcgatgatccatggaatcagccgcaatctcaggctacggcctcgctggcactgcaaccggtcgaagccgacccgtggaaccagccatatcagcagtctcctcacgatgatccgtggaatcagccgcagtcccagactccggcttcttcggttcctcagacagtgtcgggcaatatgtcgggcaatatgtcgggcgatgacccgtggaaccagccccaatcggttccgcagccggctgccggcgatgacccgtggaatcaaccgcagcccgcacagccgacgccgaatgccgacccgtggaatagccagccgcagccgcaaccgcaagtcgcggccgaggacgacgaatactcgatgaacgaccagtcgctcggcgaggcgacggccatgaatcttgacgatctgaaaaagctattcgaggtcaaaaaagtcgagcaattcgcggcagatgatccgaagaaccccaagaacatccagcctgccaagaagcactcggatgaataatgaggacgaataacgaggaatacccatggcacttgcttatgacggcgcaatacagcgactgatcgacgctttcgggcggctgcccggcatcgggccgaagggcgcgcagcgtatcgccttctacatgctgtccgcgcccgaagatgaagcgcgcgatttggccgaggccatcgaggaggtcaaggccaagatccgcttctgtgatatttgcggcaacgtgtgcgaatccagcccctgcccggtatgcgccgacccgagacgcgaccgttcggtgatctgcgtggttgaagagcccaaggacgtgatgagcatcgagcgcacgcgcgaataccgcggcctataccatgtgctcggcggcgcaatcaacccaatggccaacgttggccctgccgacctgcgtattcccagtctgctcaaacgcttagaaggcgatgaggtcaaggaagtcattatggcgctcgacccgaatattgaaggcgaggccaccaccagctacttgacccagctattgcgacccgtaggtgtcaaggtcacccgacttgccagcggcctgccggtgggctccgacttggagtacgccgacgaaatcacgctgggcagggcgctggccggtcggcgtgaggcctaggccagcgtatcattggcgctttcgcccttgcggcgcatccacggccagaatgcgccgtggcggatgatgcgcgcggccttgtgccgtcgtgccaaccagataatgaacagtcctgccgccagtatgcccaggccaacaccaagggcgatattgcgcgcgtcaagcacgtcattcggctcgggggccggcatcggaattgccacgcggtgcccggagacaagcagtcgatgcgtgttcacgccgtatggcgtacaggtcatcaaggtgacacggtcctcacccggcacaatcttgagcttcgacgtgtcatccggcaaaatcaccgaaatgcggtccactttgtagcccaaagtttcgcccatgacttcgatgtagaagaagtcgccctctttcacctcgtccaaacgggtgaacatcagcgcttcaaccaacccgcggtgcccggtaatgaccgaatgggtggatttacctcccaccggcagcgacgtgccgtacaagtggccggcaccagaagccagtgcttcctcggaagtgccgtgataaatcggcagattgatggactgtttgggcaccttgattgcgcccatcacgccgttgccggtattaagcagtgactggtattccttgtctttctttgaggcggaatcctcgccgctggcttgggatcctccttgggcggcggagaacggatcgacggcttcacccaagatgggctggccggattcagcgagcttcttgttgtatgcgcgggccgccgtgagcttgtctttcgcctgcgggtaaggccagccggctacttctttggctgtggtggctgtggtggcggccaagttgcggtcggactcgaattgcaacgctagcgggaaacaggccacggcgattgcggcgatcagcaacacaatggtgatgatgcgcatcgcccacagattgcgttgcaggcgtcggcgctcggccacgagatcgctaatatcgatgacttcgtcaaatggagttggaacgaatgctgtgggctcgggatgcgctggggaaacgttgtcatttgcggatgtgtcatcaggcatggccgcgttgttttcccgcattttctgtgaggcacggttactcgtcgaacgtcgatgcagcaatgccatagtcgcctgttccttcgcttgatctgctcatgatttgcttatacaagacagccggcccgtcttagtcgtggttggcataggtgctgccgcaagtggcaacgccgcacgtgccacactgcgaaacgttactccgcaccaagcctttcatgcaacatgccgacgagggccatataggggccatataggggcaatgtaggggtataagaagtccgaaaaagtctagttcgtaatctagtgtccaacttccctaatagggatggtccaacttccacaacgaaaatggtccaacttccacaatagagcgggaccgggccttgaaaaggagagaggaagaagaaggtattcagttatggggttctgcggaaacctcgccggtttgctttcgtttgccggtaattgatagttaaccgctcgaatctcaaaggatggatgcggctgtctcaaagaaccaccggtgaaaacttgaatatttgctgaacaacgtaggccatacccgtgtccgcatgccggcgcggggtcgcggggtgaacgcgacagcccttataatcgttgcgtttgcgtagaatatcgaccaaacaaatccctaagagaagaacaaaggacagcagtggctctcatcgtgcagaagtacggcggctcgtcggtcgccgataccgattcgatcaaacgtgtggccaagcgcgttgtggagacggagaagaagggcaataaggtggctgtggtggtctccgccatgggcgataccaccgatgaccttatcgatcaggcgctgagcatcgactccaacccgcccgagcgcgagatggatatgctgatgactgcaggcgagcgaatttccatgagcctgctggccatggccattcacgccgaaggcagccgcgcccactccttcaccggtcagcaggccggcttcttcaccgacacccgttacggcgcggcccacatcaaggccgtgagaccggaccgcgtgaagaacgcgctctcattgggagacatcgccatcgttgccggcttccagggcatcaacgccaagggtgacgccaccacgctcggccgcggtggttcggacacgtccgccgtggcactcgctgtggcccttggtgccgacatctgcgagatttacaccgacgtggacggcatctttaccgccgatccgcgcatcgtgccttccgcccgccgtattccttccatcggctacgaagccattctggaaatggcctcctgcggctccaaggtgctggcactgcgctgcgtagagtacgctcagcgtttcaacatgccgctgcatgtgcgctcttcgttctcccgtcgccccggcacgctggttgtgcctgacggcattgacccgcgcacgctgccgaacctcgactgagcgcggctacagcgaacaataatcgtaagtaatttcaaccaagacaaggcaagacatgactgaagaagaagcgaaatccatgggcgacctgttccctgacctgggccccgaggcaccggtgatttccggcattgcccacgatcgttccgaggcgctggccaccgtgcgtggcgtgccgaacgagccgggtatggcagccaaggtgttcaccgagctggccaccgccgacgtgaacgtggacatgatcgtgcaggccggcgcatccgttggcactgcagacatctccttcaccgtgcccgaatcggccgtcaagcaggtgcagaacacgctgctcgacaagcaggaagtgctgggttaccactcctttgatgtgaacaccaacgtcggcaaggtagccgtggtgggtgttggcatgaagacccacgccggtctggctgccaagttcttccaggccctgagcgatgagggcatcaacgtgctgatgatttccacttccgagattcgtatcgccgcactcgtgccgctcgaccagctcaacgacgccgtcaaggcgctgcacactgcatacggtctcgatgccgatcagatcgaagccgtggtgtacggcggtactggccgctgagccgcgaattccgcgcctaatacgatgaaagccctccttgcggagggcttttgcgattttaacgagattcaactacttcttagtgatgtagcctagagccttgagcatttcggcgcattcgagggcgccgccggctgcaccacgcagggtgttgtgggccagacccacgaacttccaatcgaagatggaatcctcacgcagacggccgatggaaacgcccatgccaccctcgtagtccacgtcgagcttgacctgcgggcggtcatcctcggtgaggtactggatgaagtgcttcggcgcgtgcggcagctccagctcggaagccttggacgtgtagttcaccagacggtcgataagctcttccttggtggccttcttgtcgaagttcaggaacacggtggcggtgtgaccgttgagcacgggcacgcggatgcattgcgaagtgatcttgaggtcgccgtcgaacggcacgatctcgcccttttcggcgtccacatggccgaacaccttgagcggttccttctcggacttcgcttcttcaccagagatgaacgggatgatgttgcccaccatctcaggccaatccttgaaggtcttgcctgcgccggaaatcgcctgataggtgctcacaaccacctcacgcggctcgaattccttccatgcggccagtgccggcgtgtaggcctgaatcgagcagttcggcttgacggcgatgaaaccacgagtggtgcccaggcgcttgcgctggtgctcgatcacctcgaagtgctccgggttgatctccggcaccaccatcggcacgtccggggtccaacggtgagcgctgttgttggagaccaccggggtctcggtcttggcataacgctcttcaatggcgcgaatctggtccttcggcatgtttaccgcagagaacatgaaatcaacgccagaggccacggactcggcatcgtcgccatcgacgaccaccatgttcttgacgtattcgggcatcggggtttccatcttccaacggtctccgaccgcctcggcatacgtcttgccggcgctgtgcgcggaagcggcaagggtgaccacctcgaaccacgggtgattctcaagcagcgtgataaaacgctgaccgaccataccggtggcgccgagaatgccgactttcaacttttcggacataacaaccttctgggtttgacggattgatttcacgttcgggcagccgtagcgaaatggccacacgtatccatcaatcttacgaatcgggcggaacaagaagaaccgggtgcccgtatgctgggccggatcgccggtgcgacgggacgccggaaccggctggaacgtcacggcgccgccccgccgcgatgctctgcactgggagtcatgtcgaaggcgtcggtagaagcgcagcgccagttggaccgcatcgtggcattggggtacccggacgtggcggatgtgagcgccgcggcgttccgctccctggcccgtccgctgatcgaggcgctggagcataccgattttgacgagcgcatcctgctggcgcccacgcgcgagctggtgtcgcccgaatcgctgatttcccgtacgtcgatcaaccgcatggccggtttcgccacgatgccgccgcgcgacatcgcgagctttttgccgcaggacggcttcgagccgcccgagggaccgttctacatcgtcgtggaaccgcgcaccggtaccaagtacacacaaaccgcgagcccgacgtggcccgcaagctcattgactccgacgagcgcattccgctcacgctcgaggagggactggccatcgccacgcagcatccgggctggcttcaggagaaaaacgggttcaacctgctgggctcgcgcagcgccgacggccgcgtgcccagcatctggctgagccagaacgccccgaggctcggtgcggtgtggccgaattccaagcacacgtggcttggcaacgcattctgcatggcccgcaggggcgtctcgctgttccgttagtgagcggattgcgcggcttgtcggggccgtgccgcttgcccgctgacttgttgcccccgttgtctatttgaaagtgcgacaccctttagattggagattgtccagataaccagtgaaggggtgtcgcgccttgggtcaagtgtattcgcacctgtcggaagaggaacggcggatcatccggatagagatcggcaacgggacgagcatacggcggatcgccggcctgatcggcagacacacctccccggtcagccgcggaatcaaacgcaacacatggttcccgtccaacgagaacgaatcctaccggccgtaccggcc

SEQ ID NO: 118 - DNA, 3450 bp, Unknown
  R206_24m  MAG No. k141_33127
atggcccatttcactgagaatcttcaataaatcgggctgtatgatcgacggtatccctttcagcatagctgctcctgcttgtcttcagacttatttgattgttacttgcctagaatgctctggatattgcggtactgttcatcggtcagctgcacggcgggctcgtggacggacgtgtcgattggcagtcccttcgccttgaccgcgcccttgatggcgctgatgaacaggtcggcagtgtcgtacaggcgcatcagataggaaatgcgctcagccgacttgatggccgtggcatagtcaccggactgccatgcacgatgcaggctgacgaatgtctccggctccacgttggtcaggccgctcagcacgccgttgccgccgctgatccggttgacgatgtagtattcgtcgaatccggacagcacgctgaacgacgggttcaccttgcggacggccgcgatgaccttcctggtgtggctgatggtgtcgacggtgtctttgatgccgacgatgttctggttctcgccggcgagttcggccaccagttcgggcgtgaggtcgttgcccgttcgggccgggaagttgtacaggatgacgggcagggtcgtcgcctcggccaccgccgagaagtaccgtttcgcgcaatccggggacgggccgaagtagtacggggacacggcgagcagcgcgtcgactccggctgtttcgctttccgccgccaatgttctcacattgtccaagttggtgtctcccacgccaacgagcaccttcatgcgtccagcgactttcgaaacggcgaaacgcaccgcttctgccttcgtcttgacgtcgatggcgtagaattctccgatactgccgaacagcaacacaccgtcgatgcctgcgtcgacgaggtggtcgaggtgcttgccccaattatcgtagtcaatggtcccatccgcgttcgtgatggtgatggaagggcagaacacgccttcgaattgggcgttgcaagtcatgattttttcctttcgacgatatggtaggcgttccgcgtgcggtggcgaatatgtccgcgggccgagcggtgttggagcgatgaatcgaaaacaggggatccggacgcgcgaacgcgaaccgatgatcccccgtgcggtatctcctagccgagtgcccgatcgaggtggacgtatccgccgtcggggaagacccattgtccggtggtgtgcgacgacctgtcggacagcaggaacgccacggtgtcggcgatctccgacgtctcggtcatgcggtggccgagcgggatcttgctggtgatcttctcaagctgcgcgcgctgtgcctgctcgtcgccgaacgtcttgatccattgcgcgtacagcggtgtccatgcttcggccacgacgacggcattgacccggacctcgtccggggcgagggcggcggcccattcgcgggtcagtcccagaatcgcgcccttcgcggcggcgtaggcgctggtcttgccctgaccggtcaatgcggtcttggaaccgatattgaccaccgagcccttgctggccttgagcgccggcacgcactgatggaccagctcgtagtagtgggtcaggttgccgtgaatcgactcctcgaactgacgccacgacgtggtctcgagcgcgagattgtcgttccttccggcgttgttgaccacgccatcgatatggccgtgcttctccatgaccgacttgacgatgggggcgatgtcgtcggtgttgttcaggtcgatcagatacgtgtcatacgagtcggtgattcgttcaatgtcctgtcggaattcgtcgccggcaccgtcatcacggttcagcaccaccggaatggcgccctcctcggccaagcgcagcgttatgcccttgccgatgcctttgaagcctccggtgacaatgatcaccttgtctttaagatgcaggtccatctcaggtcctcccgaccggtcagtccttgtgcaggtacttcatgcattcgtcgatcttcatctccgtgccgttgcccggagcgagcggcgcgacgtatcgtccgttcttgatgacggtcggatgcacgaagtattcatgctggttgtccacgtattcgacgacgcggtcctccatctcgccggagacggacacataatcgaacatcgcgagctggctgacggcttcgcacaggccgacgccgcccgcgtgagggcagaccttgacgccgaacttcttggcgagcaggtattcgaggacgatctcctggggaccggcgactcgggtcgcgtcaatctgcatgaccttgaagctgccagcctgcaggtactgcttgtacatgactcggttctgcatctgttcgccggtggccaccggaatcggatcgatggccttctggattgcggcatgtccaagcacgtcatccgggcaggtcggttcctcaacccatgcgaggtcgtagtccttgaatttgccgatccattcgatggcctgcggcacatcccagacctggttggcgtcgacggcgatggcgatgtccgggccgaccgcttcacgggcgagcttgagcctgcgcaggtcatcctcgaggttctggccgaccttgagcttgatctgcttgaagcccatgacctcggtctcctgcttggccaggcggaccatcttctcgtcggaatagccgagccatccggcggcggtcgaatatcccggataaccgacttccttgaggtgggcgatacgctccgccttgccttcctgggcggcgcgcaggatatcgatggcctcctgcggagtgagggcgtcggtcaggtaacggaagtcaagcgtcgcgacgagctcttcaggctccatctcggaaaggagcagccagagcggcttgccggcgcgcttggctttgaggtcccacagagccgaaagcacggcgccaatggccatatgctcgacgcccttctcagggccgagccagcgcagctgcgaatcgcgcacgaacagatcccacgcgagacgcatgttgtcgagcagttcctcgacgttacgtccgataagggtttcggacatggagtcgatggctcggacgacgacatcattgccgcggccgatggtgaagacgaatccgttgccggaatcaccggcatccgtgctgatgacaacataggcggaggaataatccggatcagggttcatggcgtcggagccggagaaggtggccgacgtcgggaatcggaaatcataggtggtgactttggtaataacgctcacgatgcgcttccttctttggaaaatggttaatctcaaaaagggaggacggccattcggccgccctccctagcagtggcgggccggatgtcagtcggcgtcggtggtgaccttgaagccgttgtcctttgcgtaggtcttgagcttctgctgagccttggccatagcgccgaccatgtcaccgccaaccttcatttcaggagtgatgacatccttgtatacg

SEQ ID NO: 119 - DNA, 23260 bp, Unknown
  R206_24m  MAG No. k141_33163
agccgaccacgaaacaggacgcccagccctctacgacaacgctatcgacaccgactacacccactcaatcggcattcaaaaaggccaaatctaacccccgcgacacgccgagccagacacacattttgacccttaacccgccgaacatgatggagaagatcggcagatcacggccgcgcgacttataggcgctttcgaattcgtcctgatgatcggagttggagcggccgtcggtcatgagcacgatggcggtggtgtattgcgaggcttccgactcgctgggcagctcgtcgagcgcgctcagcaggccttcatagatatcggtgccgccgctggcatcggtggcatcggcctcatgcagcaggtcgctggtgcttgtgccagtggccttgaccgggcggtggacctcggtttcaaacgggatgagaatgttcacgtcgccgctggcgggctcgatgtacgacttcttggcctggtccgggtcgagcgccgcgttcaggcctttgaccacgccgttcttgccctctccagacatcgaaccggagtaatcgaccacccaaatggtccagctgggtttcctgagcgcggtctggtagacgttgagcgcgctgtcgatcaccgtggcggaggtcatggagaacgtgagtttgccgtcgctgaccgcggcgaggatgtccgcggtggagacgggcttggtggcgccggtgtcgtcagcccagccgagtttgacggccttggatttggcgatgccgaacacgatcggcgtggtggaggtgctggccgcgtctttgacgatgtgcttggtgtctcccatcgaaatccacatcgaggaggcaggccagacggcgtcgtgatcctggccgccggccttgagcgcgttcataatctccagcgaacccatgtagtgcatcgtcacggctacgttggattggtcggccgctttctggatggcgacggcgacttccttgttttcggagccggaggcaatgctcagggtggcagtcggtttgccgccggacggctggaaggtctgcgtggtggcggacgtgccgttgccgtccgctgtgccgtcatcggaattattgaacgccgtgcaaccggtcaacgcgagcacgccggcacataccgcggccgcaaccgcggcggcggagagaagacattatgcccataattccatggctctcccgccatctaaagcgggtcgggccacaaggtgaccgcacggtgaacaatgagtgaagagctacatcagtacgcggcgcaggcaatcatggggtcgtcgtagaagccgaggatcttttcgaggtagggcttgtaggtgctgttgggcatggagaagatttcgtggcgcgattcggggaagcgcacgatgttcgcctcgccgccgccgtccttgaccagttggacgaagtgattctgcggcttattgagtacccagatgtcgcgtccggactggaagagcagcaccggcgtctccacttcggcgcaggcggacggattcagtatggcccggttgagcttcaacgcttggcgcacccattcgaacgccgcgcagtaggtctggtattcgcggttctcgcaacgcagcttgaagtaccagcgttcacgcgcttcggaagcgccctcgttgccttccatcgagaattccggcgtgaagtccgactgcccgaacacgcgcttcttgccgaagccgagtccgcacagcgcgccgaccagcacacgggccacgcccagcggcatgccggtggcgggggcgatcatcggggcggagagcaccgctttgtcgaacagggtggggtatcgctccaacacggccgcgccgatgccgccgcccatcgaatggcagaacaggttcagcggcatgccggccgcgtactgctggccgatggtttcggcgaagccggccagatcggccacgtagcgctgccagtcatcaatccacaccatgcagcgattgtccacgtcgcgcgcggacttgccgtggccgcgatgctcgagtacacacaccgagtagccggcgagcagaaaataccagacgagctcgtcgtatttctcggcgaactcggtgaagccgtggctgatgacgatggccccgcggaagatggcggtggcgccttgctcgcgaatcgcgtcgaatttggcggagtcgtagcacaggtagtgcagctggcccgagcggccgccggtgtccataatgccggacagcggctcgatcccggccgaacgttcggcggcggacggatcgaaccagccctcctcgcggcattgttcgagcgcgggcagcaccacgtcggtcatcgtttcggcgtacttgttttcgtcgatcatcgtcacctgcatggttcccatcttaggacaagcctcacgccgctgaccgcacaggcgcgtaggttgtgagtatgagcgaaaccaatgatgtcaatgacgcaatcaagcatttcccacgcctcagggcgcgcacgctgcgcttcggctgtggcgcgccgcgctccgcacagaccgtgggcgacggctcgcgggccctgttcctgcgctccgacggccccgaggatctggtgaccgcactgtggctaagctggttcgacgagtccggcgaacaccatgagaccaagctggccgatccgcgcgaactgcttggcgcaaccgccgacagcgaggacgtgccggccgaggagaaggcccgccgcgagcgtgcgcgcgaaggcggcaccggcatcgtcggctattcgtcagatgacgacggcaatcgcatcgtgttcaccatcaacggccgcctgttcctgaccgacatcgattggaatgacgagaccggcgcacccgagccgcacacccgcgaactggccggcgaatggctcgatgaggacccggagatgtacacgccggtgctgaacccgcgcatcgccccggatggcgagcatgtgctgtacaccacgggcagctacctgatgctggtcgatatcggcggcgagctgggtgaccgcatcaccgcggtctacggcgtgagcgtggaggatgaggacggcaatccggccgaaaacacgtggaaaatcggtctggccgagttcgtggccggcgaggagatggaccgttacgacggtttctggtgggccccggattcgcagcatgtgctgttcgaatccttcgacaccgccgacgagccgacctggtacatcagcgatccggccgaccccgagaagccggccgccggccgccgctacccgcgcgcgctgacccgcaacgccgacgtgtacctgaccgtgatcacgctggcgttcgatgagaacgaccggtacgcgggcatcaccggcaacgccgacgtggattgggatcgcgaggcgtacgagtatgtggccgccgtgagctggcgtcgcggccacgatccgctggtgctggtgcagaaccgccgccagacccgcgaccaggtgctcgaggtggcggtcgcggcggatggggccgcgctgggcgccacgcgtgtgcttgaggagcacgcgaacgagcagtggatcgacttggttcacggcacgcccgcctacacgccggatgatcgtctggtgtgctcgctcaacgatatggccacggataccaaccgtctgacggtggacggccgaccgttcacgccggctggctggaacgtgcgcacggtgctcgccgtgaccgacgaggatgtgctggccgtggtgcagcgtgcgcccgaaatcgcgaccgaggtgccgcgcgcctgggccggctcgggtgccgcttcggatgccgagtctctgttcggcggccatgacgcccgcagcttcgatgtggtgagcatgggatatgacggctcggtcgcgccgatcacgaccgagcccggtcagtggacggcctcacgcggcgcacgcggcatggtggtgtctgggcgcgatatgcgttccgcccgcgcccggatgcggcacatcgtcacgcgacgcgccgtcggcggcgtcaccgatgccgtcatcgccgccaacaccagcgatgccgccaacaccaccgacatcaccgccgccgacatcaccagcaccgccgcggaacccgggttcacgccgaacgtcacgttcacgcggctgggcgagcaccggttgtacacggcgatcatcgcgccgagcccgtccagcccgtacgcccatgccgacaaactgccggtgctgatgaagccgtacggcgggcccggcttccagcaggtcgtcgcctcccagtccttctactgggagggccagtggtgggccgaccagggcttcctggtggtcacggcggacggccgtggcaccacaggccgcggcccggcctgggatcgcgcaatcttcgagaacatgaagggcgtgacgctggccgatcagatcgaagccgtcaacgcccttcccgaggccgtctccaggctcaacgccgatgggcgcaggcccggcgttcccgcaccggacctcgacaaggtgtgtatgatcggctggtcgtacggcggcttcctgtccgcactggccgtgttggacgcgccgaacgtgttcaaggccgcgtgcgccggcgccccgcccaccgactggacgctgtacgacacgcattacaccgagcgctatctgggcctcgacccggatgtctactaccgcaacggcatcgtgcaggacgcaccgaaactcgagcgcccgcttatgctgatccacggtttcgccgacgacaacgtcaccatcgcccatagcctgcgcctctcgcaagccctgatggcggcgggtcgcccgcacaccttcctgccgttgacgggcatcacccatatgaccaacgacgagaccgtagccgaaaacctgctcaccctccagcgcgacttcctgcgcgacgccctggcctgaccggccccgggcgcgccgtgggccgtgacgtccgcggcacgcccggggcccgcgcccacacggcatgcggaaaaacggcgcaggtggtgcgccgcacccatttccgccctgaatttttggatatttttggatattttgcacccatcgtcatgtgaaagaccggttttttgcctcatattcccatcaccgcgtaggatgggtgaggattagaaagggaggactatgagcgttctcgaccgttttgaaaaaagcgtggaaggtgcagtcaacggagtattcgccaagtttggctccaaagacctgcagcctgtcgatctttccagcgccttggagcgcgagattgacgccgaggccatgcccgtgggccgtgaccgcacggtggccccgaatgaataccgtttcaagctcagtactcctgacttcgaccgtatcgaggcatggggtagcgagaccctggccaacgaactggccgataacctcaccgagtacgcgaagagccagcattacgccttcgtgggcccggtgatcgtgatcttcgaggaagaccttgacctgtccaagggcaacttcaacctcacctccgaatccgtgcagggcaatgccgtgccggtcaccaccgatgcgcagaccgaggacagcccggtgctcgaggtgaacggcaaccagtacctgctcaccaaagacaagacggtaatcggccgcggttccggctgcgatatcgtcatcgacgatccgggcatctcccgcaagcacctggaaatcgacatcacggataacggcgtgatcgcccgcgacctgggttcgaccaacggcacgtacgtggagggccaccaagtgcccgccgccacgctgctcgatggcaacaccatcaccatcggccgcacccgcatcctgtactgggcctccgcccaagcccaggagtagtcgagcacacgcccgaaagccgcccacccatgaccgaactgacattcgccctgctcaagtatggattcctgatcctgctgtggatattcatctggctggccgtgcgttcgctgcgcaaggacatcgagacgttcagtccgcgaccttcgcgcgcacgccgccgccgtgagcgtgaagtgcataaggccaaggccgaaacgccacaggcagctgcgccgcgcccgcatcgccggcccagcgcttccgcgtcgtccgtcgcctcggcgcagcctaccctgttggtcatcatcgatggtccgcttgccggcagctccgtgccgctggccgaagccgacatcgcgcttggccgcgccgcctcgaacaccgtggtgctcgatgacgaattcgtgtcttcccaccatgcccgcgtctaccgtgacacgcgctccgggcagtgggccattgaagacctgaactccaccaatggcaccgtggtcaaccagcagcgcatcaaccgccccaccatcctgcccgctcgtattcctgtgcgcatcggcgccaccaccttcgaactgaggtagccgcatgccaaaatccgccgcttcacaaccgctgttcctgtattccaccacggtgtccgatgtgggcactgtgcgcgcgaacaatcaggattcctccttcgccggcgagcatctcatcgccatgtgcgacggcatgggcggtcacgccggcggcgatacggcatcctccatcgccatccggtcactggcccacatcgagcaggacgacaccggcggcaacgtcgagacgatctcccgcatgatggaaacctccgttatggccgcgcatgacgccatcgtcggcaaggccaagcgcgaacgcaagcttgccggcatgggcaccaccgttaccgcagtggcattggtggccggctactgggtcatcgcccatatcggcgattcgcgcgcctacctgctgcgcgacggacacctgagccgcatcacgtgcgaccacagctacgtgcaacacctcatcaacaccggtcgtatcaccccgtccgaagccaagaaccacccgcagcgcaacgtcgtgatgcgcgtgcttggcgactttgacattgacccgcgcccggatatttcgattcgccgagcccaccccgccgaccgttggctgctgtgctcggacggcctgtgcggtgtgctggaagattccaccatcgaagagacgatgaccacgctgtccgatcagggcgaatgcgcgcagcgtctggtgcagatggcactgcgggcaggcagcaccgataatgtcacggccgttattgcggatgccacgttggcgttggatgccgatgcgttcgatctgccgcaccaaacgccgttggtcggcggtgccgccagccgtaatcttgagccgatcgccgacatcgtcaacgagccggtggctaccgcgcccgcgctgcgtgaggatgattcccccgcccagcgcgccgcagcattgattcagcccgccagcgcgcacgagacggaggccgcgcaaaccacggccgaaccgtcgtccacacgcgtggtgcagccgtccaccgtccgcgaggagaccggtgaacgagccaatcccgataccggtgagattccggtggtgcaaaagccggatgggcgcctgtccgccgaccccaacgacccggatgtggccaaagccatccgcgatgagcagatcgagcagaagaaggccacgcgcaccaagaagcgccgcaataagcttgcggtgattattacctgcattcttgccgtgctggccttggccggcgctggctggggcgtgtacacgtggagccagacgcactactacgtgggagatagcaacggcaccgtggccatttatcgtggcgtgccgaccaatctctttggacttgagctttcgcacgaagtgcagaccaccaatatcgccaccgcggacctgcctcagacatggcgtgaccagctgagccaaggcatcacagtcggttcgttggacgaagcgcagtcgcatgtgggtatcatccgcaccgaaatgcgcaaactggccaagcagcaggaagccgacgccgccaagaaggccgaggcgtccaattccctggacagttccaaagacagttcccagagcgattccaaggacagcaccaaggattcgtccagccagtccggttcgtcaagctcatctgattcctcggataaatccggtatcggagcggccgacaacgcggccacgggggattctcaatgatcgctacccgtctacgtcagatttccttgttgctgattgccatggcgatcagcgcgttggcgttcatccagatgttccaacgcaccgccggcgaattccctatgcaatacgccggcatgctggcattggtcgtagtgctgtttctggtgctgtgggggctgatcgtacacttccagccgtatgccagccagtcgattctgccttgcgtgctactgctgaccgccaccggcgtgaccatgatcgcccgcattgaccagagcgagggctgggcggttgcccaacgccagctggtgtggctgtgcatcgccatcgtgctttccgcgctgctcatcattttcctgaaggactaccgcgtgctgcgacgcttctcctatgtgtcgatggtggtgggcctagtgctgctgctcgccccgatgctgccgttcatcggcatggaggtgaacggcgcgcgcatctggatcaggattccgggattgggccagttccagccgggcgagttcgccaaactgttcctcgcgttcttcttcgccgcatacctgttcgatcaccgcgaccggctggccgtgggcggcaggaaggtgctggggctgcaactgccccgcatcaaggacctcggccccatcatcgtggtgtggatcgcttcgatgggcgtgctggtcatgcagcgtgacctgggcacttcgctcatgttcttcgccatgttcgtggccatgctgtacacggccaccggccggaaaagctggatcatcatcggtctgatcgcgttcgccgcgggcgccgtgctggccgccggcgcgttcagccacgtgggtcagcgcatcgacgcctggctgcacccgttcagcaatgagcaatacaacaagacccccggcggctcctggcaactggtcaccggcatattcggactggcggcgggcggcatgctcggcaccggcctgggccaggggcatccctcgctcgtcacgttcgcgaactccgatttcatctacgcctcgctcggcgaggaactcggcctgatgggcgtgctggccatgctgatgctgtacctgctcatcatcgcctccggcttcatcacggccatgaaaatcaaggatggtttcggcaaactgctggcttcgggactggtgttcaccatggcgttccaagtgttcaccgtggtcggcggcatcacgctggtgattcccctgacgggcctgaccctgccttatatggcggccggcgggtccagcctgatcgccaactatattctcgcgaccctgctcatcatcatctcgaactcggccaatgcgcccgagccggagctgacctcggatacgttccagtacgaggctttggccgtgctgcgcaacaaggaacttgaggccagggcccgcgccactgagccgatcgttcagcctcgcagcgcgtcggctacggcgtcgcagtccgagtcggaatcgtttgacgaccccattgtggataccaccactccgtcgtatgccgacgccgatgaaccgtacacgcctaccggcacgattcccccgcttcctcccgttaacggaggcactcgcgtatgaacaaatatcttcgtcagcttttcaccgccgtggtcgcgctgttcgtgattctcggcctgtcgtccaccatcatcatggcggtacgggccaacgcgctgaacaacgatccgcgcaacgcccgttcgctgtaccaccagctcggtgcctaccgcggtgccatcctggcctcggacggcacggtcatggccaaatccgagccggtcaacgacgcattcaaatacctgcgtacctattccaacggtccgctgtatgctccggtcaccggcttcttctccatcaaccagaccgccgatcgcggtctggaagcctcccgcagcatgctgctcaacggtgaggccgattcattgatctggcagcgggccaaggccatgctcaccggcactacgaatcagggcgcgtccatcgaaacctccatcgaccccaagctgcagcaggttgcctacgatcagctcggtacgcgcgatggtgcggcggtggccatcgaagtcagcaccggtcgtatcctcgccatggtgagcacgcccagttatgatccgaacaaactggcgacccatgacaccaaagccgcgtctcaggcctacaacgaactttctgcgggccaaaatagcccactaaatagcccactaatcaaccgcgccacctcgcagctgtacccaccagggtccacgttcaagaccatcgtcgcctcggctgcgctggaaaccggcgaatatcagacggacacgaagattcctgcaggctccagctataccttgccgggaaccgccacacagctgccgaacgacgaggcacagggcgatggcgtcaacggacagatctccctgcaagaggccgtcgcatggtcgtccaacaccgctttcgcccagcttggcgtgaaactcggcgcgagcaaggtttcggacatggccaccaagctcgggttcggcagcaccatcaccattgacggcaccgaatccacgggcaccccgatgacggccaccgcgtccacattcccctctgatccgaccgacgacaagcttgcgctggcatccatcggccaaggcgacaccacggccacgccgttgcagatggcgatggtcgcgcaggcaatcgccaacaatggcaaactgatgcagcccacgctggtcgatcgtgtgcgcgccgccgatctcaccgtactttcgcagaccaaaccgcaaaccatggccaacgcgttcagcaaggattccgcagacaagctcaccacgatgatggagagcgtggtgaccgaggccaatccgcagctggccatcgacggcatcaaggtggcggccaaaaccggtaccgcacaaatcggtatcgacaactctgccatcgacggctgggggatcggtttcgcgccggcggacgatccgcaaatcgccgtcgcggtgttggtgcataacacagatgtacacggttcgctcgccgctggcccgatcatgcgcgcgatgatgcaggaggctttgcagcagtgaaacttatcgaaggacagcttattcaccgccgatatcgtcttgattcgcgtcttgcgcaaggcggtatgggcgaggtctggaaaggctacgatattcagctcggccgtgaagtggccatcaaggcgctgcgctcggacatgaccaacgccgaggccaagctacgccgtctgcgtgccgaagcccataattccgccaatctggcgcatccgaatatcgctgcgttgttcgaatactacgagcatgacggcatcggctttctgattatggaatacgtcccctcgaaatcgttggcggacctgttccacagcaagggcgcgatggatcccatcgaactgctgcccatcctgattcagaccgcgcgaggcctgttcgtggcccactcgcacggcgtgattcatcgtgacgtcaagccggccaacatcatggtttccgacaccggcgaagtgaaaatcaccgatttcggtgtgagctactccacgggtcagggccagatcacccaggacggcatggtggtgggcaccgcacaatacatctcccccgagcaggcgcagggccagcaggccacgccgcaatcggacatctattcactgggcgtagtggcgtacgagggccttgccgggcatcgtccgttcaccggcaccactccggtcgatatcgccgcagcgcacgtgaacaatcccgtgcctccgctgccggactcggtggacgtccagttacgcgaatttgtcatgtcaatgctggccaaggacccgttggatcgcccgaaagacgcgctggtggtgtcccgtacgctggcacgcatcgaacgccgtctgctggatcagcagaccgaaatggccgacaccgccatggccacgtccggcaatcgactgccgcgccgagtgaccagcacgccacgcattgttttggaggccccggcctcaagattgggagggaataagcaatgagcaccagtatgcccaccgcattggccggcggacgctaccagcttggccagctcatcggtcgtggcggcatggccgaggtccacgtggctcttgacacccgtctgggccgtaccgtggccgtgaaaatcatgcgcgccgatctggccaacgacgacatcttcctggcccgtttccgccgcgaagcacacgccgtggcccagatgaacaacccgaacatcgtgaacatctacgattcgggcgaagaactggtttcttccgaaagcggcgataccgagcgtttgccgtacatcgtcatggaatacgtcaagggccagaccctgcgcgacatcatcaaggtcaacggcgcactcagccagcgcgactgcgaacaggtgatgttgggcgtgcttaacgcgctcgactattcgcatcgcatgggcattatccaccgcgatatcaagcccggcaacatcatgatttccgagcagggcgcggtcaaggtcatggacttcggcatcgcccgcgctctggacgattccgcaaccaccatgacccagtcgcagggcgtggtgggcaccgcacagtacctttctcccgagcaggcgcgcggcgagaccgtcgacatgcgttccgacctgtattccgccggctgcgtgctctacgagatgcttaccgggcgcccgccgtttaccggcgattccgctgtggccatcgcctaccagcatgtctccgaagtcgccacgccgccatccgccgtggtgccggggctgccgaagatgtgggattcaatctgcgccaaggccatggccaaggaccgccagaaccgctacgccacggcctccgaattcaagaccgacatcctgacctacatgaacggcggcgtgccggtggcggccgcgttcaacccattgacggacctgtcgaatatgaaggcccgcaaggaagccgaacgtgatttgcccaccacgccggtggaaccgcagcagcagcccacccaggcattcaacccggtgaccggtcagttcgagcagattccaccggccaatggtgccaactcagcggcgttgcagtcccgtgcgcagcagcgtgcggcggcggccaaggccaagaagcgcaagaagatcatcatcggttcggcgatcacggcgattgtcgcggtgctcgtcattgtgggcatcatgttcgccatgaacggctccggcaacaagtcctctgaagacaccgtcaccatccctgaagtgtgcaacgcttccacgtccaaggacaacatcaagctcaagcttgagagattgggcttgaagatgaccgaaaagcaagacaccgactccaccgagccggaaggcacctgcaccaagatgagcccggacgccggctccaaggtggccaggggatctgccgtgaaggtgtggctctccgcaggcccgcagtccactcaggttccggatgtcaaggagcgcagccaggaagaggcgcgcagcattctggaaagcgccgggttcaaggtgaacgccaccgtcaaaaccgaagacagcgccgacatcgccaaggatatggtgacgagaaccgatcctgccgccggtcagtcggttcccaagggcaccaccatcaccatatatgtttcttccggcatgaccaccgtaccgagcaatttggtcggtcagtcgaaggacagcgtgctacagcagtatgagggcaagttcagcttcaccgtggagcaggaaagctccgatacggtggaggccggtctgattacccgcgtaagccccgattcgggctcttccatcgcgcagggcgggtccatcaccatctgggtgtccacgggcaaggaaaaggtcgctgtaccgaatatcaccgctggcactgactacgccaccgccgaactcatgctcaaggccgtgggcctcaaggctcaggccagtggcccaaccgacagcaccgctgtggtagtcagcatcaatcctggcgctggcagccaagtagatgcgggatcgaccgtcaccattaccacgaaggccggcagcaccggaggcgacaccggtaccggagacggtggcaacggcaacggtgccaacaacggcaacggggggcggaacccgtgagtgagtgagcgccgggcgtgtgtgttgcgcatacgcaacgcacatagcgcaacacatgcgcaacgtaaacacacaacgcaatcacacaacgcaaaggggaggggcttctgcacccctcccctttgctgtataaagagctatcccagcgcaacattcccgggaaagcgtcgccgcgcgcggaaaagctacttcgtaaccttgggctgaaggccggcggacttggccacggcgttgtcttggccgcagaccttaagccagttggccagcagacggtagccgtcctgggtcatcacggattcgggatggaattgcacggcgtacatcggcttgcccttgaccttgatgccctgaataatgtggtcgccctgcgtccacgcggtaaccaccagcgtatccggcaccgaatcgggctcgacggccaacgaatggtagcgggtggcggtcatggggttggccacgccctcgaaaatctcgtcatcgatatgttccaccaagctggtcttgccatgcatgatggtgggcgcatggcccacagtgcagccatacacctcggcgagcgcctgcaagcccaggcacacaccaaacatcggcacgccgctggccgcgcacaggcgaatcatatcctcactggcaccggattcggccggagcgccagggccgggagaaatcagcacgccatcgtaaccgtccagtacacccggcgcggctgggtcgatagcgtcgttacgcaccacatcaacagtggcgccaagggtttgcagatagcctacgatcgtgtagacgaaggaatcgtagttatccaccaccaaaatatgcgcggaatcggtcatagggctctccttgagggacgtgtactgcaagccatagtactaggctgccgtcagctcactgccacgaagttcgacatctgctgtaggaatgggatattggcggcggcccaagggaatccccactggaacagcgccgcggcggctgcgaacagcagcagagccagcagcagccatcgaatcggtgccacgccgggctgcagacgcaacagtccgccatagatgctggcatccgggcggcgacgctcacccgcgcgaatctcgcgcagcaccggccagcgccatgccaccgcagcggcgatgaacagaaccagccacactaccagcgcgccgaataccaccttgtccagcgagccaatgcgggaagcgatcgagggggtttcggtggtggagaacttcactgcaccggatgaatcagtagtagccagctctttgggcacgccatcagacactttggcccagtacgccaactcaccatagctgatccatcgatgggtgggggtggagtatttcggctcacaggtagtcagtgtgatcatgcgtttggtgggattggcagtggagtcttccggattgggcgcgatcacatacacgtccgtgggcagcacaatctcgtgccgggtgtagtggtagacgtaccagtaatccttggtacgaacgatgatgggatcgccttcctgcaacttgtccacatcgcccaacggctgcccgtagccgttgcggtggccggcgacggcgaagttgccgacctgccccggcatctgggtggtgtcgtaatggcccagaccgtggcgattgagctgctcgagcgtggtgccttccacgatgttgcgatgccattgggagccgaagcgcggaatgtagatctgcgcaatcaagtcgccatatttcgcgtctttcggctgtactggagcatcgccctcctgggctttggcgatggtgaccgttcccccgttgttgctggggtcgctccagtcgacggactgggtggtttcgttctgggctcgctccgcctcgacaccggtccaccacatctgccagacgatgtacagggcgcaaatcacggcagcggtaatcagcagttcggcgcagatgccgagtgcctgccagatcaggctccgctggggcgaagacgcgccgcgtactgcggcacgacgggaccttgccctgctggcattggccgggtctgccgccattcgtgcggcgtcgtcctcggggaagggctgtacgtccgacacggacgcgagatcaatgggcgccggtgcgccgctgttgtgcctgccgtgtctcattgctgagtctgctcctcatctgtggtctttgacgtatcgaccgtggcatatttcaactgctgcagcaaggcggcggtagcggggaactgaaggccctcggcattctccaccttgtagccaatgccaaacgcggtcacatattgcttaagaatggtaatggcttcggagtcgttcaacgctgcgcgaagtctttgcgggtcaccaatcgcggaaatggtgaatggcggcgagtatttcttaccgtgcaacgacagcacgttgccggaacagatgaccgccgaattgaacagcacccgctgatccataatcatcagcgcatcggcaccgccggcccacaaggcattcaccaccgattcgacgtcctgctgatgaatcacgtaatcgttgatattggcggtcgtgccattgttgttgacggcgttctcccataacggagaatcatccagcgttaccgttacgccgctgccgctgagcgcgggcagcatcaggctggaatccacattgctggagtccttgccttggttctgcgtgctgtcagtaccgtcggtgccatcggccttgagcgcgtccgtaagattggcgacctgttcggtcagatcgctgacgtcctgctgcagctggttggcctcgtccacgccttgctccaccagatcggccgtatcgttggtggcggcaaccgtacgattgaccctcacgttggtgctcagcagaaaaccggtcaaggcaatgacgacgaataccgcgacaccaccccatagggagtgccgtgcgccgtgcttacctacatgtctggccatgaatttcctgtcttcttgccgactctggtcgccgctttcgagtgtagccactattatgacttttagcctattgaatggagactatgctgatggctgacgaagagctgcacgagaccgactcgaacaaccagaaggactggcagagcgagacctcatccagcaccgctgctgacgagaccgccaacaaagacaccgagcagaacgcagagaacgcttctgccgaggaagacgcggcttacggcgtgaatatggagcaggtgcaggccgtgctcaacgccactgccgataaggccacgctgaccccgcagatgcagcgcatgatgaaccgtcaggcggagaacaccaagcgtgttgaagaaaccattaagggcaccaagtcgaacccgcgttggttcgtgccgctgttctgcgcgtttatgatcatcggcctgatttggtgtgtggtgtactacctctccccgtccggctcctggccgattccgaacatcggcgcgtggaacctgggcatcggcttcgccctgatcatgatcggattcctgatgacgatgggatggcgctgagttccgactcgttgcgcttatctatcggtagatcgtttttctatcgttagggtgttcttagttcttatgcgaaaggccgacctcccgtatgcggaggccggcctttttcgtgccttagcctgttcatccacagctatccaccacttatccacgacttatccacgacttatccactacgttatccacagcctgtggatgaatcacacccatgtagttttccaccgaatgtggaaaaccatgtggataagtggtggataagcggcgtttctcggtgtatatctcgtgcataactttggcttggcatacatcgccacagcgagggaacagttatacacccgagttatccactgcaacaaacccagtaataccgcggcattcctaacttatccacataagttatccacagtcttatgcacttttctacacacttgtgcacaagtcaccattgtggataactcgttatcgtggataactcgtcattgcgcgcatctcattactgtggataccttcattactgtggataccttcatacagcgcatgcccactcaccgaatgacgatatccacatcgctaatatccacatcgccgccttccgtacatacactgatgccgggcactgcatgttccgcaatacccggcatcaatcgttttttacagccatatcaagccatatcagtgcagggagccgaaactcatccacccgtaaggattggccatattgcacaacagaatcaacgcaacgaccagcaccaccatggcccagccgtaaacctgcatacgccatttcaggcttttacctcgccacgccggcacaccacccaccagcagccatgtgagtattccacccactacaaagccgccgacatgcgcctgccacgccacgcccccgaccacgaacggcaaggcgaagttcaccgccatccagaccaacatggagcggatatcggcgccgatacggcgatataccaccagcaatgatgcaaacaggccaaataaggctccagaagccccataggctgccatctgccagccgatgcctcccggagccaccgcagcccacaccataagtcccagagagccgccaaggccggaaatcacatacagtcccaagaaccgccagtggccgatcattcgttccagcactgggcccacggaatacagggcgatcatgttgaacaggatatgcaatagcgagttcggcgcatgcaggaacatcgaggtgatgagcgtccacggctcagccaccagtctgaccggagccgccatgccgaggtacatcaaccaagccctcaggcccggggcaataaatcccagcaatacctccagtagccacactgccacgcacgcaccaatcagcgcccaggtcatcaccggaccaccgcgctcccactggtatcgaatctcccgttgtgtaggaatatgcatgcaatccactgtatcgaaggtctcggatgcgtttcacgcgccgcgaagatgctgagccgaccgagggcatgcgggcgtggatgaatcgcccacgaatgtcattccacccaatcgtcacaaacagcggcctagaatagggagcagagtcggtctgaatgggcataccgaccagacgatccctagggaaaggagccgtcatggagaacaagtcttctaacggttggaagttcttcgcgctgctgttcggcggattgctcgccgcgcttgttggcttgtacatctacaagcagcagaacccagattacgatccgtgggaggagccgtgggagaacagctcctcgccggtcgacctgggtctgaacaaggccgaggatgaggccgatggcgaggcggaagccgccccggccgaagcctgatagggcggtttttcaacgcaagaagccccgcaaccgatggatgtcggttgcggggcttcttatgttctggttcccctctccgaggggagccgccccaccgactcagtcagccagaggagcagtgtgccagatgtgcggagccgttaagcgggaagcccggtgggcttcccgtaggcgacgccgagcggcgacagccgcgaggtagaaaccagcacgtagccggcgcgctgctccggcggccgtcaggccagaggagcagtgtgccagatacgttccaaatagtcttccatggagcggtcggagctgaagtagccggagttggccacgttgagcagggccttgcggttccattcgagctcgtcggcgtagagggcctcgatctcggactggatgtccatgtaggcggagaagtcggccagggtcatgaaccagtccttggtcagccagtcggccacaagcggggagtaggcgttgcggtcgccgttggagaaggtgccgtcggccaccagatcgatggcctgcttcaggcgcggatcggcctcgtagtaggaggcgggattgtagccctcggcgtacttcttctcgacctcgtcgacggtcatgccgaacaggaagaagttctcggcgccgacgcgctcacggatctcgacgttcgcgccgtccagcgtacccacggtcagggcgccgttcagagcgaacttcatgttgccggtaccggaagcttccttgccggcctgggagatctgctcgtcaagctcggtggccgggatgaggttctgagccatctcgacgttgtagttcggcagcatgtggacggcgagcttgcccttgacggccggatcgctgctgatcacgcgggaaacgttgttgatcagctcgatggtcatcttggccaggtagtagcccggagcggccttggcaccgaagaacacggtgcgcggagtgatgtcctcggccttgaccttaccggacttgatgtcggcgtaggtggagattacggcgagaatcttcagagactggcgcttgtactcgtgcagacgcttgaccatggtgttgaacagggtgttctcgtcgatatcgatgccgtagtggtccttggcgaagcccacgaatgcgtgcttgttggccttcttgacggcggcgaacttcttgacgaactcatcgtccttggccagcggctcgaggcccttgagcagttccagatcggcgacccacttgtcggtgcccaggccctcggtgatgaggtcggacaggcgcgggttggcgagcttgacgaagcgacgcggggtcacgccgttggtcacgttggtgaacttgtccgggtagacgtcggagaagttcttgagggtgacgtccttgagcagctgggagtgcagctcggcaacgccgttgacgtgggagccgccgtaggtggccaggtaggccatgcgcacggcgtcgccggtgtagatggccatgtccttgatggtgtcggcggcaacgcccttggccttgagctcggcctcgaactgctcgttgatcttctcgatgatctcgaggtgacgcggcagcagctcgccgatcaggctggccggccagacctcaagggcctccggcagcagggtgtgacaggtgtagttgaaggtcttggtggtgatggaccacgcggtatcccagtcgtagccgtactcatcgatgaggatgcgcatgagctcggggatgccgatcaccgggtgggtgtcgttgagctggaagacgatcttgttcgggaaggtcgtcaggtccggcttgtcctgccccgggtagaagacgcggatggcgtcgtgcagggatgcggagacgaagaagtactgctgctcgaggcgcagttccttaccgaccttggtggagtcttccgggtagagaatcttggagatgttctcggccttgacctgcggggccacggcgtccatgtactcggaacggttgaaggcgagcagatcgaactcgtcgtagctcttggcggtccacaggcgcagggtgttcacacgctgggacttgtagccgggaaccatgtagtccaccggcacggcgcgcacggaccaggccggttcccaggtcttggtgccgtcggcgttttcgacgaccttgccaccgaaggagaccttctgatcacggttgtagtcggtgtgaccccacggctcttcgttggccagccagtaatccggggtctcaacctgcttgccgttctcgtcgaacttctgcttgaagatgccgtacttgtactggatgccgtagccgaaggccggcacgccgagggaggcgagggagtcgatgaagcaggcggccagacggccgaggccaccgttgccgaggcccggctcgtattcggcgtccacgatgtccttcggcttgaagccaagggcttccacagccttgtcgaactggtcggtcaggccagcgttcagcagtgcgttctccagctgcttacccatcaagaactcggcggacaggtagccgacggccttggtgttgccgttgacggtgtcggcctgggtcttgaaccaggagtcggcaaggtggttgcgcacggccttggatgcggcgacatacacgtcagcaggggtggcctgctcgacggtgacgttttgagtgtatttcagttgttcacgaatctcgtcggcgaattgttccgccgtgacaggagacttcggtgcggtgatttcggtcattctgactttccttccgggataagtgcccgtgtttattatgccgcgcgataggtatcgtcgcatagacgtaagcatgaactctccgtaacgacgatggcggagcgttcttgcatacgttctcattgagagcgtatcacatatctcacggttccgcatcctacagtatgccatcgtttgcataccttgcggtttcgcgtgccggtgccatgatggagcatatggcagtaattctcgaaaaagacttgaaacgagggcacgacgcactggtgcaatggcgtgccgcagccctggaactggccgacaacacaccacatcgcctgaccgcctcccccattctgccgcgcccggtatgggcgatggctgtgcgctactcgctgttcctgctggaacggcgtgcgcccggccccggcgtggaggtgcgcgttgcgccgtggggtgcggtcaagatcctggacggcccggaatcggacccgcacaacctcactccaccggacgtcatcgaactggagcccgaggtctggctacggctggcctgcggcatcaccacgtgggcagaggaaaaggacgccggccacatcagcgcggtcggagagcgcgacgatctgagcgacctgctgccgctgtaaatcgtcggatgcccggtatcggatgccctttatcagaactgtgcgatgctccaacgctggatgtgctcggcccagcggtccggcgtgggtagggtgatgaggctgcgcatcgtcagcgcgtaagcggcggcagctaccagcacggcggccagaatcaggcaggtcggaccgtagccgatggtctgcataccccagccggcgagtgccacggccacgccataggcaccgtactgcaacaccatgctgcccgctccaacgcggccgagcttgtccttgcccaccaaggtattgctgaggcctccaagcaccgcgttgcccgcgggcaatgccagtaccgagcaggccacaaatatggccttgccaaccatggagggcaccaacgcggcaccggtgaatcctgcggcgagcagggcgaacatcacacccaccagtacgccgccgggtacacggttgaccagttgcgaggccatcagtgcgcccagcaacatgccaacggcggaggcggcgttgatgaatccggcggatatcagctggctgccaccttgggagatgtccagcgcggtca

SEQ ID NO: 120 - DNA, 44491 bp, Unknown
  R206_24m  MAG No. k141_33614
cagtgggaggtattagccgacggtgttgccgtagatttgggcttggaggtctttacgggcggtttccatgcgggtgatctggccgaggagggttatcttctcttcgccgtcgggcagctgggccatgcggcgtttggccaagccgatctggcgcatgaagcccatgtccagtagccgggtgagcagttcggtggcatagcgctgctcttccggcgtggcagggcgtagctgcacggcggccgcaccaccgccgactcccccaggcacgttcgactgcggaggttgtgcgccattaccaccgtcgtcgccaggcagtggcaacggcatgacggccagctcgttgatcacctgattcagcatcggcccgccggccttggtgaggttgtgcatccacagcccctgcggggtatcgtcggatggcagtccgccggcggccgcgatcgcctggaacagggtgcggaacaccgaagtcatgaaatggtcgatggtcagctgcccgaacatggtgcggtcgatggcgcgcggcacctgaatcagcacggccatgaactgctgttcggcgatgaatacggcgtcgtcgatcttgaaatatgcctgttcggcggcgtcacggcgctccaacgccttgcgcgtggccggattggcgtatgggttggtgccgggttccacacgcggctcgtcacgctcgaatcgacatttgggcgcgtaggcgtcctcatcgcgtacatgcatctgccggcgcgcgttcatcacctcgcggcgcatcacctcaagatccacgccgatacggcccgcggacttgcgcgcgtaagcgtcccatagggagcggtcgcgaatctgcgccaccagcggggccacggctttcatcgcacccactcggccgggcgtgtaggtcaggtcgaaccggctgatggcggcgtcgatcacgaagtcatacaacggtttggcgcgggcgatcagcgagcgcactgcttcgttgccccgttcgatgcgcaggtcgcacgggtcgagattgtcgtcggccacggccacgaaggtttgggagaggaaggccgaatcaaggccgaaggcatgcagcgcggctttctggccggcggcgtcaccatcgaacgtgaacacgatgcgcgagctcaacggctggtccttgaccttcaacggcccgaccagctggaccgcgcccagcgaatcgtcggcgatcaggcggcgcacaatcttggcgtgctcggcgccgaacgccgtaccgcacgtggcgatggcggtgtcaatgccggccaagtgcatggccatcacgtccgtatagccttcgacgatcaccacctgtcgcttcttgacgatggcggatttcgccaaatcgatgccgtaaagcacctgggttttgcggtagagctgcgtgtccggcgtgttgatgtatttggcggcgatctgatcgtcttcgtatagtttgcgcgcgccgaagccgagcgtgcggccggtcgaatcgcggataggccacgtcacgcggccgcggaaatagtcatagatgccgcgctggccttggcgggccaagcccgcgtcgaggatttccttctgcgtaaaccccttggaggccaagtggcgcacaagattatcccaaccttggggcgcgtagccgcaaccgaaacgttcgcagtcggcttgggagaagttgcggcctccgagcagcttgcgggcgggcagtgcttccttggtcaggatctgggagacgaagaagcgttgggcttcctcgcaggcttccagcagtcgggtgcgcttggagccggtgttctcgcggttcgggccgttgccgctgttctcgtagtgcagctcgatatggtacttgtcggcgagcagttccacggcttcgcggaagtcgatgttttcggattgttcgacgtatttgaatacgtcgccacccaagccgcagccgaagcagtgccacacgccaagtgaggggcgcacgttgaagctgccggttttctcgtcgtggaacgggcacaggcccacgaaggtgccggtgccggagggcttaagcgttacggtcgcagatacaatgtcatacaggtccgcggcggcgcgcaccttctcgacatcctctttcttaatcattccgaccataagtctctagagtaccgcttcacctgagacacggtaaatttttaccgtcggttatcatttcttccgcgaaactcccttcagtcgcctacagcgacagctcccctcacccgaggggagctggctcgcgcagcgagactgagggaagcacccgtccaacacgccctcagcacaagatggagtgcagggccagagcggagttgtcggtcaggcttgcgacctgatcgatggcgacgcgcaggcgctcgttgtcattggtggattcattccaatcggccaggaactggctttccaaagcgtcggatgggagcggcgaatcggccataagcacatcgaccaaatccgatacgatcttgagctcctcctgatggaatggctcgcgctcgcgaggcgccatgacgaagtacacggcgatgcccttcaacgccacgatctcgtaattcgtgtcctcgggaatcacgatgttcgcggaataccgggtcaacggcccgggcccatacgtgtcgcgcgtggcggtttccaccgaccagcagaagcgaccgatcaaatcggacgtgatgttcttgagctgtgccaacgattcgcgcgaaccattgaaatgtgcagggaacaaatgctctcggcgcaatcgcatgaacgcggccagcagcttgtcggcatcccacttcgccccataccatgcgcgcgtctgctcgatgatgtggtccagcatcttcggatcggcgagcacaatcggatcgaacgcgccggtggcgatggaatcctcgacatcatgcacggagtaggcgacatcatccgaaaggtccatgatctggcattccatgggcttggtggcctggggagcgccgattttgagccagcggaacaccggttcgtcatccgggtagacgcagaacttcttcgaccgctcccccttggggtgtcggtcggcttcggccaaggtccacgggtatttgacggccgcatccaaggccgcacgggtcaggttcacaccggccgaacgcccgtccgggtgaaagatcttgggttcgagccgggtcaggatacgcatggtctgtgcgttgccctcgaagccgccgatattgctggcgatgtcggcgagcgcacgctccccgttgtgcccgaacggcgggtgaccaaggtcgtgggccagacaggcgcagtcgaccacgtccggatcacagccgagcaatgcgccgatttggcgaccgatctgggcgacttccagcgtatgcgtcagtcgggtgcgggcgaaatcgtcggtaccggcaatcagaatctggcttttcgcgcccaaacgccgcaaagcggacgaatgaatcagtcgcgcgcgatcgcgttcgaaagccgtgcgcgacttggatttgggcggctcgggtgcccatcgctcctcgtcgaaggcgttgtagccctcatcgctcagcacctgttccccatccaacgttgtttccatatgccaagcataggcacacatatcggccgcagtaatcccgacttcccgaatatgtgccactgacgtcaactcaacggcacatattcgggagattggggccgatttcccgaatatgtgacgctcagcacatgtcagtggtacatattcgggaagaagggattacggggtgccaccgtatggcggtaatgcaccttatagcagcgtggcggggtcgagcttggcgaggtcggcggcgggcagtacttcggcggcatgctcgtaaaggcgcgggatgcggttgcgcaggcaggtgaagatctcgtagctgatggtgtcggcggcgcgggcccaatcgtcggcggtaggctcaacgtaatcctcgccgcggcccgggccgaacagttcgaccgtgtcgccctcgtgaacgccgagttcggcggcggatccgtgcaggtccacgatgaactggtccatgcacacgcggccgcacacgcggtagagcttcggaccttcagtggtcatgatgcgcaccgggccgcccggcttctccacgtgcttggcaccttccatatcgaaaccggaagcggagcggtggatgccatcggcgtagcccagcggcacaatagcggtcgaggtgttgtccggggtcaggtaggtgcggccataagagatgccatggccggcctccacatccttgaccgtgccgagctgcgcctgcaggcgcatggccggggtcagatgccagtcgcgcggggtgcccatcgcgggatcgggctcgtagccgtacaggccgatgccggggcgggtaagttcgaagtgaatctccgggcggtccaaagtggccgccgtgttggccaggtgacggatctccggcggaatgccggcctgttccatgcggcgcgtgaagtccttgaacgttgcgatctgctggtcggtggaggcgacgaattcgggcacatcgggcgaatcggccacggcgagatggctccactgacccacaatatgcaacacgccctctttggcgagcggcacgagtttggcgagcgcggcgtcgaatccggccggcgtgaaaccgttgcgaccgaagccggaatcgaccttgacgtgtacgcgggcgggcttgccgagcttgcgtgcggcggcggccacggcatcgatgccgggcagggagccgaccgatacgtcgatatcggcagcgatcagctcatcgaatggcgcttcggtgccgttgtagacccaagtcagaatgcggcaacggtcggggccgatgccgagtttgcgcagcagcagtgcttcatgcgattgcgcggtgccgagccatgtcgcgccgccggcgagcgcggccagtgcggcgggcagcagtccgtggccgtatgcgtcggccttgaccacgcccatcaccgccgtgccggagttcgggccgccgaccacggagaccaggtgggccatgttgtcgcgcatggttttgaggttcacgatgacctgtgcggggtattggcggcgggcggccgcatagttggccttgccctgctcggacgagaatgcgatttcgggtgctgcgttcatgctcataggcacctattgttgcgcaggaatgtgacgtgtggtcataatcgtttgttttcgcccggcagtcgtacactaatgaccgatatgcggtttctcggaagccgcctttgattcccggcgttgaggcgtgccgggatcccggaaatccgtccggtctagccccatatcttaagtttcatgagagaagaacatggatctgtttcgtaagaaaagcgtggatcagcttgtcgccgaatccactcccctgaagcgcacgatgcgcaccttcgatctgacgatgctcggtatcggcgcgatcatcggcaccggtatcttcgtgctcaccggcaagggcgcgctcaccgccggcccggccctgtccgtatcgttcctgctggccgccgtctgctgcggtttcgccggcctgtgctacgccgagttcgccgccatggcaccggtgtccggctcggcctactcctatgcctatctggcgttcggcgagctcatcgccttcgtgatcggctgggatctgattctggagtatgctctgcaggcggccaccgtgtccgccggctggtcgggatacttcaacaagttgttggaaggcttcggactgcatctgccggtcgagctgaccgccgcctacggcaccaacccggacgtcaccacctacttcaacctgcccggtttcgtcatcgtgctgatcatcacgtgggtgctctcgatcggcatcaaccagaccaagcgcaccaatgacgtgatggtgctcatcaagctcgccatcatcgtgctgttcatcgtgtgcgccgtgtggtatgtcaagccgtccaactggcagccgttctccccgtacggcatctacactttccagcccggctccacccagccgtacggcatcgtgccggccgcatccatcgtgttcttcagcttcatcggattcgacgccgtgtcctcttccgccgaggagaccatcaacccgaacaagacactgccgcgcggcatcctgctgtccctggccgtttccaccgtgctctacatcgtcatgaccatgatcatgaccggcgtggtgccctacaaggagttcgccaagtacatcgacgccccagtggccggcgtgattctggagaccggcatgaactggctcgcggtgatcgtgaacctaggcgccctcatcggcatgaccacggtgatgctcgtacagctgtacggccagtcccgtatctgctacgccatgagccgtgacggcctgttcccgaagttcttcggccacgtgcacgagaagtaccgcaccccgttcaagggcacctggttcttcggtctgctgaccgcgttcgccggcggcttcatcaacatcaacgtgctgttcgagctggtgaacatcggtacgctgtccgcgttcatcatcgtgtcggccggtattctatggatgcgcaagacccagccgaatgcgccccgcggcttccgcgcgccgggcgtgccggtcaccccgattctggccatcgtattctgcttcgtgctcatcgccggtctcaactgggagacctgggtgcgtttcgccatctggttcggtctgggcctgatcgtgtacttcggctacagccgcaagcgctccaagctcggccttgagcagaaggccggggctgacaccaaggtcgctgcgactgaggactgaggtctatcggctgaccgatagccgatggctgctttcgtgaaaaccgtacgctgagttactttcagcgtacggtttttgcgatatgcacgagtttgaacgggcggccgacggaccgtacgtgcgcgacgacgtggaccttacctgaccagctccaccgcggaaccgaacacgctggcgacagccacactcaccactcgtggcgctgataggcgattctggtggtgtcgaccggccggtcgagcagctggatcaggccgcaacgggcgaagccggagctttcgagcacgtgctgcatggccttgttattggggtgggtgtcggcgcgcacgttgccgtagtgcttcagggcccacctgatgcagtcgcgggccgcgtggcgcaccagaccggatgcggcgatgcggtggatggtcacataggtgtcgttgtccagccaggcgccgtcgattttggcgtaggtcggatccttgcccgggcacagggcgaactgggccagaatgcgttcgtggccattgcaggtgtcgaccagcagcatcgtacgctggttggcgatgtcgtcctcaatcaccgattcacgcggaaattcgttgccccactgggtggggttgccgttggcggccatcaacgcgcgtgcgcgtgcgtagattttctgcatctgcggcagatcgcgcatggtggcgtggcggaaacggcggcctgtcgccttgtttgcagcgttcgactgagtcacttctcacctctccgacatgccgggttgccggcacggtgaccggcgactaactgacggccaacctaccatgccgtaggcacaagaaatcccgtccgcgttgcatgacggacactaataaacaatgactcccgtccgcaggagccggacagtccagccgagttgaggacagccaccctcagtcggcttcgcccccggctcccgccagcgggagccgaatcagaattgaatcgaatcagacgaatcagacgaccttgcgctcgaacgggtcggagctgatgccttcctcaaggatctgcttggcccattccttggcggcgaacaggctgtggtcgcgatagttgccgcagctcttctcggtggtggcgggcacgtcatcccatgtggccttgtatgcgatgaactccaacgattccttcaacgccttggccacatcctcggtggagtgggtgccccaggtcagcaggtggaagccggtgcggcagccgaacggcgagcagtcgatgtagccgggaatgcgttcacgcagcagcacggcgatggtgtgttcgatggtgtgcaggccgccggtggggatggcctgctcattcggctgggtcaggcgcagatcgtaattggagatcacgtcgccgtgagggcccgtttcggtgtcgatgtaacgcacgtacggcgccttgaccttggtgtgatcaagccggaatgattcgacgacgggcttttcggccttgtcttctgccatgctgttgcctttctacttgctgagtgttcggtcatgaagtatcgaacagtcatcgtagtcgcgccagcccaagaacgcccgcaaatactccgcggttcgctataggagattgttatgacgcactcccggcattgaacgaggcgatggtttgcatgaagcgctggccgtagaggtcgagcttgtgttgaccgacgccgttgaccgccagaaattgcgcgttggtaaccggcttgatgcgggccatgtcgcgcaaggtcttgtcggagaacacgatgtacggcggcttgccgatttcctgggcgatggtgcgtcgcagttcgcgtagcttctggaacagcgattcctcgtcatcgtccgggatatacgagcccagcgcatcgccgggaacattggcggaatcggcagtatcagccactcccccgctccgaccggaaccggccgccgccgacttgcgttccacccgtttgatctcatagtggaagtcgggagcggcggtttcggccgcccgcgcaccgaacatgacgattggcatacgcccttcggcgattgacaggtacccgtccgtggccatctggctcaacacgtcgcgcacgcgagcttcgttcacgtccttgagcatgccgaaggtgggcatccgctccgggttcagccatgccagatcctgtgcccgcgaaccgcgcaggatcttgacgatcttgccggaaccgacgcgctgccccacgtcatgcacgcaacggctgatcgcctgcgccacgcgggtcacgtcgatggtctcgaacgtgctttcgcagttcgagcaggcaccgcatctgccggactgcgaagagtccgccgcaatgtcttcacccgccgcggaaccagcattcggcgacaattcctgaccgaaataccgggtcatataccggtgcaggcagtcggtggtgcggcagtagccgaccataccgtccagcagccggcgcttggactggcgaacgatctcctgctcttcgggagtcaatcgctcgttctcataatcgttatccagcaaccgacgccgggtgacgatgtctgactcattccacagcagcgtgcatcggctgggctcgccgtcacggcccgcgcggccggcctcctgatagtaggcttcaatggattcgggtagattgtggtggatgacgtaacgcacgttggacttatcgatgcccatgccgaaggcgttggtggctacgaccaccggcaccttgtcggtgatgaagtcgcgctgggccacctcacgcgcgtccggcgacatgccgccatggtaggcgacggccggatgccccatctggttcagcgtgtcggcgagcgcttcggtggtcttgcgggtggcgcagtagacgatgccggattcgtccggatggtcggccacataccgcgccacccatgcggccttgtatttggtctccagtttgaccacatcaaaatacaggttcggccggtcgaatccggtgacggtgacggccggattccgcaatcccagcagtcccacgatgtcccgacgcacccgttcggtggcggtggcggtgaacgcacccaccggtggacgctgcggcagcccggcgatgaaatcgccgatacctaagtacgacgagcggaagtcctgaccccactgggagacgcagtgggcttcgtccacggcgatcagcgagatcggcgtacgggcggcaaagtcgcggaatcgcccggtttccaagcgttccggggccacgtacagcagtttgatctgcccggcggcggcttgggcgaacaccatcgcctgctcgtcgggagtttgagtggtgttgatgaacgcggccggcagaccgaggtcgttcagcgcatcgacctggtcgcgcatcagggaaatcaagggagatatgaccaaagtcgcacccgggctgagcgcggcgggaatctggtagcacacggacttgcctgcgccggtgggcatcacgcccaagacatcgcgtccggcaagcaaagcctcgacaattccttgctgtccgggcctaaacgagtcatagccgaagtatcgtgtgagcgcctccagcgccgcctgatgtgctgtcataaacgaccagtgtaggccgaccgcggatggatttcatcgtataacggaatacctcgtaacgatgtacgtagcccttccgtattattatgcgtcgaggaacgctattcccggcatatcacacgatatgccgctttgagagaactaagacggggcattttatggccaacaatacattttccttctcctctcctgacgatcaggagacggcggtgctgcagcctgtggccgccgatgggctgttcgcagccgcggccacaggtaccgccacgccacagcaaagcgacaatggcaccaataaccatgccgacaatacagcctatgtgggtgaacatgttatggcatctaccaccgctaaatcacatggcaaggccgcacggattgccatcataaccatatttgcagtgttgcttgccgcattaatagcctatttcttcgtcggacgttggtacttccaagacaaggctgcgcccggtgttcatttgggcaatgtctctgtcatgggccagacccgcgaagaacttgcgaatactgtgaagcagcagctgaataacaccacagtgacgttcaccgccgaaggcaacagcgtcaaagcctcgctgaaggaccttggcgtcaccgtcgacacggataaaaccgtagatgcgctgttgaacgcgaagaccggcgacgtggccaagctcaatattttcgatcagccgcatatcgctctgaccgccaccagggacaaagagactgccgaacaattcgtcaccgccggcctggtcgatgaggccgaccgagcgcagattgccaccgttgtctacaacaagagcaccaagcagttcgattacaccgcgggtcaggatggcaagggcccggatatcaatgttgtcaatgctgcagtcaaggaggccgtcgcgaccccgggcgaaaatgcgacggtgccggtcaagctacagactgcaaagaatccgattgatgacgcgagcgcacagcaaacacagtttgacgccaatgccaagcttggcctcaaactgaccgtggacaacggcgtgaacaagagcgtcaccatcccggccgataccattgcctcattcctcaagcccacggtgaataaggcgggtggcaccatgagtctggtagtcgaccgcgatgccatcaccaagtacgtcaccagtgacagcgtaaccaaagaactgactgttcccaaggtgacacgcgaggtctacatcacgccgaaagacgaaggcggcgtggaaattggtgccgataagacactcggtgtggatggtattgaagtgactggtgccggggacgcccccgaacgtctggctaccgccatcgagcagaaccagtccactgattccactgtggctgtgaaagacagcccatatgatgtcaagcaggtcgaggtgcctcataacttcgatacggcaaatggcgataagtgggttcatgttgatctgacgaaccagactgccactgcatatcagggcaccacggtggtcaagaagttcaacatcgcttctggcaagcccaccgccgatggttccatgctgtccgataccggcacgttctacgtgtatctcaagtacgaatcgcagaccatggttggcgaaggctacaaccagccaggcacgccgtggatttcctactataacggcggcgaggccctgcacggtgttcctgcatacatgtggggcgagcaccccatctatgtgcagcagggtatcccaggctcgcacggctgcatcaacatgcaggtggccgacgccaagtggatgtacgactttgccaccatcggcactcgtgtggtcgttgatggcaccacaccgacttccggtcaggcgttgcgcccggctggtgcggatgccaccggatggcagggcggcaacgccagctgattcgatccatgttcaatcgataacggaaaatccccgacccttgtgggccggggattttttgtaggtaccaatcgatagcgagtccgccgataagcgtggtggcaccgtcaatacggtgccaccagtaccgtcagtacggtcagatacgatccaacgcctgcttgagatcggcgataaggtcgtcggcgttctcgataccgaccgaaatacgcaccagattggcgggcacctgcagggtggtgccggccacggaggcgtgggtcatggcggcgggcacctcgatgaggctttccacaccgccgagcgattcggccagtgtgaagatctgcgtgtggtccacgaagtgcttggccgcctcggcaccggccgcgagctgcacggagacgatgccgccgaagccgccgtgcatctggcgggcggcgatttcatgacccgggtgggactcgaggcccgggtaccagacgcgctcaatcacatcagagggctgggattcgagccattcggccaccttcagggcgttggcactgtggcgcttgacgcgcagatccagggtcttcaggccgcggatgtccagccaggagtcgaacggggagggcactgcgccggcggcgttctgcaggaaggcgaccttctcacgggtctcctcgtcgttgaccaccacggcaccgccgaccacgtcggagtggccgccgatgtacttggtggtggagtagaccaccacatcggcgccatcggccagcgggtgctgaagggcgggcgaggcgaaggtgttgtcgaccgcgaccttggtgccgtacttgtgggcaacttcggcggtggccgcgatgtcggtgacgttgagcagcgggttggacggggtctcgacccacacatactggtagtgcttggaggccaatgcggtttccacggctttcagatcggtgatgtccaccacgtcgaggcccacaccccacggcacgaacaccttggagagcaggcggtaggtgccaccgtacacatcgttgccgagcaggatgttgtcgccgggcttgatggtggagcgcagcagcacgtcgatggcggccaagcccgaggagaagctcagcgcgtacttgccgccttccacggcggcgagctgctcgtcgaagctggtgcgagtggggttgatggagcgagagtagtcgtggcctcccctgaggcccaacacgccatcctgcttgaaagtggaggtggcgaagatcggcgtgacgaccgcaccggtggtcgggtcgggctcctggccggcgtggatggcgcgagtggcgatgtcggtgttggcgaacttggcgttgtattcagcggacatgatattgggttcctttcgggattgttccgtattcgaaggtaaaacaggtgcggttagttagtgcggatgttggtattgattcttttgatagctagttatggagtccatccgcagctccctcatcagagggagttccgttaaggtactgctcggcgagggagggcttgctggtgcgttccacgatgtcgccgtagccgttggcacgcatccagtcgtcattgaagatcttctccagataactgcggccggaatcaggggcgagcaccaccacaatctggttctcgtccaaatcattggcaagcgcgtacttgatggcgctggccacggccatgccggacgagccgccgaccagcaacgcctcctcgccggccagacggcgggtcatttcaaaggcttcggcgtcggatacgcgcacgatgtcgtcggtgatgttccggtcgaaagccttggggtagaagtcctcccccacgccctcgatgtcgtactggtggacttcgtcgcgtgaggaagcggagtagatggagccttccgggtcggagccgatgaccttgaccgcgccgttggaggcttccttgaggtacttgccggtgccggagatggtgccgccggtgccaatgccggccacgaagtgcgtgaccttgtggtccgtagcctcccagatctcggggccggtggtgtagtagtggctcagcgggccgttcgggttgtcgtactggttcgggcggaagccgccgggaatcgtgttggccagtcgttcggcgacctggtagtaggagcgcgggtcgtccgggccggcgtcggtcggtgtgacgatgacttcggcaccgtaggcgcgcagcaccgcgcgcttggattcggaaaccttgtccggcagggtgaaaatcgtgcggtagccgcgctgctgggcgaccagggccaggccgacgccggtgttgcccgaggtgggctcgacgatcacgccgccgggcttcagctggccggactgttcggcggcgtcgatgatgcgctcggcgatgcggtccttggaggagccgccggggttgaagtattcgactttgacggcgatggtggctttgacgccggccgcctgcgggatgtggttgagcttgacgagcggggtgttgccgatgagttctgcgaggctggtgtggatggtcatgtgaagtccttcgttgctggggttgtgggggttttgctgcgttgcgttcgtgaaccgacgttcccagacgaatggactgtggctttggtttgaaaatcgagtattcccgctcactgtacggtgaatccgaaaagtgaatcagtttttcatgttaaccacggctcgcgcattacacgattacgcttgtgccatcggatacatgaaaagtatgcggcagattcgccgcgattcgaatgctccatctcaagttatgcgtcactgaccgctcgcccaggggcgtcggttagcgacaacaacatgagataatctgcatgcctcacaccatagcacaacccgcgacaagcgcgtgtcgccggcggcctgaggggagtacgacggcacccgtaactcccctcagcctcactgcattcgacagctcccctcagagaggggagccaaaaaggtctataacgaggctgcctcgatgagctgacgggtgtaatcggattgggggttgccgagcacttcggcggtgggacccgtctcttcgacgcgcccgtcgtgaagcacgaggatgcggttggcgatgtgctgcaccacgccgagatcgtgggagaccatgatgatggcggtgctcggccgggcctcacggatagcggcgaaggcgtcgaggatctggatgcgcgcggccacgtcgatggcgctcattggttcgtcggcgaggattaccttgggctcgttgatgatggcgcgggcgatgaccacgcgctgcgcctggccaccagacaggtcgattgggtaccggttcaggaagtccgccggttcaagacccgccatggtcagagccgcgaccacccgctcgtcgatatcggtgttgttcagatcacgtcgctgcagactcagcggttcagccaccgatttggcgacttgccaacgcgggtcgagtgatgagaacgggtcctggaacaccagtcccgattcgcggcgcagggtcgcgaatcccggcgattttcggccgccgacaatggattggctctcgtattccacgctgccggagtccgcggattccaagcccagcataatgcgggtcagcgtggatttgccggatccggagccgccgatcacggccagacattcgccggcgtggacgtcggcggagacgtcgaagaggacttggtggcgtgcggtgcgcggtccgaaggatttggtgatggagtgggcggagaggagtggcacactgctgttactcatgcgaatcctccttgggggtgtggagggtgagggtttgggcggcggcgaccaagcgttgggcttgcggcgtggtcggtgcagcaagcaggtcggcggtgggtccggattcgacgatgcggccggcgtccagcacgtagcagcgggtggtggcacgcgcgagtacggagaaatcatgggtgatgaacagcatggatgcgccggcgtcgtccaccaacgaggtcagcaggtccacgatctgacgttgcgtgatggagtcgagcgcggtggtgggttcgtccgcgatgatgaatcgcggtgaggtgatcagcgccgtggcgatgcccacgcgctgctgttggccgccggacagttcgtgcgggtatgtgccggccacgtcacggtccagtccgaccttgtccagcatggtattcactcgctcagcacgttcggccttggtcagatcgtagtgcagtctcaacggcaacgcaatctgctgcgccacggtcatcaccgggttcagcgcatgggccggattctggaataccgtacccacataccggccgcgcagatcggcaagcgtatgctcgtcggcgtacgcagcggaatcgtggcccgaggtggcaaccctgcgttcaccggcaacatggtgcctatctgccgcgccgcgttcttcgtcagatcctgagtcatcttcctgcccatgccgcgactcggcggtttctccggacaggatggcggtttctcccatcgtgatggtgccggacagcacggcctcgcgcggcaacaggccgagcaatgacttggcgatcatcgatttgccggagccggaggaaccgatcaggccgacccgttcgccgtccgcgatggacagatcgacatccgtgacaatcggtttgccgccgatagcaatattcagcccgtgaatttcaacgctcatcatccgtctccttcggcgctgccactgcggactgcgccgcagtgtcaccggctcccctagccaccggcacaaccgcaccgggcacagtcatctgccgcaacgcgggattagccaccgggtcggtggcgtcgcgcaacgcgtcgccgaacaggttcagcgcgaccaccaccagggtgacgatcagaccgggccacaccaccgtcaacggaaacacgttgatgagtttgaccgaggtggccagcgaatggccccagctcggcacccccgcgccgacgcccacgcccagataggtcaggcccgcctcggccagcaccgaggtgcccgccgacatcgacgattgcaccatcagcaccggcgtgatgttcggcacgatgtgtctgaccagtacgccgaacccgctggcaccgttcgcccgggccgactgcacgtatcccgagcgggcggcgagcagggcggccgggcgggcgacgcgcgccagatgcagcccgtagccgatggagcatgcgccgatcaccacggccgcggatgcgccgaacggcacggcgagcagcagggcgatgagcacggtggggatggagatcagcgcgtcgaccacggcgaccgacgccgaagcgagcgccgaagaacgggcgaccatcagcccgaccagtaggatgccgatggcagccgagcagacaacggtcagcagggcgatggcaaggttcgtacgcgatccggccatcagccagctcagcacatccgcgccggtgccgtcggtgcccagccaatgcgcggacgacggcttgtcccacacgtggtagccgtcggtggccagcaacgactgcggggtccagaacaacgacaccagggcgacgaccatccacaaccccagcacgatcagcgagtagcggccggtgccccgggaccagatggtgcccagaaccacgcccgaacgatgccatcgaccattgcgatcaaccatcattcctcctttccggcggccagacgcgggtcaagcagcgcgtgcagcagatccaccgccaggccgatcagcaggaagaacgcggcgagcaggaacagctcgctttgcacggccaccagatcgcggttgccgacatcgcccaccagcagggcgcccagaccgggcagggcgaacaggttctccaccaccatcacgccggtgatcatcgaggcgaacgccagccccaccaccgagacgagctgcggagccgccaatcgcaatcccacgcgcaccaacgcctgggtgcgggtcatgccgcaggacatggccatatcgatcggacctccctcatcggcgatgccttccagaatggagcgcgtgtaacgcatgatgcccgcaccggacacgaatccggtggcaagcgccggcaggatcagggacgagaccgcccgcccgggagcgccccacccagcggcggggaacccctgcgagggcagcagaccgacaaggcccacgccccgtgcgaacaggaggatgagcagcaggccgctccacagggccggcacggcgccgcccacgatggacagcacgcgcaggaaaccgcgcacggccggcgaccgggagatcacggcggcggcgcccatggacaagccgagggtgagcgcgatggccagactcatcacgatcagcgggaacgtgatcgtcgcacgttggccgacctgggaggtcaccgcccgcccggtcagcgccgacacgccgaggtcgccgtgcagcagccctccggcccagtcgagatactgcacgacatacggccggtcaaggccgaattcggcgcgcagggccgccacacgcgccggcgatgcgttcatgccggccatcacgaccgccacgtcgcccggcaggatgcgcagcatcgcgaacaccagcaccgagatgccgaacagcgccgccgcgaacagcagcaaacgttgcatcaagaaccgcataacgcctcccttatcgattccctcgccaccgcccgtggcgtcaccggccggatgggccgtccacggtcgggcgcgccacggaatcactcccgcgccgcgcccgaccgatgggttccgggactacttggtgtaggtgatccgccagaggggcagcacggtctggctcaggttctgcgggaagccgtccacgcccttggcgtaggcgatggtgaccttccagctgaacagccagtcggccggcgcgtcctcggagacgatcttcgcggccttggccagatacttcgaggcctcgtcatcggaggtggcctccagcgccttggcgtacagggcctgcacgtccttgttgtcgtagtggaagtagtagctcggcgtggtccatccgtagaagtcgtggctttcggcatggtccacgagcgaaagatcgtagttgccgttggcgtgcacgtcctgcagccaagtggagaactccacgtagttgatcttcaggtcgatgccgatgggcttgagctggctcttgagctggtcgccgagctcggtgccgtacacgttggcgtaggtgagggtcaggtccagcggcttcgactcggagtatccggcctgctccatgagcttcttggccttggccacgtcatgcgggtacaggccgctcagatcctcgtaaccgggatcgaccttggggatcggaccgccgaggggggcgtccacgccgccgcgcgaggcgatgatctgcttatggtcgatggcgtatcggatggcctggcggacgcgcttgtcggagagcttgtcgttggccatgttgaaggcgagcacgaacttgtcggaaccatcaccggacttgaccacatagttcggatccttgcggaacggatcggcaagggtggcggagatgggcgaaagcacctgcacgtcgccgctcttgagggcgttgatgctggcgttctcgtccggcaggaaccggacgatcacgttctcggtcctcgccttgtgctcggtgccccaatacttggggttcgccttgagcacgatcttgtcgttcgggtcgaaggagaccacggtgtacggacccgagcccaacgcgccgttcttctgatcccaggtggcgtccttgtcgtagaccaggccgggacggctggtgaggtaccacagcatgttcgagttgggcgcggagagggtgagcctgaccgtgttggcgtccacggcctcggccttgtccaggctcttgacctgctcgcagtcgtagtacttctgggccttgagctcgttgatggaccacgccacatcctcggcgtcgagcttgtcgccgttggagaagttcatcttctcgttgaggtggaacgtgtaggtcaggccatccttggagatctcccagctcttggccagaccggggtggaccttgttgtccgagccgcgcgagacgaggccctcgtacacgttgccgatgaggatctgctcaagggccgaacccgactggtggcggatgtcaagattgaccggggcgagtttgaggccgacggccacggtgtcggatcggctggccgagccggaggcgttcgcgtccttgcccttgcctttccctccgaagacggtgacgcccacgatgagcgccgcggccacgacgaccgcgatcagcgtccacagccaccatttcgggccgccgttcttcttgtctgatgatttcgcgcgcgcgttcaggctcgcgtcggtgctggcggcttgattcgcgccgtcgatgttcctgtcttcggttgcgccggactcgccgtgcacaccattgttctgggacatggatactccctgatgcattcgggcatgcttacgcccgaatatggtttcgttgttatcttgcgtggttgaccgcccattcgggtcgatcaccacgttctactatatccccggacacgccggaggcaatggctatactggattgcggcgccgacggagggtccgcggcgaccacaacacgcggcgcatcgtcgggcaacgacgcgggaagcgctggcgtgggcacacgtgcggccttggcataaggccgggaggcagctatggcacatattcttctgggcgtcaccggcagcatcgccgcattcaaggcctgtcatctggcatccgattggaccaaggccggccacgaggtgcgggttatcgaaaccacagcggccgaaggcttcgtcactcccctgacattcacctcactgacccatcaacccacccgtaccacgatgttccccgcttatccggccgcgcacggcgacgtgacggccaatccgaccgtgccaacgaccatcaatcatgtggccgatgcggcctgggccaatctgctggtggtggccccggcgagcgccgacgtcatcgcccgcatcgcctgtggattggcgaacgatacgctgacgtccaccattctggcctatgaggggccgaagatcctatgcccggcgatgaacgtgcatatgtacaacaatccggccacgcagcgcaatctgaaaacctgcgccgaattgggctggcagattgtggagccggaggaaggcaatctggcttgcggcgacgtgggacgaggccgtatggaagagccggcgcgcatcgaggaagtggccgctcggctgctggcggatgcgcaggatgaccaggctccctcatcttccccgctcaaggggctgcgcgtgctagtcactgccgggccaacgcaggagccgctagacccggtccgctatctgacgaaccattccaccggcaagatggggtatgcgattgcctcggccgcagccgaatttggtgccgacgtaacgttggtctccggtccagtcgccttgaccgcgcccgatgcggtggatgtggtgcgcgtcacgaccgcgcaggatatgttcgatgcggtggccgacgccttcccggcggcggatatcacgattatggccgccgccgtgggcgatttccgcgtggccgagattgcgccggagaaaatcaagaaggccggccgcagcagcatcaccgtggagctggtttccaacccggatattctggcgtgggccggcgaacgcaagcgcgacgacggctcgcagatcctgtgcggattcgcgatggagaccgagcatctgattcgtaatgcggagaagaagctgacgtccaagcattgcgacatgctggtggccaacaatctgcgcgacgccggtgccgggttcggcaccgacaccaacgttgtcaccgtgctcacgtccggagcggaggatgccggcaccccgaagatcgagcattgggacaagatggacaaaaccgtgcttgcgcaacgactgttgctgcggctcgcagcgttgcgttccggcggcgcgagcaatgtcgatgacgagaacaaggaggcctgacccatgctgatggcggtcgatatcggcaatacgaatatcgtgatcggttttctggagggcgaccgcatcgtcggctcctaccgcatcaccaccaaggcgacgcacacctcagacgaatacggtctgatgatcacgcagttcctggctttgagcgattacacggccgacgatgtggacgatgtgatcgtctgctcggtggtgccgaaggtgatgtattccttccgcgcctcgctgatcaaattcctcggattggaaccgatggtggtgggccctggcgtcaagaccggcatgaacattcgtctcgacgaccccaaaaccttgggctctgactgcatcgccgactgcgccggcgcctaccacacctatggcggcccggtgctggtggccgacttcggcaccgccaccacgttcaactatgtggacggttccggcacgattcgctccggcttcatcaccacgggcatccgcaccggggccgaggcgttgtgggggcagaccgcccagctgccggaagtggagatcacgcaaccgcagtcgattctggccaccaatacgcgcactgctatgcaggccggactgtattacacgttcctcggtggcattgagcgcacgattcagcagttccgcaaggaaatcgatgagccgttccaagtggtagccacgggagggctcagccgcattttcaagaacgacaccgacatgatcgacgtctacgattcagacctgatcttcaaaggcatggcatacatctactcgcgcaatgtgaagtaacgcggtgtgcaggcatcggccgcgcatagcgcagtcgattccgtccctccccgaaaaacctactcaaaaccctacttaatcgtaaagccctgattgaggccgtattctcggaggtctttctgccattgggccaggccgtcggagagactgactttcttgccgggcttctccaatggttcgagcgggttgccttcctcgtccttcatgcccatctcaatggcttcctgtcgctgctgataggcgtggaaactgccggaccactcgtatgcctggcccaccgtcgatttgaagtcactgcgcgcatacacttcgaatggcagatactggtatccgaccgacacatcctcggcggcctccgacagtacccggttgaacttctgcccgccgaaatacgggatttcaatgccacggtcattggtaatcgtggttttatccagaaaatcagcggaattcagggtggcgtaatcggccgggaaggcaccgccgtctacacgcgcgctaatgccttgggcgtcatgcgccacaaagtccacgaaacgataggccgcatccggcttacgggtcagttgcaacacggtcagcgccgagccgccattttcggcgttggcaggctgcccaccataggtgggcatgggagccacgcgccacagaccggccgcgcccggcacattggacagcagcagcgacggcatccaagccccagagaacacggaggcgatggtgccggtgcccactctgcttttccaccgatccgaccatgtggcggaggtggtgtcaacaagcccctcatcgatcattttctgccagaattcagtgaaccgttgggtgccggcatcctcatccaaatcgatggtcacggttttgccgtcggccgacgtgtggaacggctgaccaccggcgagccagaccatcgcgtcatagaaactgccgtcgcccgagtcggcggcgatatacgcgccgatctccttgagcttttcggcggcctcgtaatagtcatcccaagtcttgatcttggtggcgtccacgccggcttggcggaacacgtcttcgttgtagaagaagcccatcgggcccgaatccatgggcagtccataggtacggccggcgagctgcacggacgaccatgtgccgagggtaaagaagttggaataatccgagccgattttgtcggtcagatcaagcaattggccggagaccgcgtactgcaacagtgcatagtattcgatttgagccacgtccggcgtgccgtaaccgtcttgaatggcggtattaagattgccgtagccggagatattggtccatttcacgcggatgtccggattggctttttcgaaacggcggatgacctcccccatgctcggttcccagctccatacgctgatctccgtacggttgtcgtccgtggcctgcccgcacgaggccagggatacggaaaggatggcagtcactgctatggttgccattcttttgattcgctgtccgatcacacgcatggtgacgagtgtactaggcggggcttaaaacggtaaaagccccgtgacgggattcgtcacggggctttgtgtatcaggtgagattagctaggcagtctcagcgagggttcaaggcttacttcacggtgaagccctgatccttgccgtaatcctgcagtgccttctgccaagcggcgataccgtcagtcagcttctggtcgccggtgtaggacttgccaaggtagtcgccgaagatggtgcgggccttgacctcgtagggcaggaactggtagtcggaggacacgttctcagcagcctgagccagaacctcgttgtacttctgaccaccgaagtagtcaacgtcctcgccatcggcgttcttcacagtggtggtgttcttgaaggagtcggactccatggaggccttgtcagccgggaatgcaccgccggccacacgggtggccacgccgtcgccgtggttggcgtactcgatgaactggtaagcagcgtcagccttcttggtggaggcgagcacagccagcgaagaaccaccgttctcggagttggtggtggagccgtcagcggtcggcatctgggtcacacgccacttgccagcgccgtcagcagcggagttggccaggttggcaggcatccaagcgccagtgaacagggaggcgatggtgccgtcgaccatgcccttgaaccagtcctcagaccagccagcggtcttggtgtcgagcaggccctcgtccagcagcttctgccagaagtcggtgaaggtcttgacgcccttgtcctcggtcaggttgacggtgacttcggaaccatcggaagaggtctggaacggctttgcaccggccagccaggtcatggagtcgaagaagccggcgtcaccggtgtcggaggtgatgtagtagttgtcgcccagagcgtgaatcttcttggcggcgtcgtagtactgatcccaggtcttgatctgctcggcgtcaacaccggccttgtcgaagacctccttgttgtagaagaaggccattgggccggaatccatcggcaggccgtagaccttgccggcgaactgcacggaagcccacgggccaggggtgtagaagtcggagtagccggaggtcttgtcggtgatgtccagcaggttgcccttgatggcgtactgcgggatggcgtagtactcaacctgagcgacgtccggagcaccggagccagcctcgatggcgttatcaagctgggtgtattccttggtgttggtgccgacgttcttgagatcgaccttgatgccggtcttcttggtgaagtccttggcaacctgggtcagcgtgggctcccaagcccacacggtgatttcggtaacgtccttatcttgagccggcttgccactggcggtgtcggaaccgcaggcggcaacggaacccagcatggcaaccgcaccggtaagtgcaatggccttcttagcaacggtgaacttcatcgttctgttctccttccttggatcgcctttcggcggtctgcagtgattgtcaccacaacagcatggcaactctcctcgtcgtcatgctatcgtgaaccatcactctatggttcagtagttacaaaacggctttgtttcgccactttgtagctatggttgcgataacatcttttattatacacattcttcggcaacacgccatcttggtatcgcaatccgcgcgccactgctcccatggcataagaaaatcgggcgctccgaagagtgcccgatcctgttatcgcaacctcccgctacagaaaccacaggaggaagtctgctgtgattgccgttacttcacctggtagccctgctgcttggcgtaatcctgcaggtccttctgccaggaagccacggcatcggagagcgtggtcttgccggtgtaggcatcgccggcgtagtcgccgaacttgccgcgagcgtagacctcgaagggcaggaacttgtagccggtggacacattggctgcggccttggccagctcctcgttgaacttctgaccgccgaagtactcgtgggccttgccgtcggagtcggtcagggaggtcatgttgaggaagtcgttggacttgagggtgtcgttgtcggccgggaaggcaccgccgtcaacacgggtcttaatgccctcggcgtcgtggcaggcgtattccatgaacttgtaggcggcggcgaccttggccttgtcgtcggacttcacgatggccagcgaggaaccaccgttctcggagttggtctcggagccgtctgcggtcggcatctgggcgatgcgccacttgccgtcaccgttcggagcgccggaaagcaggttgtacggcatccaagcgccggtcagcagggatgcgatggagccgtcatccagacccttgttccaatcgtcggtccagccgacggtcttggtgtcgatgaggtcttcgtcgatcatcttctgccagaagtcggtgaaggtcttgacgttcttgtcaccggtcaggttgatggtcacggtctcgccgcccttggaggtctcgaacggggtcgcgccggccagccaggtcatggagtcgaagaaaccggcgtcaccggaatcggaggtgatgtaggagtccacggcgcgaatcttcttggcagcctcgtagaagtcgtcccacgtgcgcacctgggtcggatcgacgccggccttgtcgaagacgtccttgttgtagaaccaggccatcgggccggaatccatcggcagggcgtagacgccgtcattgatgctcaccgaggaccacgtgcccggggtgtagaagtccttgaaatcggaggcgccgagatcggagaggttctcgaggtggccgcgaatcacgtattcgggcagtgcgtagtattcgatctgggcgatgtccggagcaccggagccggcctcgatggcgttggacagtgcgttgtactcgtccttgttggtgccggcattggtcaccttcaccttaatgttcgggttcttggcctcgaatcccttgaccgtacgaggcagtgtggaatcccaggaccacacggtcagctcgatcttcttatcagaggagccggtgcttccgctatccccggcagaggtggaaccgcaggcagctacagaggagagcatggccacagcaccaatcagggcaattgtcttcttgccgaacttcatcgttctttccttccttgttatgggaaacgacgggacttggcgttttgttccaagtattgtatcgtttcaagaaacggtaccacatgttttatgtttacgcaaacacgacacgtcgcaccatggtgactaaccgcaaaccgaaggagatgcatcccgctcatgaccactcacaacagccagcattccgccgaaaccacccatcccgacaagcaggaaagcagcccggcgccgaccgccgccggcaccacggccagtaacgtctccacaactggcaacgccacgccggacgccagcatcgccctcaacgccgacgccactccggtagccgacgttcccccgcgtctgttcggctcattcgtagaacatctgggccgctgcgtctacggcggcatctacgagcccagccatcccaccgccgacgaaaacggcttccgccaagacgtgcttgacctggtcaaggagctgggcgtcacctgcgtgcgctaccccggcggcaatttcgtatccaactacaactgggaagacggcatcggtccacgcgagaatcgccccgtgcgccgcgacctggcctggcattgcaccgaaaccaacgagatgggcatcgacgacttctaccgctggagccagaaagccggcaccgaaatcatgcttgccgtcaacatgggcacccgggggctgaaagccgcgctcgacgagctcgagtatgtcaacggcgcgcccggcaccgcttgggcggatcagcgcgtggccaacggcatcgaggagccgatggatatcaagatgtggtgcatcggcaacgaaatggacggcccgtggcaggtgggccacatgagcccggaagaatatgccggcgcggtggataaggtggcccacgccatgaagctcgccgagtccggtctcgaactcgtggcctgcggttcctcgggtgcctatatgccgaccttcggcacgtgggagaagaccgtgctcaccaaggcttacgagaatctcgacttcgtctcctgccatgcctactacttcgaccgcggccataaaacccggaccgccgcctccatgcaggacttcctggcctcttccgaagacatgaccaagttcatcgccaccgtctcggacgcggccgatcaggcgcgagaagccaacaacggcaccaaagacatcgccctgtccttcgacgaatggggcgtatggtattcggacaagtggaacgagcaggaagaccagtggaaggcggaggccgcgcagggtttgcaccacgagccatggcctaagtctccgcatttgctggaagacatctacaccgcggccgacgcggtggtcgaaggttccctgatgatcaccctgctcaagcactgcgatcgcgtgcgttccgcctcgcgcgcccagctggtcaacgtcatcgcccccatcatggccgaggaacacggcccggcatggcggcagaccacgttctacccgttcgccgaagccgcccttcacgcgcgcggccaggcctacgctccggccatcagctcccccaccatccataccgaggcatatggcgacgtgccggccatcgacgcggtagtcacgtgggatgaacaggcccgcaccggtctgctgcttgccgtcaaccgcgacgccaacaccccgcacacgctcaccatcgacctttccgggctgcccggcctgcccggtctcggcacgctcgcgctcagcaaggcgcaactgttgcatgaggacgatccgtaccgcaccaacaccgccgaagcgcccgaagccgtcacgccgcaaccgctcgacattgcaatgaacgccaccggcacctgcacggcaacgcttcccgccatctcctggatcagcgtggaattccacggctaaaagacggagagtcacgcccgtaccaagtacagtcaagtccaatacgaccagggcccgtcaatcaccatacgattgacgggccttgtcattcacttcggatatttcgaaccacggattcatcaggcgcgcgccaacgccggtgaggactcgcgcagggagaggctatagggggcctcgatggtttgggcgggggcacggctgccggattcgacctgttggatgatggattcgacggccagtcgggcgatggcttccctgccggggttaacggtggaaagagacggcaccatgtaggccgattcctccacgtcatcgaagccgataacgcgaacatcatccggcacggcaacgccgcgttcgcgcagttcacgcagcacgccccacgccagcaagtcattcaaagcgaacacggcatcgaattgcaggccactctccagcatggtgtccaccgcgaccaaaccgtcggcgctcccccagccttgggtttcgataagcagactgtcatcacaggggatgccgcgcgcggccagcgcctcacgatatccgtgagtgcggatggagcccgacgagaaatcgtgctcggggtggggcacggcaccgactacggcgatgcggcggcaaccggcatcaagcaggtgataagtcgcggcggcggccccttcgcgattgcgaatcactacgtgcggcgcgttgacgccgaacaaacgttcacccaacagtacgagcgggtaatcgccatccaaagccgcgatatcgtcaaccgtcatcatcagagggcttaagatgagcccgtccgcgctgtgcgtgcccatcgatgcgatgctttccagctcgcgggcacgattgttagtggtggattccacgatgacgccgtagccatgttgccgggcctcggccagaatatcctcggcgagttcggagaagtacacctgccgcagatcgggaataaccagcttgagcaaccgggtacgcccggaacgcaggtttctggccgacgagttgactttgtatccgagcctgtcgatggcttccgcaatacgcgcggccatcgcctcgctcatatatggctgtttgttcagaaaattagacaccgaggctaccgaaacaccggcctcatgggccacgtccgccatcgtcactctgtttttgcctcgcacggtgaccaccctacccgactttgctggagatacgaaaacgactcccctgctacgatgagcagcaagggagccgttgggtaattaggcgctatgcgcggttttacagcttgacgacgagtacgccgttgggctggatggcggccgtgtgctcggactcgttgacctgggccagcgaggcgaccagcggttcgccttccacgtccacgaccgcaacatcgtgggtgcggttgaacaggaacacgaagtggttctcgccagtttcgtccgcacgctcgacgcgcagcacttcaccgcgatcgtcctcagccgaagtctcgatgccgagttcctccagcagcacgggcaggctcttggccaaaccctcacggccgagacgggcaccgacgtatgcggccttgccgtcgccgaagtcgttgacggtgatggcgggagcgccgtcgaaaccggtccacttatccgccttgaaggaggcgaccacgtgagcggtatcggccacggaggtgatcacgtcggcgaaatcgtgcgccacggttccgttgtccaagtcaaggtggtccatggcaccggggaaatcgttgcccatcggggcgaattcctcaacgcgcacacccaccacgtcacggatggaaccggggtagccacccagccagacgtgatccttgtcgtccaccagaccggtgtagtaggtcacgaacagcttgccgccgttcgccacatactcgcgcacgcggcgcgtggtctcttcggacaggatggtcaggctcggcagcacgacggcttcgtactcgtcccaagggccgcgaaccggcaccacgtctgcggtcagaccgttgtccgccagcgcgcggaaccacgcgagcggctcggtccaatggcgtacctcctgagtaggcgtggcggtgtgttccgtagcccactgggactcgtaatcgaagacgacggcgaccttggacttgaccagcttggtgctcagcaggccctcgtcagcaagcttgttgaggtcggcacccagctcgcacacatcgcggaagatctgggagtcggggcccgcgtgaggaaccatcgaagagtgccacttctcggcaccggccttggactggcgccactggaagtagcagatggcgtcggagcccatggccaagtgggccagggagtcgcgcaccaattcgccaggctcgacgcgatagttgatcgggcgccaattgacggcggagctggagtgctccatgaggaaccacggattcttgcgggcgatgccgtcacatagggaggccgagtaagccagctcgtcgaagtgagcttcgccaggcgtgaagtagtgatcgttggacacgaagtccacgtcgtaaccccacttgtcgtaatcgatgccggcaccgccggcggagaccatgaagttggtggtctgcggcttgggggcgatctcgagcagggcgtcgcgctcggccttgtaaaagtcgagcagggcgtcggagctgaagcgcttccagtcaagcagcttgcccgggttcatgaagttgccgtcgccgatgaagcgcggcgggatgatctcggaaaaattgttcatgcgctgctcccagaatgcggtgccccaagcgtcgttgacggcgtcgatggtgccgtacttcttctcgcaccacttctggaaggcgcgctcggcgtcttcggaatagtcgaagcggttgtggcagccgtactcgttgctcacatgccaagagaccacataggggttgtccttgtagtgctcggccatcttgcggcacaagctgagcgcgtagtcaaggaagaccgggctggtggcgcgccagtgctggcgggcaccgggctggcagacgtcgccgcggtagtcgacccagaggatctccgggtgggcctgggtcatccacatcggcggggatgcggtgccggaggcgagatcgacggcgatgccggccttaccaagcttgtcgatgacgcggtcgagccaatcgaagtcgtacacgccttcttcgggctcaagcttggcccaggagaagatggctacggagacgaggttgacgccggcctgctgcatgagggctacatcttcgtcccacacttcctcaggccattggtcggggttgtaatcgccgccgtaccagatgcggggcttgttgcccgcaagcggctgcggccacttgaactctttacgttccatgatgattcagctcctttattgaattttatcgataatctgcgtccgcgggaataaacagcccacagggctgtttgcctaacggctcagctcgtcagaggggggcttggcactattacctccctctgatgaggaaggttgtctcggcggagccgggacggagggagagaccccgccgcgaggcggtgaagacaccgcgtcggcggagccgactccatcactccttgacggcgcctgcggcgagtccggactgccagtacttctgcaggcacaggaacgcgatcaccagggggatgatcgtgatcagggagcccgtgatcaccaggttctggatcgcctggccgcccgcggtcgaggcctggtccttccactggttcaggccgatggtcagcgggtaccagtccgcgtccttgagcatgatcaacggcaggaagtagttgttccacgtcgccacgatcgtgaacaacgccgtcgtcacgatgcccggagccaacaggggcaaggaaatctgccagaacgtgcggaactcggacgcgccgtccacgcgcgccgcctccagcagctcctggggcacggcctgctcgctgaagatccacatcaggtacaaaccgaacgggctgatcagcgacgggatgatcatggcccacggggtgttcgtcaggcccaatttggcgaacaggaggaactggggaaccgccaaagcgatgcccggcacgctgatcgcgccgatgatgaccacgaacaccgctttgcgccccgggaagcggaacttggccagagcgtagccgcccatgatcgccagcagggtcgcgccgccggcgccgaccaccacgtacaggatcgtgttgaacagccagcgcgcgaagataccgtcctgataggagaacaccgtcgcgatgttgtcgaacagggcgaacgtcttgccgaagcccaggccgaacgtactggtgaagtcggcctgcgtcttcgtcgcgttgatcaaaaggtagacgaacgggaccaggcagtacacggcgaagaccgcgcacaggacggtcaacaacgtggaacgcctcgggttgttcacgttcgcgaaccccgccttcgcgctgcgcctgcgttcggcggcctcgtcggcggcgatcctcttctggcgggccttctccgccttcctggcggccttctcccgggccttgagctcgccgtcggtcaggcgaccggcggccgaagtcgttgctgcactcatcacatacgctccttcacgatcatcatcgattcctcaacacgaacagcagtagtcgtcgtcacttcatctgctccttgaggctgttgagctggacgatgtaggcgatggccatggtgatcacggccatcacgatcgccaacgcggccgcgtagttcgactggttgccggagaagctcaggttgtacgcgtacatgttcggcgtgtaatacgtcgtgatcgcattaccaggaaccatgttctgcaaaatgctcggctcgttgaacagctggaacgagccgatgatgctgaagatcaccgtgatcgccaggctgccgcgcaattcgggaagcttgatgctcttcacgatctgccactccgacgcgccgtcgatgctggccgcctcgtacagggaatgcgggatggtcgacagcgagctgtagaagatgagcatgttgtagcccgtgaactcccacgtcacgatgttcccgatactggccaacaacacgctgggggcgagcacgtcgatgtccgtgcccaggaaatcgttcaacgaacccaccaggccgtacttcgcgccatacacgaaaccccagatcaacgtcgacaccaccgccggcaccgcgtagggcaggaacgtcgagatacggaagaacctcgtgccatgcagcttcatcgaatccaacgccagggccatcaaagccgacaggcacagcatgatcggcacctgcacgcacgtgaacagggccacacgaccaacactgctccagaactggccatcacccaacaggcgcgcgtagttctcgaagccgacgaacttggtgccgccgatcatctgcttcttgaagaacgaaatataaacggcgtacacgatcggcacgatgaacacgaacacgaacaccaccgcaaaaggccacatgaatttccatccacgccaatcggccttgtgcttattcacacgagccttgcccgaatgcacgggcgcagctgcgatatcggctgaagccattcccaacccctctccttcgaaggttgaccaaaatgtttgcgttatcatcataacaccatttgtaacattgtccaatcgtgttgagtaccgtgttgaattaagggtttctcagtcactctgctacaatggtcacgaagacaacgatgttatcgttaccgtaagcgtccctaagataagcgttgtaaacgaaacaccgacattaatgagtcaagcgagggtgaaatgtcgaggccaacacaggtgtccatgcaagacatagcgaaagccgccggcgtttcgccacagacagtgtcccgcgtggcgaatggcagcgatgcggtgaaacccgaaacacgccagcgtgtcgaagctgcaatgaaacgccttgggtatcgtccgaattatgcggcccgagccctaaagcacggccgcttccaggatatcggcgtggtgatgttcaacaccaccgcgttcggcaacgcccgcatccttgattctattgtggccaacgcggccgatgacgattattcagtcaccatccagaccatgcgccacggtgcggaacgcacgctttccgccgccatcgatcgcatgcagcgtcagccggtggatggtgtcatcgtagtgctggaggaacgcatctccgatttcgtcggatacaagcctccgcgagaacttccagtcgtgctcatctgcgaatccgccgccgaccactgccccaccgttgacgccgaccagtatggctgctcgaccgctatcgtcgattacctgatgagcaaggggcacaagaccgtctaccacattgccggaccgtccacctcgcgcgccgccgaaagccgcgcccgcggttggcgagaagcgctggaacaaatgggagcacgcgtaccgagcatgtacatcggcgattggtgcgcggattcaggctaccaggccggcgtggcgttggcccacgaccccgactgcacggccatctacgccgccaacgaccaaatggcatacggcgcaatgctcgggttgcagtcagcgggcaagcgcgtgcccgaggatgtcagcatcgtgggcgtcgatgattcgctggcagatatggttccgcgcttgaacctgacgaccatgaagctgcgctttgacgacattggcgccaccgccttctccatggtccgccgtcaatgcgaaggcgagaagataccggtcggcgtcaaaaccgtaatcccgccggaactgatcgaacgcggttccgtgcgcgacatcagctgacgagcggcatgtgctggcatccactggtacctgtcagtgattcacctgccagtgatccacctgccagtgatccataggcaattccgcaccgaccaatcgactcggttgtgcaatattctgcacatttccaactatgtgcagaatattgcacactttactatactgtgatatattttgcacatgattgtcatggatatcgccgaatacgcgcggcttatcaaggatgaaaggcaacgccagggcatcagtcagaccgacatggcccaacggctgggcgtgtcacgtcgctggctgatcgaatttgaacacgcccgagtccccaatcccggattctccaccattctcagcgctctgactgagcttggcttgtcgctggatgtccgcaaaaccccgcagcccgccgaactctatgaatggtgacaccatgagcgaaaacactctcaatgcatttctcggcgaaacacccatcggccagtttcgaagaacaaacgatggcagcattattttccaatatcacgattcctatcgttggtcgcaatcacccacaccaatatcgctttccatgcccattaccgcagccgaatattcaggcgacatcccgcgtaatttccttgaggccctggtcccggaatcccctcaggcccgagatgaagccatgcgattgcatcatgcccgatcgacaagcgcatttgatctgttgcaagccatcggattcgatgccaccggcgcattacggctgtccgccgacccgcacttgcccatagatgacgattcgcttattccaatcagcgattcgcagatcgcgaatcgactacgcgcagccgcccccacaggcatccagtccgcaagcgtagacgagcattggtcggtcgcgggacagcagggcaagatcgcactgaggaaccgcaatggatcatggttctccaccactggaatcgcgcggacgactcatatcatcaagcccggcataccgacccttccacaccaagcattcaacgaacacatcaccatgcgcattgtggaggcgatgggaatacccgtggcccacacctcttttcacatctttgatggggtcccagccatcatcagcgagcggtatgaccgtatagtgtccgccaatggtacggtgacggccctgcaccaagaagactttacccaagcgctgggcattccctcatcgctgaaatacgaggaacacaacggcccaacgtccaatgcatatgcggaaatgttgcgcaagcacggtctgcccggtcaggccgaaagcaatatccgagccttcaccgacggcatcctcgccagttatctcgtcggggcaacagacagccacgccaagaactactcgctattgctcgatggcgcgtccgtgcggcttgccccgctctatgaccttgcttcggtgttcccttatttggggcatggcaagcagatcataaatgccactttggcgatgaacatcggcggacgccgagatcttcttcaattacgccgcaaacatctggaacgattcgcacagcggatgggattagatgaggaatccgtgattttacgattccacaccttggtggataggctgccggaggcattcgacagcaccgtgcaacccgctcacgacgttatcgcgagcattggtgcgcaggaattcatcgatagctatcgcaagcgcatcatgatggtgtacgacgatgcaatgagctggatggccagtcgaaagggacagtgattcggacgggtggggattggtctcgccatccccccctaagaaatcagatcctaagcggcacacgggaaacgaattcgcgcttctcgcctgttattggatcggtgaatcgtagcacacgcgccactaattgcagcggctggctgaaatcgtcgtaggggcgtgtctggatgcgcgggtagaagtcgtcgcccacgatgggcaggccgagcgaattcatgtggacgcgcaattggtgggttttgccggtgcgcgggtggagtgtgtagcggcagatggggtgatttcccggatggggaccaccctccggcgcttcgcgccacctcccgccagcgggagggaaacagaggtcgccgcgctcgatgagggtttcggcgttggccaaacccggttcctcgaatgcggccatcgtgccgtgttccttggtgatgtgcgatcggcgcagcaatgggaacgggcgtggcggttcgacctgcatgatcgtgccgaatcgcgggccgctgatcggccggcagggtgccaggcattcatagatcttgacggcctgccggttctggaacagcatctgatacgcgccgcggcaggccgaatcccgcacgaacaccaatacgccggcggtcatgcggtccaatcggtgcgctggcgtgatgtccggctcccccagccgctcacgcaatcggatcagcgcggtctgccgataccacatgccgcgtggcatggtggccagaaaatgcggcttgtccaccacgatgatccgctcgtcctcatacagcacgtccatctcaaacggaatatgaggctcgtcaatcacataccgatgtggcttactcaacggtcacggacttggcgaggttgcggggcttgtcgacgtcgtagcccttgagctttgccatgtccatggcgaacagctgcagcggcaccacgtcaaccagcgggctcatcagcgttgggcaggcggggcgccagaacaccacgtcagcgtaccgttccacatccgggtcgccctgctcggccacggcgatgatgtacgcgccacgagccttgacctcctcgataccagagatcaccttggcgtgcaacacattgcggccgcgctgcggcggcacgatgaacaccacgggctcaccctcgtccaccagcgcgatcggtccatgcttgagctcgccggccgcgaagccctcggtgaacgtgtaggcgatttccttgagcttcaacgcgccctcaagcgccaccgggtagcccacgtggcggccgaggaacaagaaggagttggcgttcaccatgcgctcggcggccgcctggatggtcttgggctgggtgtcgagcacccactggatcttgcgcggcatgtctttcagggagtcgagcatctgatgaatctcatcgcggaacatcgcgcccttgacctgcgccagatacaggcccagcaggtaggcggcggtaatctgcgccacgaacgccttggtggatgccacggcaacttccgggccggcgtgtgtgtagagcacggcgtcggattcgcgcggaatggaggcaccctgcgtgttgcagatggccagcaccttggacccctgttcgcgcgcgtggcgcagggccatcagcgtatccatggtttcgccggactgagaaatggccaccacgagcgtacgcggggtcagaatcgggtcacggtaacggaattcgtgcgcgagttcgatttccacggggatacgcacccagtgttcgatggcgtatttggctacctggccggcgtagctggcggtgccacaggccacgacgatgattttgtcgatggccttgaagtcgtgttcgtcgatacgcacttcatcaagggtgatgtcgccattcgtgtcgaagcggccaagcagggtgcgctgcactgcggcagggtcttcgtggatctccttgtccataaaggaatcccagccgcccttttcggcggccgaagcatcccaatccacggtgtaggtcttcgggttttcgaccacgttgccgttgaaatcggcgacgatgaccttgtcggcggacacgcatacggcctgatcctggtcgacttccatggcgcgcttggtgtaggccacgaatgcggcgacgtcggaaccgaggaagttctccccctcgccaaggcccacgaccagtggcgaatcatggcgggctccgaccacgatgtccggctggcggcagtcggtggccagaatggtgaacgcgccttcaagcatgcgggccatacggcgcacagccttgaacaagtctggcttgccttcgtccgcgataatcttgtccacgatcttgccgagcagcttagcggccacctcagtgtcggtggcggaggcgaatcggtagccttcggcttgcaggtcgaaacgcagctgagaggcgttttcgatgatgccgttatggatgatggccaccttgccgtccatactggtgtgcgggtgggcattcacgtcactcggctcgccattggtggcccagcgcgtgtggccgatgcccaccgtggcgagcggcatcggcttgcgctcgatgtcttcgaccaggttcttcaaacggccggccttcttgcgcacgaccaccttatccatgccgggcgcggtcagcgccacaccggccgagtcatagcctcggtattccagacgttccaggccttgcaggcagacctccaaaggcttgccgcatgccgtttcaatatttcccgcgtatccaacgattccacacatggctcaccagcctagcggacgattattgcgcaaagcgaatccaacccgccgcctttgcaggattggaacatgccccttcgtgaaaagcgtacgctgagttcatcagcgtacgcttttggagctgcaacaacgagccttcctacagcacgtgctgtaggcggagccgtaaagcggggagcccagtgggctccccgtaggcgacgccgaagcacgacagtgctgaggtaatataacagccttcctacagcacatgctgtaggaagtccttaaacctaggctcggtggggtggtcgatgatgtcggggccgcccttttctacgactacgccgccgtccatgaacacgatctggtcggcgacttcgcgggcgaagccgatttcgtgggtcacgcacaccatggtcatgccttccttggccaaggaacgcatgacgttgagcacttcgcccaccagttcggggtcaagggcggaggtcggctcatcgaagagcatgatctccggcttcatggccagagcacgggcaatggccacgcgctgctgctggccacccgacagctgggaggggtaatagtccatgcgatcgcccagaccgacgcgctgaagctcggccacggccaggtcacgggcggctttcttggactggtgctgcacgtggatcggggcttccatcacgttctccagcgcggtcatgtgtgggaacaggttgaagcgctggaacaccatgccgaggcgagagcgctgtgcggcgatctccttatcgtccagggtctgcagcatgtcctggccgtttttggtcacgtgcttgtagccgatgagttcgccgtccacctcgatggaaccgccggtcagggtttccagctggttgatcagacgcaggaacgtggacttgccggaaccggagggccccagaatcacggtcacagtaccgggcataacggttagatcgatgcccttgagcacatgcagcggcccaaacgccttgtgcacctgcacggccttgacagcaggaatcacggaaccgtcagccgccttgcgcacgaccggggcaacactggtgatgtcattcgtagtcataatcgcgctcccgccttatgcattcaatccgacaaatgtggtctggttgagcttgtccacgtcatccttcggttcaccgtcggtcttacccggcaatggcgtctgcttgcccttggtgcccaccggtcgggcatcgaagcccttgccgaagtgcgcctcaaggcgggactgcacaaccatcagaatggaggtgatcagcaggtaccagaagcaggccacgagaagcagcggaatcggcttgtagatacggttggcgatggcgttggtggcaaactgcaactcgagggtgaacggcacggcggtgaccagcgaggtggtcttcagcatgccgatggtctcgttgccggtgggcgggatgatgatgcgcatggcctgcggcagcacgatgcggcgcatgatgagcgtgcggttcatgcccagcgccttggccgcctcggtctggccggggtccacggcttcaaggccggcacgcacgatttcggacaggtaggcggcctcgttcagggccagaccaatccatgcggcgttgaatgcggtgaccaccacgttggagtcgatgctccagaactccaccgaggtgaacggaatgccgaggctgatcttgggaatcagcacggcgaacagaccccagaaaatgagctgcgtgtacacaggcgtgccgcggaagaaccagatgaagaaccagctgacgccgcgcagcaccggattgatggatttgcgcatgatggcgagaatcaccgacaggatgatcgccacgaccatggagatcacggtaagctccaaggtatagcgaatgccttcaagcacgttctcgtcgaacaggtacttccagacggtgggccaatccagtcgcggattggtaatcaagccttgaatgagcatcgcggcgagcagtaccacgatcactgcggccacaatcgggccggggcgcttgaccggcaacgccttgatgcggttggggatgttcagtccctcaccgtcgacttctttcttcgccataatctggttccttggatgtgttaggcagcctgaactgcaagttgcaactagcgttgaaccttagtgcacgaatggggcgactgtgttacaaacagtgcgccccattcgaattttcgcgacagcttgtcgactattcgacggccgggttgatttcggccttgtccagtgcgccggattcgacgccccagtgctggagaatcttagtgtaggtgccgtcgtccatgagcttttgcatggccttctgcacggcttcggcggtctgggaatcgcccttcttgatggcgatggcgttcggcacttcatcgaagtccttgccgagctgttccagctgaccatcggtctgggcgatggcgtagccgacaaccggggaatcggcgaagaagacgtcggccttgccggtcaccacagcggtggtggcgtcggtctgctgcttggaggactggatggtgatgtctttcttgccgtccgccttgcactgcttggcggtcttgttgatggcctcttcctcgacggtgccggtctcgacggcaacgttcagaccgcacaggtcgttctcatcgacgttcttggggttgcctgtggccactgcatagcccatgcctgcggtgaagtaggagacgaagtcgacggattccatgcgctccttggtgatggtgaaggcggcgatgcccagatcgtacttggagccgatggccggaatgatcgtatcgaagttggaggagacgatttcggtctcgagaccgaagatgttgcccatggcgcgggcgagatccatgtcgtagccgatctgggtcttgccgtcggcgtcgaggaatgcggccggggcgtaggaggggttggtgccgatggtgagcttgccgtccttggtcacggattcaggcagcagtgcggcgatggtgtcatccttctccacggagctgacatcgtagctggtgatggtggcggcatcggagcccttggtggaatccgtaccggcatcggccttgtcggaggtgccgcaagcggcggtggcgaacagcatggccgagctcagtgcaatggccataatggacttcagtttggtggactgcataatcgtttcttcttctctcttacgccgcttcaacggcaacgatcaacggttaagcatatttatacactacagtgcatacatatacaaaaagactcccgccgcagggcaacgggagtcttcatagtaaccgaaactactcgacggacgggttgatctcggccttgtcgacggcgccggaagagacgccccacgtgtcgaggatcttcttgtacgtgccatcatccatcagcttctggatggccttctgtacggcctcggcggtcttggaatcgcccttcttgacggccacggcctcaggggtcacaccaacgtcctcgccgagggcctcgagcgtatcaccggtctgcttgatggcgtagccggcaaccggcgtatcggcgtagaagatatcagccttaccggaagccacggcggtagtcacatcggtctgcagcttggaggactggatgtcgatggcatccttaccgtccgccttgcactgctcgttatccttgttgacttcctcttcctgggtggtaccggtctgcacagccaccttcacgccgcacaggttcgaggagtcgaccttgttcgggttgcccttctgcaccacgaacgtggaaccggccttgaagtaggtcacgaagtccacagcctccatgcgttccttggtcacggtgaaggaggagatgccgatgtcgtacttggagccgacggacgggataatcgaatcgaacgtggaggagacggtgttttccttcagtccgaacactgcggccagcgccttggacaggtcgacatcaaag

SEQ ID NO: 121 - DNA, 11943 bp, Unknown
  R206_24m  MAG No. k141_33798
ggccagcgcggccggcacatgcagcacttcgtccacttgggcgcggctggcctgggtcaggcgacggcgcgtgtacgtggacagcgcttccaggtaacgccgcgaaccttccgcatacagcacgccgagcgccagcgagcttttgcccgaaccggagacgccggccacgcccaccagttcacccagcggaatgtcaatgtcgatgttcttgaggttatgcactcgcgccccgcgcacttcgatcgtctgcggccgttgactgttggtcatgctcggcactgctccgccgccgcgctatctgacctctgttcaagtgtcacgccgtcacctctttctcgacttcgcccttggctgccgccgcctgagcttcatggtctccagtatcatcacggccaacgacggcggccgaacgccggacgagaatctttcgtcttgggcaccgtccgccacctgcaattcgaactagctgaaccagcgtgacgatattgtcggctatcgatctgccgtgatcgtaatggacatcgtcgtccggaagcacgtcaccggttccgagaggagttggcggcgcgctttcataagggcacacaatcccaagatcacacccacagatcaataccgatcaatactcgtacgtgatcgcggggtcgccgatggtcggcgtctgatccagtttgaggttggccgagccggccgcggtggtcacgtcgtattcgatggtcaccgtgtcctgaggcgccagggagatgtcgtccatgtaggtcatatggtccttggcctgcacctgtgcgaaggaactgccgttcgacgccgacacgttgctgacctcgcctccggccggcgtgtagatgaccacgcggttcaccgccacgcctcccttggcgttcgccgtgatgtattccggcagggatccggcctcgcccggctgcagggtgttggtgaacgaatacgtaacgtggtaggtgttgtcgccggtcctcttcaccgtcgacttgcgctggatgtaccagtccatcttcgaggcctgcatctcgttgaagtagacgccggtcaccgggttcttcgcgtcgttggtgatctcgccggtgacgccggcgctgcgcagcaccgcctgatcctcctcgtggaacgaccagaagtacaggtgccgttgctcggccatccggagcatcgtcttggcgacggtcatgagcttctgcgtgttcatgtcgctgaacaggtgagcgaccgcctgggcggcggtctcgctgaagtactggtcctgagcagagggcgtcagttccttgtaggcgccgttgagcaggaattcggcggtgttcgacccgttgagcacgcgcccgtcggacagggtcacgtcgccggtggcgccgatcatcgcctgcagcgcgacggggtcgagcgacatcacgccgtcggacgatccgccaaacggagccgcctgccagaacttctgggccatggacgcgacgcgcgggaagtccggcgtggacgaaagattatggatgacttgaccgaagtacagtccgctgtacagcgtgccgtcaccgtcctggttgacgtcatccaacgcggcgttggaggggaactcggcatccgcgtggaactcccccaccgcgatcttgccgttgtccgcgctgaaggaaccggccgaaccgatcaggccgccggttccgcggatctcggaattcgtctgggccagcagcacgtagttgcgggcgccgttcgcaccgaggaagttcggcagcatgttgagcatgccgctcaggttttcggtcacctgcgccagggcggccatctgcgtcttgccgttctgcagcgcgttgttcaccacgccgagtttggcgtcgggaagatcctggatcgtcctggcctgcgattgcacggactggtcgaccgtggcaagctgctgcgccgcggcgatgatcggctccatgttgagctgcccatcgccactggagaggctggcaccggtcagtgtggtgacgaccttgcccagctggggcagcgtggtctgcgcgaagtcatcgatggtaccgatggcggtgcgcgccgtcttcacgtcaccgccgaccacgggcatcttctccgccagcgtccacagaccgccactgacatcctgcttggcggcggccgcctccttctggatgtagctcacgtcggacagcgccttgaccatgtcgtcggtggaaccgtccttgatgaccttggccgcgttgacgacattgttgaggtgcgctttggcgctcatcgccgacttgtacagtttgaatccgctgaagccggccgccgcggcgcacacgaccagcaacagcagcacgacgagcagcgcgttgcgaacgcgatgggttgtcctggtgaccgtgcgtgcgtgtgatggcatgggctacttccttacgttatgacatgtatcgatactggctggctgcccggttacgctttcgctggacgggcagcccggcggacggcacgtagcagtgcacgacgtgcgcaccgcgtatgatgccgggggttgtcagcgcggctgactggggtggccgcggaccggtacctggacttgcagctgccctccggcgatgcgtgtcacctgcagcggggaacgtccgctgcagttacggctattaccggccagccgacagcaatcgctggtttagttgttggtcttttccggctggtcacccgttcccatgagctggcatgcacctttcagcgagtatctctcctaccgcatgccagtctacccatgcccgcgggataacccaaaaagccttgcaagaataccgaatttctttacctttggccctgatcgttcgacggctcgcaagacggcgtaacctcatccaaccggccgatccccggaggcggaaccagcggaatcctcgtgaccgggaatgcgatcgttcccgcttgcgcgatggcggatgcgcgcaacgccagccacaggtacgagaccgactacttccgtacaggatccgttgtggtcgcattccatcgttcagcgcaacgggccataacgctctaaacgatgccagccatgtacaacggcacatctcggatcggccccacatcccgataccggtcagcagagaaacgataagcaagcggataaccgtgcctcttctgcatgattacaagcgatttggtctgtcgatgagtcccctccttcacttccacgggcaccgctttgccattcccctcgaacagaaaatccaactcaccactggagttctcggccgaccagtaatagggtgaatggccgttcatcatggtcaattgctggcatacgaattgttcggcgatcgaacctttgaactctcgaaacagtgcgtcaccttccagcaacacacgaacattcagaccgcccaacgctcctagcagccccacatcgaggctgtacagtttaaacgcagagccgtctgcatatgccgccaatggttcaagaggcgcactcacccgattcacgcgcaacgccaacgacgcatcgacaagccactgtatggcactctcaaaatccttgccacgtccaccagctcgcaccacgccgtatacgaacttcttgttctctttcgccaactgggaaggaattgaatcccatacctgattgagacgaagcgtggtgacggcgggactatcacgcatatcaacatgtttggagaaatcgtcacgataatcggagaccagactattctgcaatttacgaaccgccgtgaagtcaggattcggcagagtactggcgaacgcttcaacgatctccggcatgcctcctgtatacatgaaataccgcagccaagtcatgaccctgtcatgcattacgttaattagcggaaaatccttggactcaagcatttcggccaaggcacactgtttgcacgcatacaggaattcaacaaaagacataggatacagcttgagtctactgaccttgccaaccgggaatgaaaacccaagatgcatggcgatgccaagcgccgatccagtggccaagacgtcatactccggggcggcttcattgaacatcttcagcgaagtcatcgccctcggcacctcctgtacctcatcgaaaatgacgagcgtatcctcgggagtgatcctagttccggacttgatcgacagtgcgggaatcagccgttccacattcagatccgcatcaaacaacatacgcatgttggcattgtcgaaaaatgtgacacaacagcaatacgtaaggtacttgacaatctttgatggagtcgtatactcatatctgtcaggtacttgacataattactgaagaggatgaaaaagacacacgaccagcgacgcttcgctcgcttccttattaaaggagaccggcatgaacatcacacatgacatgagcaacgacctcaccgaatacgacccggaatcccgtcaagtagacggaccgaaccccatcgaaaaccgcatcagctcctccgcggcccgtgttcccgacatcatcagctgcacttccggcatcaccgtccagggccgccaactccactcgttcgcgttcaccacggacgcggccatcatccgcaacaccaatgccgacgccattctcgccgtatatccgttcaccggcgaaccagtcatcacccaggccctactcaccgtggcccaggccccgctgttcgtcggcgtgggcggtggcaccaccaccggcccgcgcgtcatccaactcgccatgatggccgagatgcagggtgcggcgggcgtggtgctcaacgcgccggcgccgccctccacggtgtacgacgtggcgcgcatcacgaacaccccggtcatcgccacggtcctgacctgcgatgacgaattggacgagaaaatcgaggccggcgcctccatcatcaacgtggcggccggccgcaggacgcctgacgtggtccagcagatcaggcagcgtcacccctccatcccgctgctcgccagcggcggttcgaccgacgagtccatggccgaaaccatcgtggccggcgcgaacgcgctgacctggaccccgccgaacgcgcaggagatgcagcgctcgatgatgacgcgctatcgcggcgaatccaccggcgacaacatgcagcactgacgtaaggattccgaacatgagcagtatcagcaacaacgccgccgtaaccggaaacgacgcggtcgacgacgtaatggccacgagtcaatcggcggagaacggcacaagccacaacaccgccgacggcgatatcaagaacgatgttctcagcagtttcatcagcattggccgcatcatggcgtatcgcgcgatacacagacggctcgtctcccccggcgccaaatcgccgcgcggcgaacatgctttcgacccgcgccgcggccaaggccgcgtcttggccacgctcagggaatccgaccagaccagccagaaggacttggccgcgatgttcggcatgagccgccaggccatggccgaactgttgaagaaactggaggccagcggtcacatcagccgccgtccatccaggcgggacagccgcgtcatgatggtcagcctcaccaaccagggccgcaaggccgccgatctgctgggcaaagcgcccgaccagacctcctccatgctggactgtctcaatgaaaccgagctacaaaccctacacggctacctgcagcgcatcatcgacacctcctccgacgacctaccggcctcgaccgccgaggatgtcaaaaagtgtgagctgcttatcgaacacctcaagcgcaggcgaatgccggccgaccgcgcatagtttgcgaacagcccgcacgacttgtggccgcataagcatgcggccgcacaacagtccagccgcacagtcatccagccgcccctacaaacacgcccgattcaccatttgcacgacatcttgcaccaaaccctactttgaaatgcggtattttgcgccaaaaccccattttgaaatgcggcattctgcacatacaaggcagaaaatgctactcccataagggattcggaaaggaactgccatgcttgagcgcaagatctcggacgatctgttggaatggaagctgatcggcaccggcaaagcactgctgctgaccggtgcctgccaaatcggcaagagctacgcggtacgcgagttcgccaaacacgaatacgctcattaccttgaaatcaacctgtacgagaacaagcaggaggcccgcgcgctcgcatcggcgaatgacgcgcaggagttcatcaaccgacttaccttgttctcaccttcaacgctcactcccggcggtacattgattttcatcgacgaggtgcaagaggcaccggatgtaatgaccacgtcaagtttgatgtaccggcgtcgcaattcgacgatttgacgtttcaccacatgtcgctgattgcgaaaaacagcaagtcgtgattcgagcgtggcatcaccttgcttagtcatatcaacaaaatccttgatctctgcgagactcatgcccgtggatttcagacattcaatgagatcaagcaattcaagatcgccgtcatcgaagcatctccgtccgaaaccagttcaagcgataccgggcaaaagaccttggccgtcatagtagcgcaatgtatgttcggacagcccagtctttcgcgacacctgaccgatggaatatcccatgccaactcctttccctcagtcgagccagtgtgagtccagccatattcacggatgtcctatgcggaacggacactcttcgactgcctgaaccttgcagcccaaacatgcatcaatcagcacaaatcacagacagtgggccatatacaacggcagcttgatgcgttctccatccacttcgagttggcggggatgcagaacgtattccttgcccaatcgttgggcataccttttgcggaatttgtcgagcgaagatacgccgtatcgtttcgtggatttcacttcgatcgggctgatgcgaggcttcatcgcggcattatcgtattcccgaacgatgaggaagtctatttccatggttttcgtggcatccgccctatccgagcgcgagaagaaatacagtttgcgcccattcgcccggaattgctgagccaccgcattctccaccagcatcccttcgttgagcgagagtttatcgaacagaatatcccggtacacatcatccggcgttgtctctcgatcggcaaacgcctgcgacaccagcaaaccggtatccgccatatagcatttgaatgaatcgttatcttcgtacaatcccagccccaccaaagggtcagtcgaattacggcacaggttcaccaagcgggcgtcttccaaccagaagaacgccgaatcgtattcacgagatcgagcccccttatcgaccgatgccagagtgaatcgtttctcatgcttggacagctgccctggaatctgagcgaaaatgccccgcacgcggccggcatcgccattggcgaacttgccgatatcatcactgtacagctgcaggatgccacgcttgatcaaatccacctcgccaaaatcgcgctgctcgacataatcggcaaccgcctgcggcataccgcccaccagcagatattcgcgccacagcctcatcccccgtttatgcagagcatcaggcaacgggaccagacgctcgaacgatttgcgaatcgtttcagcaagcagctcctcccccatggcccagcagaactcctcaaaatcgagcggccccatgtccattttccgttcctcggaggggatgacgatattcgccacattcctcttgatggagatcagcgaaccagtttccacatagtcataccggccatccgcaaccagatatttgatgagctccctcgccgccggataccgctgcacctcgtcgaaaataatcaacgattcacgctcgtacagtcgcttgcggtaatacgcagacaacagcatgaaaaatgtgtcaaagtcatcacgctggttttcgaagatgtcgcgaacgtcgcgcggcaaacgtgtgaaatcgatgagaatatatgacttgtactgagtgcggccgaattcctcgacaatggtgcttttgcccacacggcgagcgccttcgatgagaagagcctcacgcccacccgctttttgtttccatgcgatcagcttatccagcatcttgcgcttcaacatgagcaatcacctcattacacgaaaacaacagtataggcatatgctattctacacgaaaacagaggtatagaggtagtcgattctacacgaaaacaacggtataaggacgcaagccgaaccggctcacccccaatcccccccatcacaccggcgccctgttcgattgtgcgattttgtgcgaatggctcacacggttcttggtgagaaccgttcgctgcgtacctgaccctagaaccggatcagcgccttgatgaccttgcgctggtccatcgcctcgtaggcgtcctggatatggtcgaggtcgtactcggcggtgaacacgcgaccggggttgatctcgcccttgagcaccgcatccagcagaccgtcatcgaggtcatagtggcgcacgggagccgggccgcccttgatgccgatgttgccgtagaacgtgccttcggcgctgatctccacgtcgtgcggcaggcccacacgaccaatcacgccaccgcggcgaatcaggccaatcgccgtgtcgaaggactgcttggagcccacgcattcgagaactgcgtccgcaccatagccaccggtcattcctagcaccttgtcaatagcttcttggctgcgctcgggcacgatatcagtcgcaccgaattcgcgggcgagcgccgcgcgatcctcgtgacggctcatggcaataacgcgcgtggcaccgcgcattttggcggcaatcacaccgcacaggccaactgcgccatcgcctatgaccacggcggtgtcaccgggcttgacctcggcagaaaccgccgcgtgataaccggtggacatcacatcggaaacggtcagcagcgaagcgagcgtcgcgtcatcgtagtcttccggcgaaccgggcaccttgaccacggtgccgtccgcctccggtacgcgcaggtattcggcctgacaggcggagaagtagccgccatgcggacacacggattcgaagccggccttgcataccgggcacttgccgcagctgtatgggaatggcacgaccacgaaatcgccgggcttgacggattcgaccgccgcgccaacctcttcgaccacaccgatggactcgtgccccacctggctgtgcgcggcctgtccgctcagcccacggaagaaccacaaatcagagccacacacgcatgtgcgcaccacgcgaatcacgatgtcgtcatcctgttcaagcgtcgccttcggcacttcttccacggccatcttgccaggctccacgaaaatcgcagctttcatggtttcagacatacgttcataactccttgttttccggcatcgagcgcttaaggcccgctatcctcgtgttctattagacaataatcgccttgcattaaccaatagccataaaccatgtttcgccatacccatgaggtatggcaacaaccgagcaattcactgcgataggccaatatccgagatacgctcactgttcgattcgtcgccatgagtaatctggagaaccggcgatgggacccgcctgaacttgtttcgaaccgcacactgctgatagttcctacacacgatttgacattgcatggaatcgttgtgtcttcagtaggattcagcggtttcaggaaaggctattatgggctcgcaatccccatccgcagatgcccggccgggcacgcgcacggccactcctccggcgcacaaactccccgatatccatcttgatattgtgttggtcgtcttctgcggcggtgccatcggcaccgcgattcgctatgcgttcgcgcagattcccgcagccggcagcttccataccggcacgtttgtggccaacatgctggcctgcttctgctatgcgggtctgaccgcctatttggccggctcttcccggttcgacacgcgtgccaaggagctcaccagccgtgggctcggcatgggcgtatgcggcggtttgtctacgatgtcgacgttggcattggaaggcttcaccgcgattcgcgacggtcaggtggcggccggcattgcctatctactggtgacgttcgcgctgggtctggtttgtgcgtctgccggcgtgtgggcaggaacgcatctggccggctcctcgaacgcatccgccgaagcgtccgctgatacgaatgccgctacgaccagcaagggaggtaaggcgtgatgaccgtattcctaccaatcttggtctgcctgtgcggcggcgtaggcgcctcctgccgctatctgcttgacgcgaccatcaaaacgtattggcaacgcgcattcccgctgtccacattcaccatcaatctcatcgccggattcctgaccggtctggttgcggcgctggcactgggcgggacacttgatgaaccgtggcggctggtgctggccaccggtttcctcggcggattctccacgttctcgaccgcgatcaacgaaatggtgacgctcttccgcaaacgccgctaccccacggcaacggcctatctggtgctgtcgctgggtgtgccggtcgttgctgcggcctgcggttttctcgtctgaccgccacgacgattcccgacgcggtcagcggtatcatcgcgaggtcgaacgtcacaggtacatccgggaggtatatgggcatggcgaacaatggagcggatgtgaagcacaatcagggcgcggacgtcacgaatgcctcggccacaacgaacactgcggaaaataccgtgggcacggcaaccccgaagcaaaatggactcgccgtgttgggcaagtatatgggtgtttccgccacgcagaccattgtggagtatgcgacgttcgccatcctgcacttgatcggcgtgccctcgcagatctccaacggtatcgccgtggtgtgttcggcgacctacaacttcgtgatgaaccgcaacgtgacgttcaaatcgtcaagcaacttcacccgttccgtgatgcttttcgtgctgctgtggatctggaacttcacgttcagcacactgctgatcggctggatgccgggcgcgacggacctgagcccgtatgtggtgaagttcattgcgatggcctgccagttcggctggggttatccgttgtgcaagtacgtgatttttaggtgacgcattccaattgctcactgtcgttcgccttcgcctatttgtatttggagcgcttatcagaagaacagcatcgcaacacctgcggcgaagcacatgagcagaatcgatgtcaggaagctggcgagcatcggcttcttgcccttggaagcgatggccttgaagttcacgttgatgccgagcgcggccatggccatgccgagcacgatgtacgcaaagtccacgagctgcggggtgatggaggcgatgagcggcacgaaggtgccgatgatcgaagcgccgatgaagccgagcatgaaccacgggaaggccacagtcttcttgccggtgttctccacctcggagtgcttcttctcccaccagatagcgatgatgatggccgcgaacacgagcatgagcacgcgggaaagcttcatgatggtggcgatgtccaccgcgccgaaagcgtcgccggcggcgaccgcgtgggcgatttcgtgcagggaagcaccggcggtgatgcccagctggtccttggtcatgccggccagcgggccgagcgcgatctccagcaacgcgaacacagtacccataatggctacgatggccacggccatggtcacgtcgttgtccttctcgtcctgcttgtcctcaggcaccttgatggaaccggccagacccatgacggcggccgcaccgcagatgccggtgccaccggcggtcaggatggcgagcatcgggtcgacaccgagcttgcgggcgatggcatagcacacgatgatggtcagcgtgacgac

SEQ ID NO: 122 - DNA, 9718 bp, Unknown
  R206_24m  MAG No. k141_35057
ctcgggcggcgggcatgaatgccattggccgtcggtgtcgagcagtatccagccgcgccggcagctgtacacgggcacttggcttggctcggggtcgtagcttttgagcaggtagcccaatgctcgggcctgttcggggtgctggtggacccatccgtggcatccggtgctgttgtccgtgccgcacacgtcgatgacgttcgaggggctgtgccgttcggggtcgccgtatgtctggctgcggcgtttccggtggtggtggctgctaccgggccattcgccgccgcgtaggtatcggtcgcagacgatgcaccggttgttttcacggccttccacgaggcgcagggtcgcagctgtgggttggtcgctcatgcttgatgcctttcgttgatttccgtcacgagccgttgcgccacggtctccggctcttcgccggttttgacgtgggcccagaacgtctgttcgacgctgtccgtccacgagccttcggggacttggctgatggcgtgggtttggagccattggcgggtgacgccgccccattcggtgcgtttcggcacgctttggagccattgcgtgtattgccggttttcgagccatttgcgcatcgacggcacgaaccggtcgccgtcctggcgcacggtctgggcgtagcggatgacggcgccgagcagctggctcggctcggcctggggcatggtcgggtcgctgccgctggtgacggcctgccacaggttttgggcttggtcgcggctgccggtatggctcgggtaccggtcccaggcgaacgcgaacgggtcggcctcggccaaggcctcggcttcggcgaggctcggcaccggcctggcgtggccggattcggccacggcttggctcggctcggcgttcggtgcggagggggctacaggggaggtaaggctaggtatggttaggttaggaccggttgcttcgtttgcttcgaagcaattgcttcgttttgcttcagacgtttgcttcggttttgcttcaccgtttgcttcgtcttttgcttcatggtttgcttcggtcttgcttcgcggtttgcttgaagcacttgcttcgttttgcttcgaagcatttgcttcgcgtttgcttcgccgagactcgcccgaagcgacgccgccggcatgcccggccttggctcttttctccttgagttcgctgccggaagtgccgccgaatttcatcagggtgtcggcctcgaccaccatccaccggccggcggcgagcgccggttcgagcattcccgcggcctccagttccgtcacctgccgtgcgttgcctttcagcgagcgcacgaccgtgaggtcgaatgcgccgtcgaatgcgggaaatcgcagctggtacgcggtgtgcacgcagagtctgacccataggcccaacgcggcgtttgataccgtgccgggcatggtctgcgggctgaagttgagcccgtcgtctatctgggtccatgtcatggctcactacgcctcgtcgtcttcgggcaggaaacacccgttgagtgccttgttttcctcgttgctggtggggtatccgaggtctgcgagcgtgtggtagtaggcttgggcgatggtgatgtcgcactcgtcggcccatgtgccgggtttgatgagtgcttcgatctgggcgcacaggatgagcaggagttccctgttcgcggctccctcgacgtgctggcggcggtgcagttccgcgaggttcgtttcgcgccacagtcccctatcgctcgtgtcgtcgcatggcagcggcgtggcggcgagcaggttgtatgcgtcgagcacgtggtcgaggttgttccattcggcccctgcgatcaggccgtcgcataggttggtgccggtcagcgcgagcaggctcagacgggtgttggccttgcgcaactggccgccgttgaatccggtggcgtgcttcctgatccagtccgtgcgcagcgtgtacgccagcctgtcgaattccttgcgggcggccagcgcctcctggaatgccgcctgctcccgttccctccgctcgctcttggcgtcacgttcggcgatctcctcaggcgacaattgcgggaagcacaatacggtgcgctcggagaatcggatcaccggcccgccgtacgggttcttctcgcgccactgcccataccatttctcgaactcgtcgggctcgccgctccacacgtcgtagaaccggtagccctccggcgtcgtccacgtcgaagccgagacatccacagtcaggcccagagcttcaagcgctgttctcatgctctgctgccacgcctcgacgcgaacccgcgaccgcagctggccacgcttccaatcccagttcttggtgcccgccatcgaagccaactcagccatcatgtcgggataagcctcgaactccgcaagatcacccaactgggaaagcgacaactgagcgaacgcctccgacccggaacgcacatcggcggggatacgcgcgatccgcaaccggccacgcacgaacgactccgaacggcccgtcttcgccgcaagctcacccacaccggcacccaggtcaagcaaaccctgatacccgtcagcctcctccaacggcgtcaaatcggaacgctggcagttctccaccagcatcagctcacgctcggtcttcgcatccaactcacgcaccacacacggcacagactccaaaccagccaacttgcacgccgccaaacgacgatgaccaatcaccacacgaaacaggcgctcgccgtgctcctcatggtcgggggttaccacaagcgcctgctgcaggccctgctccttgatgctgtcggcgagttcggtgacatcgcccacgtccctgcggggattgttcgggttcgggatgaggctctttacgttgatatcgatgatgttgatagccactgaatcgggtcactgctccttgatcgatagattctggtgtacgggcaggtgcggcatgcgcttcctgcgccggcgttggcgctcatgctccagttgctggcgtccgtgcttgcgtttgctcatgattcagtcctccttgatttcaccggtatccggatccacaccagacgtgggcagatcacgccacggatccaacaaactgcgctcgatatccgccttcaccacacgctcgcgggcctcgaccggatagttaatgaggtcgttgaccgcgttggcggcgtcgaagatgtgctgcgagagatcgcaggcgtcgtacaaggcatcggtgatggggtcgatgttcttgtatttctcgatgtattcatccttggtggccaggtcgagcatcttgctggccgcgatgcggaacgcggccgcggcgtccttcatgcgtgacgccttggccgtcagggcgagcaacatgagcggcgtgatctcgtcgggaatcagcgcgtcctgcacgccatcggtctttttctttcgtgacattgaatctccttagaattcggggtcttggctgtctgatgaaaaatcgttggaagcgccgaacgtggcgccaggagaggcgggtgccggctgagcccacgggtcaccttccggcatgccggggttctgggccggggaaccgttctgccagccttgttgctggttggcgggtttggccggatccccataggtcgagccaccggaatagccgcgaccggattggacacggttgacagcggcggtcgcatacctcaatgaggggcctatctcgtcgacggtcatgtcgatgaccgtgcgctgggagccgtcctgcgcctggtacgagtgctgtctcagtcggccctgggcgatcactcgcatgcccttcttcagggactggacgcaatggccggccatgtcgccccacgcggagcagcgcatgaataatgcctgcccgtcctcgaactggttggtctgccggttccagttgcgcggggtcgaagcgatcgtgaagctcgccacggtcgcgccgccgcccgtggtgcgcagctccgggtcggcggtcaggttgccgatgatcgtgagagcgctctccccggccatcacgcatcaccgtccaacgcgcgcagcagggcaacggcggcggaacgcacctcgtccgccaaatcgaacagctcccagtcggcgtcgtccatcacgccgtccgcgagcatggaagcggcgccgtacgcctcatgcgcgagttcacgtcgcgcatcggccagctcggcctccacatcggacgtcttggattgtgcgggcggtgccggcggctgggcgaaggcgcgcaccaatatcacgtcgttggccttcagcgcttcggcgagcatcgcctccaacactggcaatgagggcttgttcggccccgcgtccaacgccagcagcaggctctccgccacatccgccgcattggatcgctccggtttttccttggtctcactcaattcggttttcctcctctgtaatcggctttggacgcgtattccaccagcgcgctcactttcctgttttgacggtccacgtccacctgctccgcgtagggcagcaggtagatgtacgggttggccgtctggctgttgcggtcgcatatcctgtcccagaactcctcgatcaggtcggccggaggccatgacatgccctcatcggtgatggggcaccacatctctatgcggccactgtctgctgctggagcccgttctgttctccccaggcgatcacctccctgaccgggtaggcgacgcggcgggtatcgcgtttgcggtgctcgcgtttgccgccgagcttgacgaatttcgggccttcgccccggtatctccatacgccgagcgtgcccacggtgggcgaacccccgaaataggcgctcaccttgtctgccttccagtaggcgacgccgtcctggacgatgtcgggcggaatcatggcgctcatggtggtatcctttctcctgtagctgttttgcttcgcccacgttgccgcgtgggctttttctttccccgaagggcgtggaccgtgccgaatcgaacggcttcccgctgtttgccgcgcgtacatgacaccgcgatctccagcgggggcgaacctgccggccccgtgcgccgcacccgctggggatggggtgcgacgcgaatggtgttagcgactgtccttgtcgattgccggggaaggaaagaataggaaccccggcaagcctttattcgactcccgcctcgctcaaaacgaggcacaggagccgcaatggcacgaaaccgaatcccataagggaggtgatgccattgccgatgggatgcgcgcaaccggcgtgagacatcacccagccgatgcagcaggcgaacaccacggcccagagaatcaaccggaccgtgaagccacgagacagttcgtcgggctcgggcctcctgtagccgctcgcgtgctgtccgtaatcctcggcgttcatcgtccggcctccgcatcgaggattcgacgggccagggccacgagctcgctgtgcgggccgcgccacaccgcgtccgtgatgcccatgtcacccagacgcaattcatcgatgccatggctgagagcctgataggaaaggggacggttcccgtcctcagggtttgcgatggtgagtttctcgctcattggtttttccttttttcgtgttggatcacctccccctaagctggatattgcgtactaccagcaatgagaggaggtgaaaaaatggacaacaggaccaagaactatatcgaggttgacggcaatgtccttccggggtctcttcgcggtgtcatcgaactgttcgatgaaatcgtggagacgataaagggattgaagcccggtgagcggaaagtggtgtacttcgagctcgttgagaataaatcgcttgatctgccgggaggcacgatagccatcgctctgcactcggaatcatccgtatccgtcgtggtcaatgatgatggctccgatgaatacaagaacttccagaaacgcgtttctcagaagtaggttcgcggacgttccgggcaaacgagggtgttccataatgtgcttcggcgtaacgggacacccttctgatttcccggcgattgtggagctccacaatcagcaggatgaacgaaaccacgagattggttgatgcggctgcgacactgatgaacacagtcatcacttcacctcgctttcggcgagcgccggaatggttgcggtgcggatgggacgatgggacgcatgatgcggtagattcatcatgaatgctcctatgagaaagaagtcgatgatggtcacatggttgtggaatctgatacagggggatttcgcgcagaacccgacagcctggatggacttggcgatcacggttctgggaatcgtgctctccccggtggcgtggttcacgtccaaatgtctggagggcaaagccgcgaaacgtgaggccaaggatgcgcaggagaagttcgatgcccagcttgaggtgctcaaaggccaattgaaggccgcgaatgattcggtggatgcgcttcgcgcgcaggtcaagacggctgaggattcagccgatgcgttgcgtggacagcttgccgcgcagcgtacgcaggcccggttggccgaggagaccgccagtgtcccgaagtgggacatataccaagtgcagaacctcaagtatgccgtcgcgaacgagaacgcctttgatgcccatgacgttcgggtggtgctttcgagcggcaaggaatacgagctggggaatatatccaagggatcgtccatcgggttcatgttcatggagaaggcgattatgtgcgaggacgggtatgccgacatcagaatcacctggtcccttccgggtgaatccggggagcgtcattcggtgacgaagccgtctcctcagtatctgcactgaacaaggcggcaagcacattatcgtcaattcgcacgattttccgataggaaatgatttgcgggccgattcccgggtatgtctcgatacgcaccgggtcgtccgacatgttcgccagagtgttttccggttcgttgacgagcgcggcaaaacggtgaatctgatcgttgttcattgaacgtagttccacgacggagatgtcattgcccatcacttcacctctccttcggcgagcgctggaacgtctttggtgaattgtggcggcaggagttccgacggggattctccgatggcttcggcgagcgcaaggatgtcatcaaggtcgaagcctcggtaccccttgagcttgctgttgagactggagtagggcatgccagacttctccgacacgaatcgcttcgtcatgcctttttcgcgaattttttcatcgacacgattgccgacccatgcattaacattgctcatgtgagcaacgctatagccaagttcgattactgtcaatgccggcgtgtcacaaatgtgcaatcatgttgcaaattatgaattgcaattgccttatatgagatgtaaagtactcacatgagcaagattcaagatgaacgaagccatcgcttttcccagttaattgggttagagctaaaggcaagctttgcgcgccatgagacatcccaggccgatgtcgctgaaaaattaggacattcgaagtcagggtactcccgttggctgaacgccaagccgtcaatgccgatggaagcgctcatcaacacctgcgaactgctcggcgtagacccgcgcgaagtcttcaacgcagcctaccggcgacttatcgaggaaatgggagaatgcaagactgcgctcgctggcgagcgccttgttgatgatgagcaggctcgagtggccgaaacactcaagaaactccatcgaggagacatggacatcgttgccctggaagacgaacacaagtatgacggtgatggggacgaaccagcgtaattccctcgaattcgagggaatcggaaaaaagggggtcgattttgaccctgtttaaagtcatcgaattcgacacgttttagagaaagaggttttgaatcatggatgattcaaataaccagcaggccgagatagtcctgtaccaggcggacgggcgcaacgtgcccgtgcaggtgtcgtactggggcgacacgttctggatgccacagtccggcatggcagaattgtttgacaccagccagcagaacgtaagtctgcatctgaaaaacatctatgaaacgggcgagctgcaggaagaatcaactcacaaggatttcttgtcagttcgacaagaaggcagtcgcaacgtcagacgcaccgtcgccttctacaatctcgatgcgatcatagcggtcggctaccgtgtcaacagcaagcaggccacccagttccgcatctgggccaccggcgtgctcagggaatacgtcatcaaggggttcgccttgaacgacgacatgctcaagaacgggcgaccgttcggccaggactacttccacgaactgctccaacgtgtccgcgacatccgcgccagcgagaaacgcttctacgtgcagatctgcgaggtgttccaggaaatctgcaccgactacgacaaggacgcgcccatcgtgcgcaccttttacaagaacgtgcagaaccggttccactacgccgtcacccagcacaccgcacccgaaatcatccacgaacgcgccgacgccggcaagccccacatgggactcaccacatggaaggacgcgccggacgggcgcattcactcgtccgacgtgaccatcgccaagaactatctcagcgaggacgagatcaacaagctcaaccggctgtccagcgggttcctcgacatgatcgaaagccgcatcgagaacatgcagaccaccaccatgagcgaatgcctgcaactcgtcaacacctacatccaactgaccggaggcccgctcatgcccgacatcggcaaggtcacccgcaaacaggccgacgtgaaagcccgggccgaactcgcacgatacaaccagtcaagccccgaccaattgtccgacttcgagaagttcgccagaggattggaccagaaatgaccggcctgccgttgtcgccgcgcatgagctacgggcagatgcgcatggccctgtacactgtcgcacccgacctgcacgtggccagcgcccgcctgcccggcaagctcgacggcctatactgcctcgccacgaacacggtgctcatcgaccggcgcatcacctacacgcgcaaacgctgcgccctcgtccacgagctcgtccactggcaacacggagacgacaccagcaacggttgccgcggcggcaaactcgagcagcgctgccgacgtgagaccgccatgctgcttatcaacccatccgaatacgcattggccgagcgcatatacggcggtaacccatatcagatggccgccgaactcaacgtgaccgtacaagtcatagaagattacaagaactggctgcacgacagtgtggccgcctagaagaaagaagagaaccgtgaccgagccaacccccatgcaggcacagcagccgccggcaacgcaggatagccagcccgcagcagcaccatccgcgccaacgccggcaccgaagaagaagctcccaacggcggccgtcatcgccatcgccgcagccataggactggtcgtgggactagccggcggactcggaggcatgtacctgtacgccacgcccatcatcaaccagcagaagtcggacatccaagacctcaatacatcattggactccgtcaaagcgcagctagccgacgcgaacgaaaaactcaacccccaggaagatcccaacgacacgggatccaacaccgacgcttcgggcacgggggagaccgccgtcagcggcggcgtcga

SEQ ID NO: 123 - DNA, 33563 bp, Unknown
  R206_24m  MAG No. k141_35416
cggcatgggcatcctgcccgaccatgagcctgtgctcacggtgatcaagcagggtacgctcaccgtggttgagcccgatggcgatcgccacatgttcgaggtgaccgacggattcatctccttcgactcgaacaaactcaccgtggcggtcgagcgcggccacgacgtccagtactccggcaccgccgagtgatttgaaccaactcctcaaggggctctctggttttccagagagccccttttgctatgtatgccatgtgttgcgctacagtggtggcctatgcgagttattgttgccgactgttcggccgagtattcgggccgcctcaacgcctcactgcccctggccaagcgtgtattgctgatcaaggctgattccagcctgttgattttctccgaattgggctcctacaagccgctgaactggatgaccgcgccctgcacgattcgtgagatcgacccagccgccaaatccgcgcaacattcccgggaaagtgtcgctggtggggctgtggatggtgattccgcgacgcattccccggaaagtgtcgccgctggtgagccggaaaaggtgctacgtgtcagcgccgacaagggctctgacattcttgaagtgacgctgcaacacatctattccgaccaaacctatgatctgggcgaagatccgggtctcatcaaggatggcgtggaagaccatctgcaacgctatctggccgagcagatcgagcgtatcggcaagggagccaagctggtgcgtcgcgaataccctaccgccattggtccggtggatatcatggccgtgaatgccgagggcgagcatgtggctgtggaaatcaaacgtcacggcggcattgatggcgtcgagcagctgactcgctactgcgaactgctcaatcgcgatccgctgctggccccggtgcatggcatcttcgccgcacaaaccatcacgccgcaagcccaggtcttggccaaggaccgcggcttcacctgcctcatcctcgattacgacgatatgaaaggcaccgaggacgacagtctcaggctgttctgattgttcttggcttccctcttgaaggggagttttcgaacgtacatagagagactgaggggaggcctcacggcatattccgtgaggcctcccctcagtcagtttcgctgccagctcccctcttggggagagccatcgagattgtttagtacgcggcgagaatatcgattacgaagaccaacgtggagttggcgggaatcgaaccttgctccttatctccataggcctgatccggcggaatcaccagcagaacctgagagccgacggtctggccgaccagacccttctgccagccctcgataacctgatgctggccgctggaatcgctgaacagatcggcgtcgattgtggaatcgcgatcccaggacgaatcgaactgcttgccatccgtaagccaaccggtgtacttgaccaccacggtgttcttgtcggtcagcttggcgccgttacccttgatcagcgtctgcgagatcagcgaatcaaccgaaccctgaccgttcatgtcaatggacggcttgccattcttggctcgcgtcaccttcggcagattggccggcacatccttgacttcctcgccagtggccttcttcaggtccttggacttggatacaaacgtcatcgccaaaatgtaagagtatccggacgaatcctgagcgttgacgccaaagccgatcgtggtgttgatcttggcgcccttgatctggttgtagtaggtcgaggagagggtcttggaatccaccttcagcgagcaatccggcgtgttcttggtccaggtgtccatgagctcggtgccgtctttaacgttgagcgcgatgccttgggcgcagacgcggtcgccctcctcgattacgtcgccatcgcccttttgcagcaccacataggagccgtcggacacggtcatcggcgtattaaaggagatggtcggcttctcgccgagcttgcccttggcggtcacgccggcaatttgccccttcttgtcagaagagccggaagaggatttcgagtccgagctcgaactggagcaggcagccagcgatacgcacatcgccagcgagcaggcaagagcaacggccttgccgagaggggataacatagatttaacagacttacgcatgacacaccaccctactggtgaaccttgattttctgcgctcctaggtaataaacaggtgaagattgtagaatggttaagttatgagtgctgaagaacagactacaagaccggataagggcgccaagcgtccatcccgtcatgccaagatcatgcgtggagtggtgacgcctatcttcggtctattggccgtggcggctgtggtgttggggtacatgaatgccacgatatggaagccctccactgaaatcaccgcttccgcaaccatgagcggctcccggtatgccgtcactgatccgaatgtgctgaccttgttggatcagaacgccacgataaccgtggactcgggatcctctcaggacgaggcgtgcgtggcgttgggtccgtccaaggatgttgccggatgggtcgcgtccgagaagtcctatacccgtatcaccggattggcgtcatggagcgagctgagcacccagaagggaagcagcacgagtcagggagcgcctgccagtgccgatgacgcggtggcgttcaaggattccgatatgtggactgccgtgaaatgcggcaccgggtccgtttcgctggagagcaagaagaccggcgcctcgacggtggccattgtggatttgggtgaaaatgccaccaacgccaaggtgcagctgcactgggtgcgctccgaagtgccggactttgcgatgccgttctatctgtccggtggattgctggccgtgctggccgtattgtgcgcctccgtgttcgccatgccgccgcataagcgccgcaagcgcatggtggaaggcacggcaagcgccgtaattgaggaagaggcacccgccagcatcgcagtgtccgggaagccggatggtgcaagtcgacgtaatcgtcgccgccacgccacaaatcggcgttcgggccgtgcgtcctcgcaatctgaagccaccgaaacaccggttatcatcgacccaagttcacgtaacctggtcgccgaccagcagactggtgccgagagcggcgctgagaccggcttcagcgccggcgataacgaatcgacttcggtaatcacccctgacgaactgcaggcctacttctcccgcttggcccaagaggtcaataccggagacgactcggccgatgacggacaggaggaaagctgatgaacaagcgatggaacaaactgtgtgtggccgccctcgcctgcgtggcgttggtcgtgccgttgaccgcctgtgaaggccggctgccgacgccggctgctgatacctccaccaaggttgcgccggatttgaccgaggcacaggagaagaagattcgcctgaagattctcaagacgatcgatgaagccgatcaggccaagaatcccgatggatatgcggccgttatgggcgggccccagctggacattcgcatcagccagaccacgatcaaccagcgcggcggcggtatgtccaaatacgcgaccattcccaaggacatcgcccagacggtgattcccatggacgacggatggcctcgctcggtgttcaccatcacgaccaccaccgaagatcagcagtccaagcgtttgctggtcttcgatcaggaatccgcccagcagaattacaagctgatggccatggctcgactgtttgagggggccaagctgccgaagttcgagattccgactattggctcgcagatgggcactgcaaaggatgagaagctggtggccactcccgccgatgccttgacccaatacgccgatgtgctgcagaacggctccaagagccaatacgcttccaagttcgcagacgatttgctgcgccaggaactggccaataccacggccaaggtgcaggaaggtatgcaacgcaacaacggtacgcaggagcagaaattcaccgttgtgcctgaacagatgtgggtgatgcgtgctgcagatggtgccggtgatttggtggttggccgtattaacggcgaatggactcgcaaggcgggggatggccgcgaatcgcagccggcttccgacgacgagaaggcgctgttcaatagcgacaagtacaccagcaccatgaaggtcacgtatgtgaacgtggtggccttgtacattccgttggcaagctccggtgagcaaatcaccgccgtgggcgccgaccgtcagccggtaaaggtcgaagcgctgtagttgttgccgccgcccaccgcgcggttaacgccccaccacgatatgattcatccaccacgatgtcggtaagttttacctttcgcacaatggtgccgttttgagtcacatcgtggtgggcgttttgctacgtggtgggaatttcaccgcgtagtggaagaatccctacgtggtgggaatcggcattacaatcaatgtcagcaaatgtgattgttgttgtacgcgaatcgcgtggaatcgggaggcattatggcagagcagcagttcaatccgggagtctcattggcgggcgccgtcgatttggaggcgctgaagcatcaggtcaaggccgagcccggccaggcgggtggcgctcctgccgctggtgggtacgtgatcgacaccaccgaaaacaccttccaggcaatggtgcagacttctgcgaccttcccgatcctgctgctcctgtggataccgaccgatgaccgcctgttcccgatggcccgtgcgttgggcgacgcggtgaacgccctgaacggccagattcagctctcccgtatcgatatctcgtccaatccttcgattgcccaagcgttgcaggtgcagggcgcgcccgcactgttcgcgttgattgccggccgtccgatgccactgttgcagggccttccgggtgacgacgagctcaagcaacttaccgacgaggtgattccgaagatcattcaggccgccgcgcagtctggtgtgaacggtaccgcgccgtactcgggtgatcctgattccgatgccgccaagagcgctggtgccaccggtgccggcgtgggtgctgagcaggtgccgccggagcatgccgaagcccatcgtttggccgaggagggcgattacgccggtgccgccgccgaatacgagcgcgtgctcgaatccgacccgtccgatgcactggccgcccgcgaacgtgcgaaggcgctgttgctggcccgctccgggtccgctgatgtacgtgacgtgcgtgccgctgccgccgcagcgccggacgatgtggaagcgcagttggctgtggctgatatcgacatgatcggtggccagattcaagacgctttcgaccgtttgctggactttttggccgccgggcacaaggccgatatcgagccggttcgcaagcgtctgctcgaatacttcgccatccccgaacccaccgacccgcgtctggctcgcgcccgccgtcgcctagccaccctcatgtactaagtggttttggctcccctctttgagaggagctgtcaggcgtagatgactgagaggagcgcgcgagcgtacttgattgattcccctaaaccatccgattcttcccgaaatattgctggaaccttggcccctccagcgccagttcctcctcgaaatcatccgcccacttgcagaacggacggttggcgagaccatcgttattgaatcgcgcctgatcggtgatttcggtgatgcagaatttcggaatcgtcagattggtaaccggcccggatcgttcggcctcggctacgatcagcggcgcgttcggcccgccgaacacgtccacgctccagccgtcttccgcaatccacacggaataccggttcttgatgattaccgagccgccgcgcttgatgagttcggcggcgatgcgcgtgtcgatctcgcgctcgacctcgtagcgcgtgccacccacggacggacctttgacggtgacatacgcttccgagaaccggtcgcggtactcgtccagcacggccaccggatttacgtcgggcgtcatgtcgacgtgaaccttgtgcgagaccagccgcacgcgcaaggcgtaattgtcggcatgcacgtagtagctctgaataatgagggtcggggcgtcgccgtcgtcgtattccgccggcagctcgcggcagaagaagcggcgttcgtattcgaagtcatctgtaggttccgacataaccccattgtagggccgatgatggcgattttctcgttattttggcgacgtatgtgcctcatgcagcgtgatgtggtgtacagtaaagaagttgctcgggtttgtagctcagtggatagagcgtctgtctccggaacagaaggtcgtgggttcgatccccatcaagcccaccagcatggctttcggctagccgtcggaagccttttgcatattcggcgcgtgatattaagcgcgtgcaaagctggtgctggtgcaaagctggtgctggtgctggtgtcggggtcggtgatgccggctcgcttgggtcgtggaaaaaccgcccggtttggcgagaacggtagtcgaatcgtctggaatcgtctggaatagcaaggaatagtctgttgatggccgtatgccgggcatcatgcgcgctaaacgcgacttcgctcagtagactgctacgtaatcggcattgccaatcgttgctgatcgtgcgattggtcgtagccggtggtgatgtgtaccggcgccggccgcagcaggtgggcgcccccaagatgagaaggagcacaatatgagcgaaaagatggaagccgtagccacttccgaggcgccggccgcgctgggcgcatacagccaggcggtgaaggccaatggcttcgtgttcgtatccggccagctgggcattgatccggccaccggcgaactggcgggcgagaccgctggagagcaggctgcacaggcgctgaagaatattaagcacattctcgacactgccggtaccggcattgagcatgtgtgccgtgccaccatctacctgaagaacgtcgaggacttcaaggaagtggacgcacgttacgccgaggcgttcatcggctccgtcaagcccgcccgcgtggcctttggcaacaacatgattcccaagggcgcgctcgtggagatcgacgccatcgcggtggagtgattcgaacgtttccccggcggcccgtctgcgcgcatggtgtgtgcagacgggccgccgcgtattgtgcgacgcattccggggaatgtcgcgctaggcggggtgtgaggggtggttccgcggcacattcccgggaatgttgcgctggaatcgttgggcggtggtccgtgccacaatagagaccatggcatccaaaggaaaaccgtcgccgcgttcggccgtaagcccgctgagtgatgagcaggtcaagcgtctggccgcccgccacacgcttgtggactcgacacagtattacccgaccggccctcgcacgcccaatcagccggaaatcgacgcccagaatcccaaggccaccaaacgactgctgggaggggtgtccattgtgttccgcgccagctgcaagaccaaggcctggggtctggaacaggtgccggaaaccggaccgttcatcaccgccgccagtcatatcaccatgtttgatgtgttcgtgccgatgatgagcctgttccacatgggccgccgcccccgttacatggccaaggccgagatggcgaagtggccattgatcggcaagtggttccggttggtcggcatgcagccggtgcagcgtcattcgggcaaggccaagcagatcgaagagacctcgattgatattctgacgtccggccgcccgctgacggtctggccggaaggcaccgtgacccgcgacccgaaaaagtgggtgatgagcattaaggagggcgtgggatacatcgcccttgaatcctcgcgcagactggggcatcaggtgccgctgtacccggcggtgacgtggggtgccgcctccatcaaccactggtggccatggccgcgcaaaaacgtggtgatgtgctatgaccatgcgctcgattactccgatctgcttgccgacatggactcatggggtgaagagccgcctgccgaggccgtgaacgagctgatgtggcgcgtgctcaaacgcatgaacacagtactggaggaaattcgtggcgagcagttccccgctgaaggctactgggactaccgcagcatgagtcgtaagccttggccggaagccggcggcccgttcccggctgagaagtagccgcaccggttcccgtacggggagcctaggcgagtagcatggcacaagattgtgccgatgaagttgcgcgacaagcgaaggtaggaatctgatatgggtaaaaatataacggttctcggtgcaggagcatggggtaccgctttcggccaagtgctggcggacgccggcaacacggtgaccatgtgggccaaggagcagcggattgtcgaggacattcgcgatcgccaccacaacgccgtgcgcctgccgtccgtcgaaaagttgccggacaacatgaccgccaccggggatcgcgccgaagccgtcaagaacgcggacatcgtggttgtggccatcgccgcgcagttcgcgcgagtggcactcgtcgaattcaagggactgattcccgatcacgccatcgtcgtcagcctgatgaagggcatcgagcgtggcaccaacaagcgtatggacgaagtcgtccgcgaatcccttgacctgccggccgaccggttcgccgccatttccggaccgaacctgtccaaggaaatcgccgatcgtcatcctgccgccaccgtggtggcttgtacgaacctcgataatgccacgaaggtggccgaggcatgtaccacctcctatttcaagccgttcgtgaccaccgacgtcatcggcctggaaatgtgcggcagcctgaagaacgtgaccgcgctggccgtgggcatggcccgtggtgccggctacggtgagaacaccgcagccatgatcgaaactcgtggactggccgaactgaccgcgctgggcgcagccgctggcgccgatcccaagaccttcttcggcttggccggtgtgggtgatctcatcgccacctgtggctctccgctgtctcgtaactatacgttcggcgcgaatctcggcaagggattgacggtcgaggaagccaccaaggtcagcaacggtgtggccgaaggcgtgcccaccacggatgcggtggtggctcttggcgagcagcttgatgtgccgaccccattggcgtatcagatgagccgcgtgctgaacgaaggcatttcctgctcggagatgcttgccggactgttcgggcacgaggttaccggcgaataacgagagaagcgacgtatacgtggcgtatacgttgtacgtgcaaagtcgtgtggcgtatacgtcgttgacgtgcgcgagtagactggtgtgcgtctcttgtgcgcggcggtccgagcgcggttcggtccggttggcggtgcaaagcataggcttgaaaacggttgtagtttcaataaaaggatggttatggccaagaagcgtgttgtggtgctctatggtgggcgtgcagacgagcattcgatttcctgcatctccactgccggtgtgctgggggccatggacactgaacggttcgagccgattccggtcggcatcaccaaggacggcaagtggatcatcaacggcgaagatcctcgtggctggaatctggatggcggcgagctgccgaccgtaaagatcaccccgggatcgcgcccggtgatgattgacccctctcgcggccaggacggtttcttcatcggcgagacccgccacatcaattccgccgattccggcttcgtcagcatgtccgacccggaaatgcaccatgcgctgacctcccttggccatgtggacgcggtactgccggtgctgcacggcccctatggcgaggacggcacggttcaaggcctgctggaaatgatgggtgtgccgtacgtggggtgtggagtgtttgcttccgccgcctgcatggataagcattacaccaaggtggtgctgggtgccgccggcattcccaccgcgcccggtgtgacggtcgatgcgcgcaacttcaccgccgccgatgtgcttgccaagatcgaggacgccggtcttacctatccgctgttcatcaagccttcgcgcgcaggctccagcttcggtgtgaccaaggtcgagaaagccgatgaccgcgagacccagcaggatcgtctggccgccgccatcgccaccgccggcgagcacgattggaaggtgctcgttgagcaggggattgatggccgtgaaatcgaatgtgccgtgctgtgtccgaaggccggtgacgagcctgaagccagctggcccggcgaaatcgtgctcgatcatcagaacgacgaccagttctacgatttcgactccaagtacatggatgcctccgccagccacgtggaagtgccggccaatctgccggtcagcgtgcttgaggacgtgcgtgacgtggcccgtcgcgcgttcaaggccgtggatggtgccggcttgagccgtgtggacaccttcgtgacgcctgatggcacggtgatggtcaacgaaatcaacaccatgcccggcttcacgccgatttctatgtatcccaaggcttgggatgccaccggagtgagctacaccgaactcatcacgcgattgattgagggcgtgctgaggtaagtgtggtgcggaatcggccgcaggccggttccgctattgacacattgcccatacctgtcagtaattcatgtcaagttttcctaagttcaacaggcgtacggcaaatggcggacgcaattcacttgcacgccagtgtcaggacagattaggcgcatagtttcttttctggattcacgggccgcgcgaatgccgcgcataccaagcccgactccccagactgtcgtctggatgatgttgagaaaaggaacagtatgaacaacctgcgtaagatcgcggccggctcccttgccgccgtactcgcgttctcgatggccgcctgcggctcgagcaacgcctcctccgatggcaccggcaaggccgtcaccgtgaacgagaagtccaccaaggccacctccctcgccgatttcggcaccatggaggaccttgagaaggctgccaaggaagaaggcgcgctgaacgtcatcgccttgccgcatgattggtccaactatggcgaggtcatcgagggcttcaagaagaagtacccggagatcaagatcaccgagctgaacccgaacgcctcctccaaggaggagatcgacgccgccaagaccaacaagggtaccgacgccgcccccgatgtcttcgacgtcggccaggccatcgccgccacctccaccgactatttcgccccgtacaaggtgcaggcctggaacaagatccctgatgctgccaagaacgtcgacggcgcctactacgccgactacaccggtatcatgtccgtgggctggaacgccgacaagtacggcgatgtcgcctccctgaacgacctgctcgatccgaagttcgccggcaccgtgtccctgaacggcaagcctaccgaggccggcgcggccttcaacggctatctgatggtcaaccagctcgccggcggcgacatcaacaacctgcagcccggtctcgacttcttcaagaagctcaaggaagccggcaacctgaacaccatcgatgtgaccaacggcaccatcgactccggccagaccggcgtggtcttcgactggacctacaaccaggcctcctacaagaaggaactcaagtccaagggcgtgaactggaagtacaagaccttccccaaagcccaggtcgtcagctactacaaccaggccatcaacaaggacgcgccgcaccccgccgccgcacgcctgtgggaggaatacctgtacaccgccgaaacccagaacctgtggttcaagggcggcgccaacccggtgctgctcgactccatgaaggccgacggcaccgtcgaccaggccaccctgaaggacgccatcaccatcgaaggccagccggtcacctacagcaacgatgactccacccgcatcaccgagtggcttcaaaacaactgggacaagacgatcggcaactgagagtccacgatgaccgccgcaatcgcacccatcgcaccgaacggacccgccgcctccaaggccgcgggtccgtccgccgcatcgacccccgcttcgtccgcactggcgaagcaccgtcaggagcttggcacgctcgccaccacgctcccgttcttcgcctacaccgcctgcttcctgctggcacccaccgtgatcgtgatcatcggcgcgttccaggatcgcagcggcggtttcacgcttgcgaacttccacaagatgttcgaagccaacaccatcgccgcgttcggcacgtcaatcctggtgtccgtggcctcatccctgatcggtgccgtggtgggcgcgctcgcctcctacgcgctggtgatcggcgccaagccgaacggaccgctgcgccgtatggtcgccgccatctcatcggtgctcgcccagttcggcggcgtgatgctcgcgttcgcgttcatcgccactcttggcatcaacggcatcggcaccatgctcatcaaaaccctgactggctataccgtgaacccgaattggctcagctccctgccggggctggtgaccgtctactgctacttccagattccgctgatgatcatcatcttcctgcctgcggtcgattccattcgtccacagtggcgcgaagcctgcgagtcgctcggcggcaacaccgtccaatactggacgcgcgtggcctgcccgatcctcgcaccccgcttcatctcggcgttcctgctgttgttcgcctccgcgttctccgcatacgcgaccgccgcagccctgttctcgcagcgctcgattctggtgccgttgatgatccaaggtgccatgcgcaatgagatggaccccaaccagcagggcttcgcgcaggtgctggcattcgcaatgatcatcgtcgtggccatcgtcatgctgctgagccacgccgtggaaaagagggccggacgttggcaatgaccgaaacttccacaaccaagccgccgcagctgcgtgccgcccgcgtgcgcaaacagagcatcatcaaattcgtgatcctgttcgtcaccctggcgttcctgttcgtgccgctgctggccatgttcatcttcaccctgcgtcacccgttgtccggtcgctggtcggccgcgccgtggacggcgattttcaccggcaacggcgaatcgttgggcgccgatctgagcgtgctatggcagggcgtcggcatctcgctgtcgttgagcgccgtcaccgtcgtgatcatgctcatcctgctggtgcccaccatggtcatcgtgcatattcgctccaaagccttggagcgtgcaatcgaatgggtggccacgctgccgctgaccattccggccatcgtgctggtggtgggtcttgggccgatctaccgttggctttccgccgacgtgttgagcaccaacccgatctggctgtgcttcgcctatgtgattctcgtgatgccgttcgccttccgcgcgatcgccgtgggcctcaactccatcgacgtcaagacgttggtcgaagcctcccgatcgctcggcacctcctggcccaaagtgttcttcaaggtgatcatcccgaacctgtggcagtcgatcctctcggcatccttcatctccatcgccgtggtactcggtgaatacaccgtagcctcgctgctcggccgtatgaacctgcaggtcgcgctctaccagctcggccaatccaatgcccaaatttccaccgccatgtcgctgctggctctgctcttcggcgtggtgctcctcgttgcgctcgacctgatctccgacgcaatgcgtaagtcaagggaaggtaagtgacccgatgaacaacgattcaactcccacccgtcaggaaaccggtaccgcagtgggcaccgccccggcgtccccggccatcccggcagccgtgtcctccactgccgaggacgccttcaagaacgatcccaccgctaccctcgagggcgtgcgcggcaaggacgtgaccaaggccgccaaggccctgctcaaagacaccgccaagcgcggcggtggttccattcagatgcagaacgtcgtcaagatctatcccggctccaccgttcacgcgctcgacgacttcaacctggacatcaagcccggcgaaatggtcgtgctgctcggtggatccggttgcggcaagtccaccgcgctgcgatcgcttgccggtctcgaagacatccaaggcggacgcatcatggtcggcggacaggacgtcaccggtgtgccggtgaacaagcgcgagatggccatggtgttccaggcgtactcgctgttcccgcacatgaccgccctggagaacgtggaattcggcctcgaagtgcgcggcatgggcaaggccgaacgccgcaagatcgccatggaacagctggagctcgtggggcttgccgatcaggccaagaagtacacgcagcagatgtccggcggccagcagcagcgcgtggccctggcccgggcgctggccatcaagccgcgcgtgctgctgctcgacgagccgttgtccgcgctcgacgccaaagtgcgcgtccagctgcgtgaccagattcgccgcatccaactcaccaccggcaccacaaccgtcttcgtgacccacgatcaggaagaggcgctggccgtggccgaccgcatcggcgtgatgaacaagggcaagatcgagcagatcgccgccccgcaggacctgtaccagcgccctgccaccgagtacgtggccacgttcattggactcaccaaccgcctgctcggcgcatccaatggcgacgaggccgtggtcttcggccagcgcgtgccgctgctcgccggctccgccaagggcgattccgtggccgtgctcgtgcgcccggagaacctgatgctggccttggctggcagcagcgattcgcacgtcggcgaacgcgcccgcgtggaggtcattcacttccttggctctttggttcgtgtggacacggtcatcacctccggcgaataccagcgctggaacaaaggtgaacagctcaaggccaccgtgcagctgcccgccagcgagctgccggccggtctggcggtgggcgatgacgtgattgtcgccccgcgtccggtcgccgcgctcgcctgctgaatggcgttgcgatgatcgtgcggttctgttctgttttgtgactgtacgatcgtcgaatggcttatcggcaatgatatgtgtgggacggcggcgatttttgggcgattatcgcgtgccgtcccacgccggtgtgggatggcatgaacgtcaaacgatgtacattcgtgccgtcccacagattgtattgaggaatcgttgcaatgacgccatttcttcgtgcggcgtcatcagtcatatgtggagtggtgtgggccgccgcgaaaaaatcgggtaaaatcgcgtgccgtcccacagtaatcttgcagagtaggggactttctcgtcattgggaatgattgacgttgatcattccttgcccattgatgatttcctcccccattcccaatgcaatcgaaacgccgtgccgtattcttgaagagtattgcacgtgtgatcggtccgtttgcggccagtgactatgggggataagtatgagcgaaccaatgccgtcggcgcagcagccgcaacaaaccccacgcgattggtggttcacggcccatcgccggttttcgacaatcggctcggcgctcgccattatgatggtgttctggatcgggctgaatattctggccactgaagcactacgaacgctgcttggcgccgatgtgcccgcttgggctgtgttgctcgcctcctccgggccgctgtatgtggtggccatgccgctgagtatgttggctttcactcgcgtaccggttattcgcacccggcagtaccccatgaaggcgggggagttcattcggattttcgtcatgtgcattccggtaatgctcttgggcaatatgattggcaatatattgtctgccggagccactgatggtcaggccaccaatcgcatcaacgacgtgattcttggcagcgactggcgggtgaacgcattgttcataggcctgttggcaccggtttgcgaagaatggatttttcgcaaggagattatctcccgcctgcgccggtacggagaaaagaccgcaatcatgttctccgcattggcgttcgcgctattccatatgaacgtgttccagttcttctacgcctttggcctaggactgatgttcggatatgtatacacacgcacttcccgactgcggtattcagtggctatgcacatgctgatcaacctgaacgggtcagtactcgccccattggtgatacaacagatcgatccccgcatcctcgacggcacaatcagcgaggccgaaatcatgcgtatggctgaaaccggcaacatgggcggcatgggcatcatgatgttgtacggcacagtgatgttgggcctctgcattgccggtatcgtgctgcttatcaccaagcgtaagagctgggagttctatcttgcgccagaggagttgcctgcggggcttaaaatacgcaccgcctatgccaatcccggcgttatctcgtacctactgttgactgtgattcttaccggttggatgctgttcgcatgactgtcatagccggacccagagaggcgagtcgggagatatcatagattgtctgacgagccgccatcttcgacaaggtattcggtgcccgaaccggcgatggctcgcgccgccatatctttgatggtggaaggtagcacaccctcgcgcgcgaacaccagcacttggccggtcatgccgtaaggagaaaaaccggtgaacttgaccagcggtggctggccctccagtgccacgtcggcggtggctttggttacgcggtcgagaatatccctgctgatcgcggacggatcgccggaggccttggccgtgaattcgagcgtggccatgccttcgctggccggcgtgagcttggtcaaggcggccgtattgagcaccgaattgggaatgaccatcatgtccccggagcgggtgcgcaccacggtctgtcgccaggtgatgtcatgcacggtacctgtgacgccttgaatggtcaccagatcgccgggttggattacgcggcccagcatcaggccgaagccgccgatgatgttggcgatcgtatccttcagacccagcgagatcgccacgcctccgacgccgagggcggtgaccagggtggtcggattgatgccgaacaccggctgcagtaccatcgccgtaccggtgacccagatggtcacgcgcgtgaggttcacgaaaatcgaggcgctgggaatctgcgaactatccagaaccctgcgcagcacgcggctgatgacgcggtcggccgcgaacacgacggccagcacgacggccagccagatgagcttgcccgcattgacttggaaccagtgtgcgatgtcttgtgcatattcggtcatatgccctactgtatcgaccatttctggtgaagtcgtaaacatgcgggcccacgtcgggttttggccgttgcggtggtgccgatggtgcgataccggtggcgtgccgtcggcgccaccggcaccaccgcggcaccgcggtgcagcatcgtcgtggtgatgacgtcgccgtgacgcctagtcccgatgctcgcggcaggtttggccgaggccacgggccagtcgaatcggatcgagaatctcgtccagctgctcggcgggcaggtcggtgcgttcgccggccacctcgcgcacggtacggccggtgtgcacggcttcggcggcgatgtcggccgcgtgctcgtagccgatgtaatggttgagcgcggcggaaatcgacggtgaggactgggcatatgaacgccccaggtcagcattgatttcgatgccttccacgcagttgacgcggaacgtctccatggcccgcgtcagcaacgccatgccggtcagcagctcatgcaccatcaccgggtcgaaggcgttcagctgcaactggccctcggccacagcccagttcacagtcacgtccatgccgaagatcgtgaagcagcactggttgacgcattcggggatcaccgggttcactttggccggcatgatcgacgatccggcctggcgagccggcacgttgagatcgttgaaaccgcagcgcggcccggaattgagcagtcgcaaatcgtcggcggccttcttcaggtgcacggcaaggctcttgatggcggccgacgtggccacgtacgcgcccatatccgtcatggcggccaccggatcgggcgcggcggtgaccggcaagccggtgatctgcgccagatgcttgatggcggacttgcggaatcgcagatccgcgcaaatgccggtgccgatggcggtggcaccgaggttgagctgggccagcagcggcaccacgcgatcgaatgcagccaaatcagatttcagcagcgtggcgaacgaatgaaactcctgaccataggtcattggtacggcgtcctgcagttgcgtacggccgatcgtcacgtcattgatatgtttgtcggccagatcgtggaaggccttggcgagtttcttggtggactcggcgagcggcccgatcgcgtcgataagcgcgagtttgcaggcggccgggtaggtgtcgttcgtggactgcgactcgttgacgtcgtcgttcggatggatgtatgtgtaatcgccgcgctggtggccggcgatttccagcgcacggttggcgatcacctcgttcatgttcatgttcgacgaggtgccggcaccgccctgcatcacatcgaccgggaactgatcggccagtttgccggcctcgatttctaggcaggcggcgcgaatggcctcggccttggccgggtcgatcaggcctaattcctcattggcgatggcgcaggcgcgcttgaccgtggcataggcgcgaatcagctcgggatgttggctatcggtgatgccggagaccgggaagttgccgatagcgcgttgggtgtgaatgccccagtagacgttcgccggcacctccatctggccgatgcagtcatgttccagacgggttttgttcgatgtttcgctcatgcttccatcttcctgtgtgagggctggaaacgccagcatgagaggctgattgcgccttgtgagaaacctcacgcagggttcattcgacggaaacaatccagactcactggttttcggtcaagcggtgtacccggggaatcctgcggggccgttcgacggtgagatgggggatggcgcggcatgcgtggcggcggccggcatgccgggggcggccgaatcctgcgcattgtgcacgaagatgcgattccagtaattaagcatgtccttttggctcatggccaggtatatgcccatggccagcacggccacatcttctttaagcaggtctttgatttcgatggcgtcgctcaattcgggccaacgttgcagcacggcgagcatgccgcccacggtgaactcgaccatgagatcggttttcaggtcaaggttcttggggtcgcgttgcaatgtgctgagcatttgcagacggcagaagtcgcgcagcgattcggtcagttcaagcgtgctgtgcgggccggccaacagggccaggcggtcgaggcgctgccgctgctccgggtcggagagcgtggcggtgacgcggtctcgccattgttcctcgggattgccatttgggtcgggggtgcggttgatcggaatcgattcgacctgatgcaggatggctgaatcggccaattcaggcaggctggaaaagtgataatagaacgaattacggttcacgccagcctcacgcaccacatcggtgacggtgatcttgcggtagtcgcggtcggcgagcaattcccagaaagcgttctctaggcgttctttggcgggcagcacctcggaatcatggcgtggacgtggcatctcttcctcctgatgcaccagcgtgatatggtcacgctgtctaataacttatcgggcagtataactattatttgtggacatgtctatgagctaatcggcgatttcagttgcgtcctccgctgagggcgaagctgcggtgtcagtgtcggtgtcggtatcggcgctggccggggccgcgctatctgttcctgtcgcagttcctgctggggtttcggctgttcctttggcggtcgcagaactcggcgcggaagccggggcgggcgtcggcctgcgtttggccgtggacgccttgaacagtattgccagggcctcaaccaaatgacgccggtctgcgggggtcagccctacatacgcgccaagcatcgccggaatcgaagcggggaagttgctcatcacctcgctgaagctggtggcgccgttggcgtgcagcacggtgaacagcgcgtccaccgcacgctcgcgctgttcgggcgtaagcgtggcgatccaatggttcagctcctcgttaaacaactgcgagctggaactcaaatccggctcggtgatgaactggtcgccatccaatagccaggtgaaggcggaatgctgcataatgccatccgaatcggaagagaccacgcggcaaggctccggggtctcgaaaatcatgcccacaatcgacgaacttggcacgattttcgtcaccttcggctggatggtgcggtaggcggggctggtcacaatctccggcgggaaaccggggccgtccagtgaatagacatgctgaatgcgcttgcgcaccttggggtcggcgttcatggccgcgtaaatcgccagattgcctcccttggaatggccgaccagaataatcggaccctcccacagtcgcgccaccgtatccagataggcgctggctgaacgttgcgccggcaccggatactggaaagccatattgaaatcttccttccatccgatgagcgaatcatcggtgccgcggaaggaaataaccaacgtgcctttgtaggtcggcttccggcgcttgtggccgtcgggcagttggaaggtggcggcggcgaattgggtttgctcaccctgattgatgtgctcgaccaccgcgcccagacgaacgttggcgtagcgggggttctcgcccgcggcctggaacaggtcgtgggtcaggtccggattgaccactgaaaccatttgggcttcgtgcgtcttgtcgtcggcatgcgtttccggcgaacgatgcagctcgcggttggcctcgtcaaggctcaccgattcaagctcgggatgccagatacccttcagccagatcagtggatgcttgggctcgaaagcgcgaatgcgtgcggcgaacgagcctgactgcgtctcatccagcatcaacgtcggacagatactggccacatcctcatagatgagcgtggagatgatcaaggcgtcgatttcattgaacggcaagtcggcgaaggagcgcgtttcggtgtgcgcgtaatcgataatgccggtcatacgcacctcctgcttccgttgatattgcatatccccttgggccatgtggtcttgcgattgcgtgcggccgtgcggctgcgcgcagcaattaaccatatacattccattgtagggattgtacggttttggccggcgcgatcgagcaagactgcaccgacggcgaacaattcgtgggaggattcccgtcagcttgtcgaaaattgtcgggtagcgggggttgcgatgccagccagccgaccaccctccggcgttacgtgccacttcccgccagcgggaggggtaaccactcaatccttttgacggggcggaccgctggggccgtcaaaggttcggcagatcgaagcgcgccagatccacgccctcgagttcaagcaactcggccttgatgtcgagtcggccgccgtagccgccaaacgcgcggcccgagccgactacgcggtgacagggcacgatgatggtaaccggattgcgcttcactgcgcctccgaccgcctgcgcggccatgcggccgccaccgcgtcgttcggccaattcggcggcgagttcgccgtaacttaccgtcatgccatagggaatctcggccaccagattccacacttcatgttggaatggcgtgccggcgggatgcaacggcggcgtctgatctaggccggggcgctcgccggcgaaataggcggtcagccatacgcgggtcatacggaacacatcgggttcacgatcggattcgcgattcgaatcgagaacggcttggtgatcggtggcccaccaccagtcttcaagacagagctcggtcaggccctcgccgtccgaggccatcatcatccggccgatgggcgtttcgactgtggcccgcatcagttgtcgttgcgtcataccgccattatcgcgcgttgagggatgaagcccataccgtgcctgatttcatgaaggacgggtcgtgctgtacggtcagtattgcgtgctgggcagcgatatctgacatagtgggggttcttgggccggcatgagtgttctttccgacatcccaaccgtctaactccgtttcgaggggctgatttgggctgttccggaggtctatctccgtttcgaggggctcctcatccgggaaaccacaagtataaacggctccgggctaacgtcattacgccgtttttggcccgtgtctactcagccaccagccccttgaaacgggagtagacctccggagaaggccaaatcagccccttgaaacgcagcgacccctctgattggagtcaatcagaggggttcggcacattgctgatgcagctggtccgccgtccgccttgaggcggaacgtaaccaagattcaggcgggattactccgcaacgagcgccaggaaggcggcggccacggcggctgtcgggttcgggaattcctcgtcctggttgaagaacggcacgtcggcgtagttcaggaacttcacttcggcacggtcgccgatcaaggccttggcctcttcggccagctgatcggttatcgtcatgcgttcctgatttccacggccatggccgtgcaatgtgcccatcgcttggttctacccgctgtttatgctggccatgcccatcgcctggctgctgtatacggccaccgcgagttatgtgcacggcggcacccgataatcgttggaaaaccggtgggacacgcgggggcttggctttttcctgagattggcgtatctttgtcacctgttgcccgtgaaggtaacacatgcggacatagcttagttggtaaagcgcaaccttgccaaggttgagaccgcgggttcgagtcccgttgtccgctctcggatggctggttcaggatgattgattcagcctgaggatgacccgggcggttggcgcagtggtagcgcacttccctgacacggaaggggtcacaagttcgaatcttgtatcgcccactcgatgaatcgccggcagaatgttgccggttttttcatcacaagctcgggcgattggcgcagcggctagcgcacttcgttcacaccgaaggggtcgtaggttcgattcctacatcgcccacccgatatcacgctcgtcagtctatgatggcgggcattttctatatctgccgtgccacggttccttatatggcatccggcctcgggtggcatttggctgtgagcggtttccgatcatgagtggcgtccggccgtcgtgcaatcccgctgcgcgcggtgccgtttgggctgtaatacgggtgctttgaaccggccataacttcttcatatgtcccggggcttgtgtcgtgtgccgcggcgcgcttccatagtggatatggcggtgcggaaggggagccgccatacttacttacttacacaaggacgtcttggtccgccagggcaacgcgcatggaaaggggtttgcgatggtgtgcaccacgctgaatttcgcggagaaatacctgctgaaaaccgaagtcaggttcgttgccggtatgtccggcggtacttccgatgctggtactgatttcgatgtcgatttcggtggcgagggcgacctcggaagcgatcatgccaccggtttcaatcgctcgctatcggccgacgattattgggctgcagccggatatgccgatgagtcattgtattgatggacgtgatgacgcggtaagggcgcgtcgataagtgcggctggtgtcgcggctgatgccgcatctggtgctcgttcggtggtcgcggctgatgttccgtacggaccgcctgcaatggttttgcatcggtggtgcgtcaaaatccggaccgtcgccgacgctgtggacgtttggcggcgttgaaaggacagataatggattgtcaacgccgctgagaacgattggcgacggtggtgggacagcggatgccccaccaccgtcgccaagagtggtacttgtgtcggtggcgtccaaaacatggcccggcaccgacatcagatactctgaacgtcggcggattcccgttctgtgtcccagcgccgacgtttgattcctgcttatgcgagctggcgtcggtaaaaaggcagaacttggttcaccggcgatgtctcagcacgtttgcgcgcgtcggatccttctggagcagcaggaagacgagcgccacaacgagcaggacggcgatggagagcacgccgaacgaggcgttgccggtcagggacgtggtggtggctaccaggaaggtgccgatgattgaggccgttttagggaagaaacaatagtgagaccggggaacccttgaaatcattggggaatcatggtggcgatgcatgcgattaacacatgttgttaacacagatgtggaatgaggaggcgcgtgaggctcgtggtctgcgacgcatgagtgtgaccgtgagctccccagctgatgagcgcaaaggcagagattggtttcacgcgggacttgtctgccgaagagcggcgattgatgcagggtctgtgcgatgctctgcagcagttgctgaacaagcagtaccagcggcacatgtgggactgttcgatagcctgaaaaattttgccgcagacaatctaggcaatgtgcttggcggggatttcaatctcggttcgattggtgatttgccggcggtaatcggtgagcatttcaatgccgatcagttgggtgaaatcaacaggtcgttggcgaccatttgaacgccgaccgacttgacgagctgcaggcgctggcggaggaaaacatctccgccgaccagatcagtcaggtcgctggcgcaattcaggagcagggtgccaatccggacctcggatccattgccgaacaagcaggactgcccgctgacatcatcagccagatttccggactattgggcaagtagtcgccttaagctttaacgctgacggtgttgtctcggctattgcgtgttttgcggtcgctcagcaaatcatatgggtcgtaggtaaccgattgcgagcgctgctgtacacagatgtgtacgtgggtcgaagcggattcgtggtggcaggtgagacaagctgccctcgcatggctggaaaagcttcggtctcgtggagtgcgatgttaaagctgctcaggtcaacggaatggcggaattccgccgatgcaacttgtggttgcgctcgaataaccggcgattgcaacccaaagatggtggcgggtgacatggacggtatgccatagtgagcccatcggccgaacatgacatgataaagattacgtatgaagggacattccaatgagttttcgcgctaacctgcagtacctacgtgcgcaacgcaacctgacccaggaacgattggccatgttgcttggcgtctcgcgtcaggccatttcgaaatgggaatccgaaaaggcctatcccgagatggacaagctgcttatgatctgcgacctgttcggctgcacgcttgatgatctggtacttggcgatgtgagtcggcctgccgcgtcggcttctgcggccggttcgtcgaatgttgactcctcggctgagacggcatcgcctttagccgcttcttccaaaacggcgggcataatcactcctatcgcggagcttgcgcaggatatcactggctacgatgaacatcgccgccgattcgcgctgctgattgccggcggtgttgctgcgattgtcgccggggttggcatcggcaacctgttcgattccggcaattccattctcggagcgacgccgctcaacgattttctgacgtttctgtgcgtctgtgtgggtgtgattgcggggctggcgatgctgattccaggaggtctgtcgcgtattgacttcaaacggcgtcacccatacgtagaagatttctacaccggggaggaccgcagccgagaattgcggctgctggtaatcggcatcgtcggtggcatctcggctattctgattggcattgcggtgacggtgtatgccgatgacatgctcggcgtctccgatggctggcccaacgcaatttttctgctgctctgtgcgcccggtgttttcgggtttgtctactgcggcatgagatacagtctgctcaatatcaacgcatacaacaaagcggccgaggacgaccgcaaggagcatgcgggcgagcaggatttctacgccaaactgaccggcgcggtgtgcggcatcattatgctgatagccacggcgactggcttgtgcctgctgtttttgaaccctgcggcattgcgcggcgattggtcggccgtcgggtcgagcgccgcggacggggcgatgttctggctgccgtggccgattggcggtgtgctgtgcggcgttgcggccgtcgccattcagctgatcaaggattatcgcgagcgtaagtgatcaagtggcgatggtccattgctattagggcccgttgcaggggttgcgagatgtcgcccgtggcgcagagttgccgagggccggcaaatcactcccgcgtcgggtccttttgcaggagcaggaagacgagcgccgcgacgagcaggacggcgatggacagcacgccgaacgaggcgttgccggtcagggacgtggtggtggccactaggaaggtgccgatgatcgaggcggtcttgccgaagatatcgtagaagccgtagtactcgttggcgtggtccttggggatgatcttgccgtagtacgagcgggaaagcgcctggataccgccttggaacatgccgaccagaatcgccagaatccagaactccacggccgatttcatgaagaacgcggcgaagaacacgatgcacatgtatgccacgaccgccgccgtgatcatcgccttgcagccgaatcgcgccgccagacggccgtagagaatcgcgcaggggaaggccacgaactgcgtgacgagcagtgccaccaccagctgggtggagtcgatgccaagctcggcaccgtaggaggtactcatcgaaatcaccgtgttcacggcatcgatgtagaagaagaacgcgatcatgaacatccacaacggcttgttcttcacgattttgccgaacgtgcccgccagttcgctgaacgtgccgcgcacggacgagcccagctggtcgcgggtggcacggtagtgcacctgacgatagctggtaagcagcgggatggtgaacgccacccaccagatggcggtgatgatgaatgaggcgcgcgtgcaagccaccgtggaccagccgaagagcgacgggccgccgaagatcagcgcgatgcagaagatgaacggcacggtggagccgatgtagccccagccgtagccgtgcgaggagaccttgtccatgcgctcgttcgaggtggtgtcgatgagcatcgaatcatagaacgtcagcgagccgttgaggccgatggtcgccagaatgtagacgactaggaacggcagccaggtcaggggcaaggccattgcgcagcaggtgaccacgccggtgccgaagaagcccaggaagaacttgattttcatgccttgcacgtcggcgatggagccgagcaacggcatgagcagcgcgatgaccaaggaagcaatggtttgcgcgtagccccaggcggacacgatgttgccgtccgccggcatcagcgatttggcgtaaatggggatgacggcggtggacagcagcacgaatgccgagttgccgacgtcgtagatgatccacttcttctcgcgggcggtcagtttggcgctttgcggcaccggttcgtggacattcgtgggatcggtcatatgcactcctcgacagtattcaactcaatctatcgtagaagcgcggactagggtagaaaaccgccaaagttgaacggcgggtgaataatgccgggcccctttctaaggggagccagagcaaaaaaatagctcccctcgctgaggggagctggccgcgaagcggactgaagggagcctatcgtggattctctcaaatgaggaaatccactcaatcgtccggaaactattcgccgatcagcgcgatggcctcgtcataatcggggcattgcggcacgccgttgaggctgcgctggatggcgatggatgccgccgcgttggcgatctttaccgattcggccagactatggccctttgccagcatcgcgcacatcacgccggtgtggcaaccgcccgccgaacgggtgtgtacggccttggtcgggtatccctcgatatgaatcgtctcgccacctggctcacgaatccaagcgccgcgggcgccgacacgcaccaccagcggcgcgcgcagtgtagtgcccaagccgtcacacaactggtgcatgaagtcgtcgagtccaccgccgatggtgaccttgctgtcgtcgatcggcgcgcccaggcgctcggccagcgtcatggcctcctgacggttgcaggaccagaccgggcgtgcgagcactaggtcctcgagcatgtggtcattgaccagacgcaacgtattggtgggattgatcaccagcgtgtagtcgcgtgcagccgggtcggtaccggccttgagtaggaatccgtccacgccggtggccgtgtggtccatcagtgtgttgccgctgatgtgcaccacgtctttgggctgcggctccagcgtgttgaacgtgtccgcgtcgccatgagcctcggcgccataggaagcgatgaacgtcttcttcggcgcgccggagctcagcaccacgcggaaaccggaatcctcatcaagacgatcctggccgatatgcgtaatgccgttgtcctggaatgactggcggatgaaatgcgcccacaggccgttgcccagaatgccggcgtgctcggtcggcacgcccatgcggctggccgcctgcagcacgcgatagctgccgccaatggagggcttcggatgatcggccacggcgaatccgccctgtgccggcacctcgtccacattgagcataatgtccacccagacttgacccagtgaaatcacgctgggctcgtgagtgccgatacctcgccggagattcaacatgacagcctccttcgtcgtaagttgcacgaggaccccttcgtcccttgccgtctcttataccgagattatatgagagtttgttggatgcggaataggcagtccggcgtgttttatcgggtaaacgctacgatttgcagcgtaattcgccgctggcgaaccgctggcgaaccgctggcgaactacttgcggaccgctggcgaaccaatgccgaaccgctcgcgaaccgctgatggcccactcgcaagttacgctcgaaccgcgcgtgaaccgccgaagttcgcccatgatacacgcaagagttgcggttgtcggtattgggctatatatttgtgaagttgtgtgttcggcatgtcgggtgaaaccggcggtcgaatgcgtgaaagacttgacacatcaaggttaagggagtccatcatggcagctcgttgcgcagtgtgcggcaagggaccgcagaccggtttcaccgtttcccattcgcaccgtcgtaccaagcgtagcttccgcccgaacctgcagtctgtacgcaccacgattgatggcgagaacactcgtctgcgcgtgtgcgtcaagtgcctcaaggccggcaaggttcagcgcgtggccgcgtgaatcgcgtactaacgtggagcaaaacccgtttgagcttcggctcagcgggttttgttgtttctgcagcctaaagaggccgtgcgaatagaataggccaatatgagcatcactatggacaccactctcgcttcgctggtcaccaacaagcgtcgcgtgtccgcgctcaaatcgctgggaatcgtcactgtcggcgacgccctgacctactatcccttccgcgtcaccgaaccggtgccgcttcgcgccatccgcgaggccgcacccggccagcagatggcatttgccgccgtgatacgagacatgcgcgtggtgccgatgaacgctcgccgcggctaccgactcgaggcgacggttgacgacgccgactttgcccgttcgcgtcgcgtacccggcagcacggcccggctcacgttcttttcgtatcgtaaatcgtatgtggattgggtcagcatgcggctgcgcgccggcacgtctgtggtggtctccggtatgcccagcgaatacatggggcagctgcaattcacgcaccccgaaatcctcactgtcgcgcccgggtcggccggagcaggagcggggcttgagggttacgctcggggtgcggcatccggcaatggtgcgtttgcgggaagtaccgatccgtatgccagtgtgcagtccgcgtatccgccggccgcggctgcctcttccggggccgcgctgaaatacgacgccgataccgtgcaagaggcgcttacccgcgtctgccggccccgcccggtatatcacgccagttcgcgtatctcgtccgaacatattcatgagacgattctgggattgctgtggatgatgggggcccgcacgtcatccacgcctgacgggcaactcgctggcgctgggtcagccggcattgtggctcccacgaccgacaccatcgccgtccaaaacggggaagagaagtccggcacgaccgccgaatccggtgctgaggcgctctcccaatccatcccagatgtgctgcccgaatcggtgcgcaaggccaagaacctcatgcatcgggctgaggcgttcctgtccattcatgatccggcctccacggcccggttcaaggaggccatcgaaaccctgcgctatgaggaggctttcgtttcgcagacctcgctgcttaaagccaggtcgcacgcccataaatccgcggctcactcttgcccgttggtaaccgacagtctgcgcgatcagttcatcgcatccctgccgttctccctcactgcagggcagcagcaggttattcatgatattgccgccgatttggctcatgactggccaatgcagcgtctgctgcaaggcgaggtgggctccggcaaaaccgtagtggcgctcgctgccatgctccaagccgtagacgccggctatcaggccgtgcttgttgccccgactcaggtgctggccgagcagcatgccgaaaccattggccggatggtggagcaactcaagccagcgattccagtcacgttgttgacgggcggcatgaagcttgctgcgcgacgtaaagcacttgctgcggcgtccagtggcgagccgggcattatcgtggccacgcacgcggcgttttccaagaccttccaagccccgcacttggccttggtggtaatcgacgagcagcaccggttcggtgtggaacagcgcgaaagtctcaacgccaaaaccgatgacggcaccacgccgcatctattggtgatgaccgccacgcccatcccgcgcaccgccgccatgacttggtttggcgatctcgatatttcctggctcaccgaattgcctggcggccgcaaaccgattcgcaccgtggtggtcaatgaggccgacgccgccaccatgggccgtatgttcgcgcacattcgcgcgcgagtcgacgcgggggagcgggcctatatcgtgtgcccgcgcattgatgcggatgatgaggggaacgaaggcggttccggcgtttcggcagcagccggttctgcccgcggacgcgccgcagcatctggttccagtgcccgcacagctgcgggcggccgtgcaacgcgcgcggcggccgacgccatcggcatcgacgacccctacgaaaccttcgacgagaacggcgaaaccgtggctcgcccgccattgcatgcggtggccgaaatcgccgaccggttgcagaaactcccgcaattccagggcattcggtttgcgactctgaccggccgcgacaaggatgacgtcaaaacccaggtcatggccgattttgccggcggcgagactccgattctggtgtccaccacggtgatcgaagtcggtgtggatgtgaaacaggccagctgcatcgtgatctttgatgccgaccgatacggcctctctcagttgcatcagctgcgcggccgcgtggggcgtggcggcaccaactcgtgggcgttccttatttcccgtgcggaacccggctccccggccgagcaacggctcgaagtgattcaccactcgctcgacggtgccgaaatcgcccaagccgacttggaattccgcggtgccggcgatgtgctcggcgacgcccaatccggcggcaagtccagcctgaagctcctgcgcgtggtcaaggacgccgacatgatcgccgacgcccgcacccgtgccgagcagcttctggctgccgaccccgaactggcagacgaggtccaactcgccggtgccgtcctcgacttcacccgaggcaacgaaaccttcctgacctccagctgaggctagggctgcgcccccgtaatcgcacgatattgtattttcatctggtaaacagaagtaaatgcttgtgccagagacggattgcatatgcatgggtgcttcgtggaagctgattctgtgttccgttgctgagttacggacgtgctggcgatacgcagctttcgcgttcgacaagctgcgtgggaaaaatgaagtaattctgttccacctttccttcccgcgcttcgagaatcaggttgatgcattgtctggcgatgaggtcgaatggctgcctgatggtcgtcagggatggacacatgcttgccgcaggatagacatcgtcgaaaccgatgatcgataattgttcgggcagactgatgccgcgctgtcgggcggcgcgatagacgttgatcgcgccgagatcgttgaacgcgaagatggcggtcggtcggtcctgctccctcatttccaggagatcgcatgccgccttgtatgccttgtcagatacgtagtcgccaaccttgatgagatgtggatccgcgctgatgccgtttttctgcagcgccgccatgtatccgctcagtcgcgcctgcgaggactgtgaattagtagggccagtgatgacggcgagtcgtcgatgccccaatgatatgaaatattgcgtggcgagcattcccccggtccagttatcaatgcccactcccaatgcgtcagcggagacctggccgaccggatcgacaattacatatgggatgttcctcgtctgcagcagcgattcctcggccgatgagatattcgataaaagaagta

SEQ ID NO: 124 - DNA, 54001 bp, Unknown
  R206_24m  MAG No. k141_35516
ggcagcgttgctgttggagccgccgcaggcgctcagcagcatggccacggagcaggccatggcagcgaaagcaagagctttcttcttcatatgatttctcctattcattaggttgcaggacgtctcagccccgcctcatgcaaacggggctggattccccgtcaccgtgagacttgcatctcacgatgtctcgaacaatccaaccccgttgctgattacctgtcatttttgcgcacttgggagacaagcagtgtattttttgttacacccatgtaaaattcaggggttcttgccggctaggttcagtctttgctgagtttgttaaccaatgtccacatagtggtcatgcccgcggaaaggcctgtccgtaacggttcttgagctgctcgatggagacgtgcgtatagcgttgtgtagttttcaaggaggaatgcccgagcatctcctgcacctccctcaaatcggcaccgccgtccagtatgtgcgtggcggcggaatgacgcaacgcatgggggctgatgtccggcacgccggcctctcgggccgctctgtgcacgatgtcacgggctatgcgttggtcaatacggccgcctcgtgcgccgaggaacagggcgttggcagcacgggacttgactgcatccgttgccgtacgggccagtaccggccgcccctgttccagccaagtctccagcgcacgctgggcgggtagtccgaacggcaccacgcgttgcttgttgcctttgccggtgactttgatggtgcgattggagaagtcgatgtcggcgatatccatcgacaccagttcggcgacacggatgccggtggcatacagcagttcgagaatcgcggcgttgcgctgcgattcggcggtgactcgggcgttgtcgcgcttgtctgcacgggcgggtgcctcactgcggtttacggtatcggccgacttatcagctgtcttgccgctgccgctgccggacgcggctgccgctcccccatcgtccttgtactggtttgttgcaacggcatgttcagcgacatccaataattgctcggcctgggattcggtgagcaccgcgggcagcgtgctgggaatcgagggagtcatcagtgtggcggccgggtcggtggtggtcagcccatgctcataggcccacgcgaagaacccgcgcacggccacggttttgcgggccatgctgctgcgggcgtgatcgcgcgattccaccgccatccagctgcgcagatcatccagcgtgatctcgttcagatcggtcacgccgcgcagctcgaacagatgcaggcatgccgtgagatccgcgcgatacgctttgagcgtattcgctgacaggccgcggttggacttcagataggagacgaaggagtcgatatcgccgtcgaactgcgtagatgacactctcgttctcctccgaattctttatggccttgggttacggccggggtggcgtgttacgccgctccggcacgggtttcaatgtggcaatctgttcctgatggatggtcacgttctgggccgggcgcgaaccattggcggcggcgtcacgcaccatctccaacgtgtatccatcccaggaaaccacatgccccacatagtcgcggaacttcatacggtggtcgaccgggtcaatgccgtcggtgatgcgcaccaccacgcgggcaccggccggaatctgccttggtaacgtcatacgtcatcatccccttagccatccgccgcatcaacttctatgcgtttcctgaaaaacggtacagactaccttactcctttgggtctttcgaacagcggagccacacggtcttctcacgaaaacaagcgggaacttcatccccctcgcgcagccttcttcgtgacaggcggcgaggggaacctgcacacgggctgcatggcggggcgcagttacatggcggggcgcagttggacgatggcctgacgcggatggatgaaaccggtgatggcttctccccggcgtgcggagaacagcaaggtctgctgccagccggcttcggggacggcgagctcgcgttccgggaatccggcggcagttgtgccggcttgctgcgcggtggccgtaccagcttgtgcagcggtgatgccggctcgcgtcacggcggccttgtaccggcggaaggggtcgccttcggcgaagaatcccatcacatcctgctcgccgtcggcaccagcgtgcagttggtcggccatatcggtcagacgtgccgccatgcggcgcagcagcacttcgacgttcagcgagtcttcctcgaccatcgcgcgcgtgcggtccgggtcggtcagggacacgcgggtcatgtccctccagcagccggcagccagcgcggcggcgatgttgcggtccgggttggcgaccagttcgttgatcagcgcggtggacaccacatgcggcatgtgggagatcatcgccgcggccttgtcatgcgtttcgtcgtccacgacgatgacgcggttgccgacgtccttggtgatcatcgtggcgacgtcgaggaagcggcggtagtccgtggactcgtccacggtgatggcccatagggcaccgtcgtacagatgcgggtcggcggcctgccagccggacagttcgttgccggccatcggatgggcgccgacatagcacttccccagcgcggcagccttgacctgatcgcggaccatgcccttgactgagcccacgtcggtgagcgtggtgttcggatggtcgcccataagcggggctagggcggcgaggattgagggcatcgccttgagcggattgcacagcacgaccacatccggctcggcatccatgagttcggagagcgtgctcttgcagaaaatgccatcggcttcggcctgggcgtaggggtgcgagcgatggttccacgcgatgacgcgtacgccgcgctcggtcaggcggcgtgcgagcgagccgccaatcaatccgagtccgacgattccgactgtgtctaccacagcagttccttccttgctccctcggcgtactgccagccttccgacgcgcgattggtgatgtggacgccgccctcgggcagcatccaggcgtcgaccggcgggttcgggcgttcgcggcgtgggtagacggccagggtttttgcccagtcgccgtgtccggcgatctcttccagtgcggtgcggaatcttggctcccagggggcggcgtcaagggtggcgatgaagctgtaggttccgtcgtggcctttgatcgggcgcgagatgaagctggtcatgttcagccccgcatcacgcaggacgtccagcaggtcggcgagcacgccggggccggtgaccagcgggatgaaggtgatgatggtttcgaagtcgccggcgtcattgcggtgggcgcgggcgttgaattcctggaccacatcacgcggggcgatgacaaggaattcggtgtgcgcgccatcgaaatcctgcacatgttcggcgagggtgtcgagatcgtagagttcgccgcagatgctggggccgagcgccacgcggccgggcttcaggtcgcggcaggcggcggcgttggaggatgcgggttcgggctgcaaatggtgttcggcgatgaaccgggtgcattgggccaggccgtgcgggtgggcgctgacggggttgccggtgcagtcgcagatgctgtggccgcgcacggtgaaggcgttgaaggccacgtccacactgatccgggcgaagccggccgcgtcgggggcgtcgatcagcgcgtcgagattcgggaccacatagccttcgacgttgttttcccatgcgatgacgccccagccttggcgcgactgtacggcctgcatgatcgcgggcacgtcgggcagggcggtgaggtcgaagtcgccgagtgtggcgaactggtcggcggccgtcattgccgcctgatgggtgaaggtgccttccgggcccaagtaaaacagtttcatgcgtgccataaggttctatggtagcggccgtaatcccctacgcccgccgatacgcgacgcattcgcggaaatgtgccgccatatatagttacgcgcgcgattcagaatgagtgggaataacgaaccagcgggcgggaagaatgagcaggacgacttggaccagtatcaggccgtacagccagatgtagccggcatgctgggagaagaacggcatgtcgccttggaatccggcgacgatgaccgccttgccggatgtggtggtcagtgccatgccccatgcggtcagcgaggaggcgatgaggtgcagggccagtccgaccgcgcccatgcgcgaacgggcgcaccatgtcgataggccgatcagcagaaatgccagcaccagaccatacggaatactcagttctgcacccatacggtgggcgaacgtgcccacaaaggcggaagccacgcccgccgcaatcgtgatcaacgatttgaccagcgcgttctggcgatacgaccacggacgcagttcagtagtgctcttcacagtcatgcgtttcagtataggtggggatatgacttggcgaggaataaacttggctcccctcagagaggggagccagagagaatggtcggctacagtcgcaccagatcacttaccctgctgggcggcgttctggcggcgctgcttggcgcgccacttgtaccagtcctcacggccgaggatgatcttgcgcacgcggatggactccggggtgacttccacgcactcgtcctcgttggcgaagtccagggactcctcaaggctcatcttgatcggcggggtcagggtttcgagcacgtcagcggtggaggaacgcatgttggtcatgtgcttggccagcgtgatgttcacatccagctcgtcgggcttgttgttcacgcccacgacctgaccctcgtacaccggggactgcggttcgacgaagaagttgccacgggcctgcagacgctgcatggcatacggagtggccacaccctgacgatcggaaaccatggaaccgttctgacgaatggtgatggcaccagcccacggagcatagccagcggagatggaggaggaaatgccggtgccgcgagtggcggacagcagagccgtgcggaagccgatcagaccacgggacggcacggtgaactgcaggcggacccaaccggagccgtggttggtcatgccgtccatgcggcccttgcggtctgccatgagctgggtgacggtacccatgtactcttccggcacgtcgatggtggtgttttccatcggctcgttgaccacaccgtcgatcttcttggtgaccacctgcgggcggccgacggtcagctcgtagccttcgcggcgcatctgctcggcgagcacggccagcgccagctcgccacggccctggacctcccaggcgtcggggcggtcggtgggcaacaccttgatggacacgttgccgatgagctcgcgatccagacggtccttgatcatgcgggcggtgagcttgtggtccttgccctcggtgccggccagcggggagtcgttggtgccgaaggtcatggagatggccggatcgtccacgtggatgagcggcagcggcttcgggtcgttggggtcgacgatggtctcgccgatcatgatgtcgttgacgccggcgacggccacgatgtcgccggggcccgcggactcgaccggggtgcgctcgaggccctgcgtgcgcagcagttcggagacgcggaagttctcgagggagccgtccacacgggacaggccgtaggtcttgcccttctcaagggtgccgttgtagatacggaccaaaccgagtcggccgaggaagtcggaggagtcgatgttggccacgtgagcctgcagcggggcgccttcctcgtattcgggggccgggatggtggagatgatggcctcgaacagcggctcgaggttgtcgttgtccggcaggccaccgtcggcgggctggttcacggaggcgtagccggccttggcggcgcagtagatgaccggcatctccagcagctggtcgaggttcaggtcgatgccctcgtgctgcacgtcgtcggccaggccgagcagcaggtcggaggtttcgccgacgacctcttcgatacgggcgtcagggcggtccaccttgttcacgcacaggatgaccggcagcttggcttcgagggccttgcgcagcacgaatcgggtctgcggcagcgggccttcggaggcgtccacgagcagcacgacgccgtcgaccatggagatgccgcgctcgacctcgccgccgaagtcggcgtggccgggggtatcgatgatgttgagggtgatgccctccgggtggccgtacttggcggccagcggaccggtgtattccacggccgtgttcttggcgaggatggtgatacccttctcgcgttccagatcgttggaatccatcacacgatccggcacttcctcacgctcggaaaacacgtgcgactgctgaagcatggcattgaccagggtggtcttgccgtgatcgacgtgagccacaatcgccacattacggatatctccacgaaccgccatcgaaacctctcttaatgctgattttcttgcgtaatcgttcggtacttgcgttctcgagtacttgctcttggatatcaacctgtacctacacacaaaccgtcacgatgttactggcacaccttgacacacaacgggcccggctttctgagaattagtcacatgtcatctggcttgcgagactttttgtattccacactctcgactcccctccctgaggggagctgtcgccgtgggcaactgaggggcgccaagtgtatcccctgaatctcccctgaatcatccctgagtacagcaccgtcatgggtagttactgagtaacctgatatccaacgatagttactcagtaaccttcacccaaggcaaaccgtctatgcaaaggggatgcggtatggcaatcagagaagcgctattagcactgttggagcgaggcccggccagcgcctatcagcttaagaaggacttcgaccgcaccatcggtctgacttggccgctcaatatggggcaagtttccactacgctgcagcggttgaaccgcgacgggcttattgaagagaccgcgccgactactagcggatccaatgatgtcggcaccgcagcggccgcaccattatggcgattgaccaattccggcgcccaagagcttgaccgatggtggcgctcccccattaccccggaacaacgcggacgcgacgaactggtgatgaagctggccgtcgccgtggaaatacccggcctcgatgtttccgaactcatccaacaccaacgccacgctttgcagcaactgctgcacgacatcacccgactgcgccggcaaacaccgcccaccgaactcgccacacgtctagtactcgaccaccacattttcatcactgaagcggaattgcgctggctcgataccgtggatgagacccagctgcgagcacaactggcgcagcaccccgtttcggcacctctcacggcaagctcagccgcactcaccgccaccattcaatagtgcataggagcacatcatgacttctcccgttctttcttctctcccgcaatcttccccatgcgcgctggaattacacgatgtcactcgcgttcacggcaaagatgcacgtcgtgtcaccgcgctcagtcacgccaatctcacgcttcgcccgggtgaattcgtggccatcatgggccccagtggttccggcaaatccactttgctcaatcttgcgggcgggctcgatgtgcccacgcaggggcacgtgctggtcgaaggccgcgatctggccacactgtcagtggccgaacgcgcggccatccgccgcaaatcgataggctacgtgtttcaggatttcaatctgctgccttccctgagcgcagccgagaacgtgtcgttccccttggaattggatggctggaatccccgcaaggcacgtgaggccgcgatgcaatccctcaatgaagtgggggtagccgatatggctgatcgccgacctgaagacatgtccggcggccaggcgcaacgtgtggcgattgcccgcgcactggtcggcccacgccgtctactactggccgacgagccgaccggagctctggattccaatgccggcatgacgattctcgaagtgttgcgcacccgcgcagatcgcggcgcggccgtactgctggtcactcatgagcctcacttcgccgcctgggccgaccgcacggtgtttttgaaggacggccgtatcatcgatgaaaccggctccagcaatatggatgatttgctcaaccttgaggaaaggggagcatgatggcacgcgcagccctcaataatcttgccaatgccaccgtcggtcgctctgcccaaattccccatgccgctaggccaagccttggcgcacgttgcaaccggtatcgggccgcgctgcgactcggctggcgcgacgcactacggcacaaggcccgcaccctactgtccttgctgctggtaatgctgccaatcgccgcaatggtggcctccatcggtatgaccaccaccataccgcccaccagatcgcgtgcgctggcgacaatcccggctgatacgcaggcggtcatcaccgccaccgccaggccccgcaccggccaaccattccggcagtcacccgaaagcggcggcgtgtggcaggacgatccctcccagcagccggcctcggccgccgagcttgcgaagattctgccgcaacaggatcggctgctcccgtattggcagtcgcccgaactcatcgccatcaccggcaccgcgttgcaacccggcgaacagaccaaggctgggatcgacgtgaaaagcgggaatgacattgatctgaacgcggcctccaccgcgaccatgaccgaggcttcacctgaggcattgcaacgaatgttgccgaagctggtcaagggttcggcgccgcagaataatacgcagattgtcatcagccgcacattggcggataatctcggcgcttctctcggtagcacggtgacgttcgtcgctccgccgttcgatggctggatgagcctggacgggcgcatcggcgaggcggtggccgacactcagcgtgcttggacagtcagcgggctgaccgatgaatccgaagccgcggcatggggcttggaaggctggatgtcagccatattggaatctgatggcgtcggcgtggatggccattatttggtggtcggtccagagccggtcacgtgggcgcacacccgcagcatgaacctgttgcaggccatcgtcatttcccgccatgtgctgactgacggctatccgcccgcatcgcagctctacccgatacagatcgatgcggctaccatgttgaaccacatggtcactgtggtcatcaccatgctggtgggtatgttgctggtactgtttctggtcacgcccgcgtttacggtgtcggcagatcagtcacgtcgtgtgcttgggctcgcggccgcatccggtgctgcaccacgtgacctcagtcgaatcatttcctcgcaaggtctcgttatcggcgccatcggtggcgtgctgggctcggcattgggattcgcgcttaccttggcggccggccctgcgataggcgcattgcgtggatccacgccgctggagatcctgcacggattctcgtggagctcgctgccgatgggtattgccacggcaatcatcattggatttgccgcgacgattgcgccggctcggcatgtggcgcgtatgcatccagtcgatgcgttgaaggatcgcccgacaagagaggaaatcggctacggtgaatccgcgaatggcgtggatacgaagcttcgccgtaatcctttgagactgctccgtgttgcggttggtccgattctggtcttggccgccatcgtatgcgccgcgctcagtctgacattgccattgcccacgctggccgatcacaatccgggcgcggttccggccggaaccgaagcgcatatggctctgcttgttgccacgattttgttggctgtcatagggcttgcgttgtcgattcgcacttttgcacggtggtgcggcaaagcgagttcccaactgaacatcggcgcacgcctggcactcagggatgcagccgagcatcatcgacggttcgttccggcggcatgcgcggtgctgattaccatgtgcatcgcctcgtacacactggtaatcaccggctccatggtggcggaccagcgaaattccacgatgacgatgacgtatggaccgtcggggatggccattggggccgacgtgcatgtcagcaatgagttcgaccgtgctgtggtgtcggatgcgatacaccggcttggcaaagagacgccgatacgcgctcattacccggtgtacaccgaggatgtcaagcgatggtcaaagctcaatgatacgaccgaagtcgattccgacaagttgaacgccgaacacggctacatgtatgccgctgcattgctcccggccggtcacacttgtgataacccaacgatccaagagcaaccggacacgtccacatgggtgggccaggatgccgcttcggccctgtatccaaacgttccgatacgttgtgtgccgatagaccgatcccatcagccaacgtattcgaatatactgccgagtttccgcggcgtgaatctcattatggatggcaatgcgatgcgtttgtccggcttcccgaacgcggatgaggcggcacaggtgcttgatgcgggcggtgtggtggtcggcgatgccggcacaatcgacgcgggaggtatggtgcgtgtggccatttcgccgaatccggcaattgcaaacgaatctcaggccacacatatcgagaagcgcaaggccatctacgtgcgcggcgcgtacccgctggtgatgagcccggcaacagcacaggcgctcggcatcaaacaattgcagtatctgggtgagtatctagacttcgccggtggcaactcccccgttaccgtaaagaaggcctcagcttatgcaatcgaaaatctgccgctggcatccacgagcactgacgggaatcgcctgccgtggggtgacaatatggcattggtgcccattggcctgttggcattgctggcactgatggccacgctcgtttcactgctgctggcccgcacgcaggcccagcgcgacatggccacgatggtcgccgtgggcgcgccaccccgattcctcagacgttacggcctgacgcaggctgcggtgattctgctggccggcgcgccagtgggcgtggtatccggcgtggcgttgggatggctgcatgtggcatggaaccgcaggatcggtgtggacggtcattggctggaaaccgtgccgatctggggattgcaggcggcgctggcattcggcgtagtggtaaccggactgctggtggcgtggctggtcacaaaaccaccgcgcaatctcacccgtcgttccctcgattgatcagtgacatacggcaacccttgccgtgtcattcgggagctataagacaaaaagtggcccacacattggtgtgggccactttagtagcgaaggctgaagtgtaatcagtcttcgagattgaggcctttgcgctcgggcaagcagagggctgctatgcaggcgaggatgaaggcggcggcgaagatgatgaaggccacggccttgttgccgccggacagggtcaggaaccacggcatgaggagcggcgcgatgatggcggcgatgcggcccaccgcggcggcggcaccggcggccacgccacgcaggcgggtcgggtagatttccggggtcacggcgtacaacacgccccacgcaccgaggttggaggcggacagcagcatgccgaacacgagcacgagggccgctgatccggcctgcgagaacgcgaaggcggccacggcggagacggccaggaagatgctcagcgtcttgcggcggccccagacctccaccagccaggcggccaggaagtaaccgggcagctgggcgatggagatggcgagcgtgtagccgaatgacttggtcagggagccgaactggtcggcgagcagcgacggcatccatgtgaacgcgccgtagtaggagaagttcacgaagaaccacgtggcccagatggcgatggtgcgggccaggtacttggagccgaacagctcgcgcgtcttgatcttcggcagcggcttgcccttgggagaggttaccggggccactcccccggcttcctcgaagtagcgcacggccttttcggcttcgtcttcgcgacccttggcttcgaggaatcgcacggattctgggatgtgcacacgggtgacaatcgcgtagagcagtggcagcgcgccgatggccagcgcccagcgccagccccagtcaccggtgttcgggatcacgaagtagccgattatggcggcgatgatccagccgacggcccagaacgattccagcagcacggtcatgcggccgcgctgtttggtcggcgaaaactcggagaccagcgtggaggcgaccggtagttccgcgcccaagcccagtccgatgatcagtcgggcgccgagcagcatgccgagcgaccaggacagcgccatggcgccgttggcgatgccgaagatgatcagcgtggcggtgaacacggttttgcggcccacgcggtcggcgatgaagccgcccaccgccgcgccgatggccatgccgacgaagccgatggacagcacccacgacttttcggtcggggtgaggttgaagtgcgggtcggctgcgatggcggcgaccacgaaggaaacgaggccgacgtccatggcgtcgaatgcccagccgatgccggaggcgacgaggagtttacggtgcgccttgttgaagggcagccggtcgaggcgctcgttgcgggtgagctgcgcgggttgcgctggagtggtggtgctcacgtcgtttcctttctggtaagtggcgtcagatttagtgtcgggtcaggtcggtgtaggactcttcgagggccaggctgacccgttcgatctgctcgcgggccaatggcctgcggaacgtcatgcgcaatgccgatttggcgacggacggttcgaggcccatcgccagcaacgtggcaggaatctcgtggcgcccgatggcgcaggccgagccggatgaggcagcgatgccgcgcgcgtccagatcgaccagcagcgcctcgccggtgacgccgggaaagacgaaggaggcgtgaccgggcagacggcgcacggggtcgccggtcaggtcggcgcggggcacgacccggcgaaccacatcgatgagcatgtctcgggacgcgaccaattcacggtactgcgcctgcatgcgcgcattcgattcattgagtccgatggcgagcgccacggcaccggccacgttctgtgtgccggagcgcaggccgcgttcctgcccgccgccggacagcaccggttcgatgggcgtgcggccgcgtaccagcagtgcgcccagacctttgggcgtgccgaatttgtgtccggatacggacagagcgtccacatcccagtcacgaaaacgaatcggaatctggccggcggcctgtacggcgtccacatggatgggcacgccgtgcgcgtgggcgatgcggaccagttcctccacgggttccacggtgccgacctcgttgttggcaagtatggtggagaccatcgtggtacgttcgctggcctcgccgtcgagctcgcgttcaagtgcgtcgagatcgagatgtgcttgcgcatccacgggaatgcgcacgacttcgaagccgaaccattcgtgcagccatgccgccgattgggccacggccgggtgctcgatggaggagatgatgatgcgcgggcggctgcttgccagttgtttgccatcggtttcgtcgagtccgtagaccggccgcaagcccagtttgcgcatgcgcgccatggcgatgcctttgatggccagattgtccgattcggtgccgcctgaggtgaagatcacgtcatccggccggccgcccaatgccgcggcgaatgatgcgcgggccgcgtccagcgcgcgggccgcggttttaccgggctggtgcacactggccggattggcgtaggcctcagtcaggaacggggtcatggcctcgatgactgccgggctcactggttcggtggcggcggcgtccaggtacagttcgccgggttcaccggatgcgttgggggtatcggccatgactagttccaatccaatccaaggtcgatgctgcgcaccgagtgggtgagcgcgcccacggagatcacgtccacgccggtggcggccacggctggcactcgctccaggctcatgttgccactggcttccacgatggccttgccgtcgatgagctccacgccgcgacgggtgtcgtcgagcgagaaattgtccagcatgatggtgtccgctccgccggcgagcacggcgggaatctggtcaaggcggtcgacttccacttcgatatgcgtggtgtggcccacctgttcgcgcacgtggcggatcgcgccggccaggtcgatgccgcgcgcggcgagcgccgccagatggttgtccttcatcatgaccgcgtcggacagtccgtagcgatggttgtggccaccgccacagaccacggcgtatttctcgaacgggcgcaggccgggcgtggttttgcgcgtatcgacgatgcgggtgcgctcgtagcggcgtggccgggtgacgggtccgtcatagtcgtcgccgtagatggcgttcaccgcgtccacgaaggcggcggtcatggtggcgatgccgctcatgcgctgggtgaagttgagggcgatgcgctcggcggtgagcaggtcgcgtaccgggccttccacggtggcgagtatctggccgcgctggaatcgctcaccgtccttgacggtgacggtgacggtgacggccgggttctgcgcggcgaaggctgcggcgaacacgtcgatgccgctcatcacgccgttttcgcgcgcggtgaggtgggccgagccggtttcgtccgcggggatggtggtctcgcaggtgatgtcgccgtagggcgcgtcttcggcgagcgccgcttcgacggcgacgcggatgatgtgtgatgtgagcatgggtcagtccttgatgtaggcaacggagtgggcccagttgtcgactggctcgctgtagtcggtgcgggcgtgggcgcctctcgactcggtgcgggcgagcgcggcgatggcggccacatagcctacggtgagcatgttgcggttctccaaagcctcaacgctacttgcagcgccatcggcgtttacatcagcctgggcgtttgcggcggcgaggccttggccgagttcggcgatggcggttttcagtccggcctcgtcgcgcagcacgccgacgccatgccacatggtgttctggatgcgggtacggtcccagaccttgtcggcggcggtatcgtcagcagcagccgtagtggcaggagcggccagcgcgatcggcgcatggtcgaacacggcaccggtggcggagttcaggaacggttcgggtgcccagaccgcgtcgtcaccgtccgcgacggcggcaagaccggcgcggcgtccgtagacaagtccttcgagcagcgagttggaggcaaggcggttggagcccatgacaccggtgcgggcgcattcgccggccgcgtacaggccggggatggaggtccgggcgtccagatcggtgcgaatgcctcccatgtagtagtgcgcggcgggcgccaccgggatcggctccttgctccagtcgaagccaagcgaacgcgtataggcatcgatggtcgggaatcggtgggccaggaagctggccaggtcggggttctcgcgggtcatcggcgagacgtcgagcatcacgggcttgccaccttgcgcctgcatcacgcggaagttctcgcgggccacgacgtcgcgcggtgcgagttcggcgcgcggatcgatgtccttcatgtaccggtggccgtgttcgtccagcagcaccgcgccttcgccgcgcacggcttcggagacgaggacgtgctcgcccacggccatggcggtgggatggaactggtagaactccagatcggcgacctgggcgcccgcacgccatgcggcggcgagaccgtccgcggtggcgaccggcggattggtggtgtacgggtacatacgacccgcgccaccggtggccaagatcacccggccggcggccagatccttgtcctgcccgtcgatcagcaggcggacgccggcgatgtggccgtcccgcacgatgaggtctttgaggaaggcgttctcgatgatgtggatgcgcgggttcttgcacaccatggcggagacgtccagttcaagcactttgccggtggcgtctcccccggcatgcaccacgcgggcgcgcgaatgagccgcttccaggccgcgcagcatgtgtccctgcgcgtcgcggtcgaagtggacgccggccgcggcgaactcgcggacgcgctccgcaccctcacgggtgaggatgtccacggccttcgggtcgcacaggccatggcccgcggccatggtgtcggcggcgtgcagcttcgggtcgtcgtcggagaaaatggccgcggcgatgccgccctgcgcatgataggtgttcgattccaccagtccggccttggttaccaaggtcacgtcgtgtccggtgccggccacggccagtgccgcggacagtccggcgacgcctgcgcccacgacgacgatttcagtgttgctcattgtgttgctttcctctgtttttgcgtcatctgctcccctcagtccgctacgcggacagctcccctcatgtacgaggggcgccagggacggatcacgggtgaacgcgcagcatgcgctccagtgccaccttggcttcgcgggcggtgtcttcgtccacggtgatgcgattgaccacgttgccggcttcgaggttctccaaagcccaagccaggtaagccgggtggatgcggtacatcgtggagcacgggcagaccaccgggtccaggcagaacacggtcttgtccgggtactgcgcggccagacggttcaccaggttgatttcggtgcccacggcaatggcggatccggcgggtgcgttggcgatctccttgacgatgtacgcggtggagccagtaccgtcggcggcgtcgaccacctgcatcgagcactcggggtgcacgatcaccttgacgcccgggtatgccttacgggcacgttcgacctgttcgacggtgaagcgctggtgcacggagcagaagcccttccacagaatcatcttggcgcgggcgtaatcggccggatcggcggcgccgccctgtgccttgaacggatcccacagcggcatctcactcagcggaatgcccatcgcgcgggcggtattgcggcccagatgctggtccgggaagaacagcacgcgcttgccgcgggcgaacgcccattccagcacggcgtgcgcattggacgaggtgcatacgatgccgccgttgcgtccgcagaacgccttcagcgcggcggatgagttcatgtaggtgaccgggatgatctgctgcaagccatcggcgtccggctgggtgccgcagatctcgccgagctggtcccagcattcctggacctggtcgatgttggccatatcggccatcgagcatcctgcggacaggttgggcagggtcacgctctgttcgggcgtggagaggatgtcggcggtttcggccatgaagtgcacgccgcagaacacgatgttgtcggcgtccgggcgttcggtggcgttcttggccagctggaaggagtcgcccacgaaatcggcgtgcttgatgatctcgtcacgctggtagaagtggcccagaatcaacagtttggagccgagacgctgcttggcgtcggagatgcgctgctgcagttcctcgtcggaggccttgcggtactcgtccggcagcacctgctggcgcggcgcgttggcgggcagacggtcgagcatcgaggcaccgggaccgtagctgggtgtggtggtgtcgaagtgccatgggtcctgggtcagtcctgcatcgcaggtgctttgcgcgcccagcttggcgatgatctcgtcaacggacggcgcagtggatagtgcggtcatagcggttcctttcctatatacgtctgtgatgccggcccgaagcgggtcggcgggaaaaatcagatgcgcgcggatgggatcagcgcgtcgagagcgtcttcacgctcaccttgtctggacagttccacgatgtcgtcgccatcggattcgtggggcgtgccgttctcgacaggtcgtttggggatgtagcggtagacggtggccggtcgttggcggccttcgcgcaccttctccccggtgtcttcaagatcgcccgaggcaagcattttgcggcggaagttcgccaagtcgagggtttcgccgccaatcgcctcatagacgccgtgcagttggcgcagggtgaacgtggggccgagcagtcgggtggccacgtcggagtattcgattttggagcgcaggcggagcagcgcgtagtcgatgatctggcgatggtcgaacgccagctcgggcagttcgtcttcggggaaccatcgtacgttgtcaccatcctcgaaacccgcggcctcggtctggccgacgagcgcccaatacacgacggataccatgggcaatccgccatgggaccgggtcgggcctccaaaggtgtacagctgttcgaggtatcgcgggtgcaggtctgtggtcgattcgagggccgcgtaggcggactgttccaacgaccggtcggagcgcaggtcgccgccgggcaacgcccagcagcccaggaacggctgacggacgcgcttgaccaggggcagccagagacgggaatgggccgagttcgcggcgttgccggaatcggcggcactgttgccggtatcgcctttcgggccgagtgccagaatcaccactgacacgccgacctgtggcggtgcgctgcggcgctcggacacattgccgaatcccatgccatgcctctttccataccggttgttctccccgcattgagagcatagcactacttatagtcacaatgaccataaatcacatattggatggtctagcgcacgaatattggtcaggtagcgggccccaatcgctacgaaatcacgtccgtgtcttccgatttcgactgtgtcatttcggcgacgggcgggaggaacggcgctagggagggtagttcgtcgagactcttcaggcccatttggtcgaggaaggattcggaggtgaccaaaagggccgcgcgggattcggggtccacgccgtcttccttgataaggccgcgtaccgtgagcgagcgaatcacgccatcggagttgacaccgcggatcgcggccacttgggctcgggtgacgggctggcgataggccacgatggcaagcgcctccagtgcggcctgacttagtctcgcagtctggccgtcggtgacgaatgatgagacgaccggctcgaacgcggcgcgactggcgaactgccagccacgagcggtgcggcgtagttcgaagccgcgcgggcggatgccacgggattcatcgccctcatagtcatcgtgcagggcttgcaatgccccttcgactgtgttgcggtccaatgccaaaatgcgggccagctcggtggcggtctgcggctggtcggcgaccatcagaatcgcttccagacatgcgggcagcccgccgggaaaatcgtctaccgtgaaatccacgtattcggggcgcgtctcctccactcccctcacctcggcctttgcggattcagccgtcgattcggcatccgccatgtgctcggttgcattcgttgcgtcaatccgttcagtcaccagtcgccgtccttacgcaaaatcgccttcggaaatgttcacgtcgttcatcgtttcgtctacgccggatacccacctcaggtgcagttcggcaaacggaccatcttgctgatactgcagcacaccttgtttgaagaacacgagcacggccatgaaccgagccaccacctcaatacgagaagtgcagtcccgggtcaattcgctgaacgacatcgactggtcgcccttggattccagtgctgcaatcagccggtcgcgcaccaccagcgattgggcccgcagatcgaccagcggcacgtgcagctggtggatcgatacttcggaggcgggcgcgttggcgatgacctgggcggccagttgggcgagttcgagcggggtcagcgtccataccggctcaggcaacatggcggcaatgccctcgtccatggccgccggatgcgggaatcggccggcattggcggcgatacgcgcccggaaatcaccggcggcctgcttgtaggcgcggtattggaggagtcgggcgaacagcaaatcgcgttcgcgcagcgcctcgagactttgctcgtcgtactggttgtcttcgccgccgggcagaatcgccacacttttggcctcgaccaaaatagaggcgatgtcgagaaaggcgctggcctcatccatgtttttcgtgaagtcgagcccgcgcacgtatgtcaggaattcctcggtgatcgaggagagggaaacttcggtcagctcgagtttgttgttggcgatcatgccgagcaaggcatcgaacggaccggaatagacctcgaggttgacccggaagccggaagtggcggattcctccgtgctgatttcggcttccgcggagctcccctcagtctcgctacgcgagtcagcttccctcagagaggggagccgagaaagggaagtctcattcatcgtttatcgaaacaatcgttacgccacgatgccgcgagcaatgagctcacgtgccacctcacggtattcctttgatgtcttgtgctcaggggcataaaccaccacgggcgcggcggcaaccgtggaatcgggcagtttgatggagcgggagatgaacgtgtggaacaccttttcgctgaacgcctcgtaaatgcgctggcagacctcttcgcagtgcagtgtcttggtgtacatggtgatgagcacgccatccacttccaatgcgggattgatgcgggactgcactttttcgatggactgcataagtagggccacgccacgcaaggcgaagaattcggcggccacgggaatgatcacgccatcagctgcggcaagcgcgttcacggtgagcaggccgagcgatggctggcagtcgacgatgatgagatcgtattccgacttgagcttgcgcagcacactgttcaggatctgctcccggcccacttctgtgaccagttggacctcggcggcggacaaatcgatgttcgccggaatcacatcgatgttctcgaatgcggtgtgctgcaccacatcatgtgggtccacggaaatatcgaacagcgcggtgtaaatcgtgttctccacggtattcgcgttgacgcccagtcccacagtggcggcgccctgcggatcgaaatcgacgataagcacgcggcggccatactgggccaacgcaccggcgatattgatggagctggtggtcttacctacgccgcccttctggttgcacatggcaatgacacgcgccggaccgtgctgttgcagcggttcgggtgcggggaaggtttcgtattcacgtccaagcaaatcggtaggcatactgtctaccttatcaacatccgggttcgctgggggtgcaacgacatacgttcccgccataggcagcgttccttgacggaatgcgctgtctttatcgcggatgtctcgccagtcgtccatcgttgccctcgccccctttgccgggaatacctgctcgcctatcctaatgtactcgccgggctcgcctcggaacaccgttttgcagcgggcattccagtgttccgaggtttatggatctcgtctcgtactatgtcgatgcgcttactcggtgcgcagtgcggtggccgggtcttgcttggctgccttgcgcgagggaatcaggccgccgatcagcgtgagcaccacgcttaggatcaccagcaccacgccgccggtcaccggcagggcggcattgacgtccgcattgccgatgaagtgatgcaacacggcgttgatcggaatatcgagcagcacggtcaagcccacgcccaacaggccggagcataggccgatgatgccggtctccgcattgaacacctgggacacgttgtgcttcgaggcacccattgcgcgtaggatgccgatttccttggtgcgctccagcaccgaaatgtaggtgatgatgccgatcatgattgaggaaacaatcaacgagacggacacgaacgcgataagcacgtaggaaatcacgttgacgatggtggtcaccgagctcatcatgagccccacataatccgtgtaggtgatcttgtctttcttcgagacggtgttgttgtagtcggtaatcgcgtcggcgatgtggtccttgtcttcgaagctgtcggcgtagacgttgatcgagctgggcgcgtcacgactcaccacaccgaatgcggcgaggttgtcgtcgtaggtgccggtcgacacgtactggtcgtagatcgcgacaagcacgtcgttcgaagccgtggcgatatacgagtcgaaactgtcggcgagctgctgttcgctcatcgcggccatcgcgtcggcctgatcgccggcacccgccgcgccagcgccagcaccagcaccagcaccagcaccagcggcatccgatgcgcccgtaccggaccgctgcccggcactcatcatcgacttggccatgttcgccttctgcgtcacgcccagtgaaaccacgtaggtgcgcgcgtcggccgccttggtggcgtcgtccgagggcgagaacgtcatgccgttgagcacgttcgtgttcgggttggccttctgatcggtgacgatggcgctggaggccgcacggtcgatcagatcattggtcagagcgcgcgtgtatcccacgccagcggccaacggtgtggccgaagcatccttcttcgccttgacgacgcccaccaccttgagtttggtggccgtttcgaggcgctgttcgattacatccttgtcgttgccgatgaatcggtagtggccgtcatcgcccttgacgtactggtcggatgccggaatcatgtacagcgtctggtcgagcgccttagcatagtcgatcttgtcttgtggagtgctgaccttgtcgccggcgttgagcttggacatcatctcgtggtagtcggaggcgggcagcaggccgagctcgtacagcgtggtcagcggcacgctgttgttgtcgtcgagcaccagcaccacctcgtccttggacttcggccatgaaccgttgaccacttggtagttgtcggtgatgaccttgcctacgagcttgctgtcgtccgctccaggcatgatctcattgaacgagtcgggcgcggcgttctcatcggttttgccggtcagcatcgacatctgctgcgaggtgatcgacgaggtgccggacatgccggacgagcttgtggacgccatctgcgaggccattgaagtggagtcgctggcaccgatcgtcacgccgtccgcattgaccagcgtgccatcggggtcgtggtcgaacacggagaatttcacgtcatacgtgtactggataccggcggaacccacatactggtgaatctcgctcttggaattatccaggtatttcttgaagcgggtcaggttgttttcggtaatcgaactggtcaggctggatgcctgcttgacgctgcggtcgtccgggtagatgccgtcggttctgtgcgtcttgccgccgtatccgtcatcgccgcccatctggccgcccatcatgctgctcaggtcgaaggtctgggagtcgatggtgatcgggtaggcggtcatcgtgtcacgctggatgtcgctgatgtatgcgttcacgccagtcgacaccgatagaatcagcgcaatgccgatgatgccgattgagccggcgaacgaggtcagcagggtacgcgccttcttggttttcagattgttgaagctcaacgccagcgacgtgacgaacgacatcgacgcgcggcccatcgtcttgtgcacggccggctgttcggccgtctcatccacgacaaacgggtcggagtcggagcgaatcacgccgtcgcgcaggttgacgatgcgcgtggcatattgttccgcaagttcggggttgtgggtgaccatgaccacgaggcggtccttggccacgtccttgagcaggttcatgatctgcacggacgtgtccgaatcgagcgcgccggtcggctcgtcggccaggacgatgtccgggtcgttgaccagtgcgcgggcgatcgccacgcgctgcatctggccgccggacagctggttcggctttttattgatgtgttcgccgagtccgaccttctccagcgccttgcgcgcacgttcgcgacggtcggccttgccgatgccggaaatcgtcagcgcgagttcgacgttcgacagaatcgtctgatgaggaatcagattgtagctctggaacacgaagccgatggtgtggttgcggtacgaatcccaatcgcgatccttgtattggcgcgtcgagatgccgttgatcaccaaatcgccgtcgtcataccggtcgaggccgccgatgatgttgagcaaggtggtcttgccggaacccgagggacccagaatcgcgacgaattcgctgtcgcgtaggttcaggctgactttgtcaagcgcctgttgaacgaaatcaccggttttatagcgcttcgagatcgatttgatctgcagcatgaatacctcttcctggctgacggttcgctgttatgtactgtattgtcacgccttgaatttccggccgactttggtgctccccccccccgccgcgattccgctatgggcggacgcgtcgcaaaatggtgtgtctcaccgcgctctagggtgtgaggtcagatacgtttcgatcagggtttcggggcttacgtgtgtgtagatctgcgtggtggtcacgctggcgtgcccaagcagttcctgcacggtgcgcacgtccgcgccgccttggatcaggtgcgtggcgaaggaatggcgcaaggtgtgcggatggagtggtttggtgatgccggcccgctccccggttgctttgacgatttcccataccgattgccgcgagatgcgcttgccgcgtttgttgagaaacagtgcgcgtctctcgggaatcttggcgctggagcgccgttccagctcgccacgccccgcattgaggtatgcggtgatggcccggcatgcgtagctgcccaatggcacaagccgctgcttggagcccttgcccatgagtcgcgcgatgtgctcgtccaggtcgatgtcgtccagattcacaccggtggcttccgagacgcggcagccggtggcgtacatgaattcgagcagggccttgtcccgcaataccaccggatcggttgagccgccggctgccgccgcgtcgagcagacgggttacctcgtccacggtgagtacgtcaggcagggtgctggcacctttgggtgccttgactgcggcagaaacgtcggcagtcaccgcgtgctggccgagcgcgaagcgatggaattcatggatcgaggccagtcttcgggctttggagcgggcggactcccccgcctggtcaagggcggcgatgtagtcttcgacgtcttgtttggttatggcgtccggttcgtggatgccgcgggtttcgagccaatcaatgtatttggcgatatcggattcgtaggcggtgacggtggccgtggcgagtcctcgctccacgccgatgtggacgaggaactgctcggtgagtctggtgaatccgttggtcatgtgtttgttctcttccccacccgctgcgcgggagcccccctcgccagagggggctaataataggaaaccccgctcggaagcggggtttctagtgtgaagtcacgacttcaagcaatcaggcctcaaccggagcgttgacgtcctcaggcagggcggccttggcggcggccacgatggtcttgaaggtgtccgggtcggagacggcgatctcagccagagcgcgacgatccagctcgatgccggcgagacgcaggccctggatgaagcggttgtaggtgatgccctcagcgcggacggcagcgttgatgcgctggatccacagcttacggaaatcgcccttgcgagccttgcggtcgcggaagttgtagttaaaggagtgcagcagctgttccttagccttgcggtacaggcgggagcgctggccacggtagccggaagccctctcgagaacaacgcgacgcttcttgtgggcgttcactgcgcgcttgacacgtgccataatctattcctcagctttctaaagtcttattatttccgggtaagccctatgctcacttctgcagaagctggtgcagcttcttggcctggccgccgcgcagcacatcgtcggcggacagttcacgacgcttgcgagcggacttgtgctcgaggttgtgacgcatggcggaaccgacatgcttcaccttgccggtgccggtgatcttggcgcgcttggaagcggcggaattagttttcatcttcggcattgctgccctccttgctggtttgcttcttgtcggaagtcttctgagaaatcgcggactgcgcgtcggccgcggcctgagcctgagactcctgcttggccgcgagacgagccgcctggcgagcctgacgctcggcgcgggactcggcgccacgacgacgctgctcggacggggtgtggaccttcttgcccttcggcgcaagggtcatgatgatgttgcggccctcctgcttcggcttggactcgacggtgccgtattcctcgacatcgtcggccagacgctgcagcagttccccgccaccaatcgggcgggagatctcacgaccgcgcaacatgatggtgaccttgaccttgtcgcctccgttaaggaagcgggtcacatggcccttcttcacgtcgaaatcgtggtcgtcgatcttcaggcggaaacgaatctccttgatttccgcggtgctctggttgcggcgagcttcacgagccttgatcttctcgttgtacttgaacttgccgtaatcaatgagcttggcgaccggaggcttcgcgttcggggccacctcgacgagatcgaggtttgcctccttggccaggttcagcgcgacggaagtcgcgatgacgcccacctgctcgcccttcgggccgatcaggcgtacctgcgggacgcgaatctcgtcgttaatacgtggttcgtcgctgatgatgactccaatcctctacttcaattccgtggcgggacctttgctggagtcctgttcaatgctttgggttcatggcaagccaaaaccagcgccaatatgcgctcagcttctgcagacgcatatcagttctttgcgtcattcctgattgcgcgttgtatatcgcaatcgctaggctgtttgccttgaacccgaggccttgaaaggcttccaggtggggttgccccgctttcttgatttctcaagccaaataggaatcttaccacatgcccggacattcgcggaccgtgtgtcgatgggtggataccggctacagtaggcataatgactcaggtatgcgtgatttttggtgcgggcgaatactatgcgggcacgcccgtggttcccaccggtgcgtatgtgattgcggccgatggcggactcgaccatacgcgcgagttgggcatcgtgcccgatgtggtggtgggcgacttcgattcgctggagggccggccgccccgcaccgatgtgcgcaccatcgcgctgcccgcgttgaaggacgacccggacatgctttccgcgctgaaggtcggctggtcggcgggttgccgcgagtttcacgtgtacggcgggcttggcggccgtattgaccatacgatttccggcattcaactgatggcgctgctggcccgacacggggcaagcgggtatctgtatggcgacgggctcatcgtcacggccatcaccgatggtaggctttcgttccccgcgcatccggtgcccgaggacggccgcatggtgtcggcgttctcccactccgatgtttcgcttggcgtgaacgaaccggggctgaaatatgagctcaagaacgacacgctgaccaatacggtggtgcagggggtcagcaacgagttccgcgacggcgtggacgcggccatcagcgtgaaacgcggcacactgatcgtcaccttccccatcgaagtggcgttgccacaggtgagcagattccatgaattcggcggcgatatcggcgagctggacaccgaagtgtccaagctgctggttcgctgacttgcatgccgcgcgcttgctcgtgatgattcgagacattcctccaaaggagaggaaaatcacatgtcggttgcgggcaatccaaattgtgagcgctcacaaaaaatacggcatttttacccaaaacgcacgctgaaacgttgccatgtgtacagagtcggcattacagtagcaactgttggtaaacaatggcccggtgtgccaaagcgcgccaaggccaccctacaagggagaattacatgacagttaagattggtatcaacggcttcggtcgcattggtcgtctcgccttccgtcgcatcttcgagctgcaggctcgcggcggccaggctggtgacattgaagttgccgccatcaacgatctgaccaccccggctaccctggcttacctgctgaagtacgacagcacccacggcaccttccgtcatgacgacggcaccccggttgacgtcaaggccaccgaggactccatcatcgtcgacggcaaggaatacaaggtctacgccgagaaggacgccaacaacattccgtgggtcaagaacgacggtgtcgagtacgtgctcgagtgcaccggcttctacacctccgccgagaagtcccaggctcacatcaacgctggcgccaagaaggtcctgatctccgccccggccaaggatgacaccaccccgaccgttgtgttcggcgtgaaccacgacatcctcaaggcttccgacgtgatcgtctccgccggttcctgcaccaccaactccatggccgccatggtcaagctgctggacgagaagttcggcatcaaggccggcttcatgaccaccatccacgcctacaccggcacccagatgctgctcgatggcccgcgtggcaccaagaccggccgcaacctgcgcgccgccgccatcaacaccatcgcccactccaccggcgctgccaaggccatcggcaaggtcgttccgtccgtgaacggcaagctgcagggccacgcccagcgcgtccaggttccggacggctccgtcaccgagctgaccaccgttctgaacaccgagaccaccgccgacgagatcaacgaagccttcaaggctgccttctccgacaccgattactacggctacaacgatgagggcatcgtctcctccgacatcctcggcgacacccacggtggcgtgttcgacccgacccagaccgacgtcaacaccattgacggcgtgaccctggctcgcaccgtgtccttctacgacaacgagtacggcttcacctccaacatgatccgtaccctgctgtacttcgctgagatctccgagtgaaccactgcggtctaggccgctacggttcgtttgagaactaagctgtgagacccccgccttgtgcgggggtctcttcgtagtagaacggtaatcatggcaaagaaaagcaagcatgataagggcgcgggttccaccccggcgacagtccaactggagaaggcgggcgtggaattccacgtatacgaatacgagcactccaacgaccatatggatgacggctacggcgtggaggcggccaccaagctcggcttcgacgagcatcaggtgttcaagacgttgatggcggacaccggttcggagcgtgtggtgggcgtggtaccggtcagcggacatatggatttgaaggccctggctgcggctgtaggtgccaagaaggcctctatggccgatcccaaggtggcaatgcgtgaatccggctatgtggtaggtggcatctcgccgttgggccagaagacacgtcataagactgtgttggatgaaagcgccctgcaattcgaccagattctggtctccggcggcaaacgcggactgtccgtaggcgtgaacccgcaggacctgctcaaggtcttgaacgccgttgccgcaccaatcggcacgtggtgaccgttcttggcttccctcggtgaggggagccaaggatgactacttcttcctgcgcaactccgacggcagcacgaagtgcatgttttccttgatggtttcgacggacttcataccggtgaagcccaagttttgcagagcgtcaatcacaccggacaccagttcgtccggcacggaggcacctgaggagatacctacggattccagaccctcgaaccatgccgggtcaagctcgctggcatcatccacgcgatacgctttgccgcgctctcccaagccctcctgcgccacctccatcagtcgcacggaattcgaggagttggccgatccgacaatcaccacgcaatcggactgctgggccaccagtttgaccgcagcctgacgattcgacgtggcatagcagatatccgaactcggcggctcttgaatccacgggaacttggccttcagcgcggcaatggtgccggcggtctcatccacgctcaacgtggtctgcgagagcagcaccagcttgttgtcgggcgcaaaatccaacgaatcgacatccgattcatgctcgatcaagtgcacatgttcggggttctcccccaccacgccgactgcttcatcgtggcccttgtgcccgatatagacgatttcatacccctcgcgcacgaaacgcagcacctcacggtgcaccttacccaccagagggcaggtggcatccaccacatgcatgccacgacgttcggcttccgccttcactaccggagatacgccatgggcggaaaacaccaccggaatacccgcttgggcagcagcatccggaatctccgccaattcctggacgaacaccgcgccttgcccggccaagtcctcgaccacatgcttgttgtgcacgatctgccggcgcacatataccgggggcagcccatcctcgcgcgtcagctttccggaagcctccgcggctttgagaatggtctgtacggtaagaatcgcacggtccacacccgcgcagaagcctcgcggatcagcgagcacaacgcttttggtcatcggaacctcctgaacgtcaatagtgttttccagtgtaaagcagggattacaggaatctgccgtcacaacttttccgcgtctcccacgaatcaccggtttccaaggaatccacgtgcttctcgcatgatggtgtgagactcgtcactccacgtattgctaccgtgtctgtacgaattgtttattatatgccggctatcgccaatccccgcctcgatagaggagacgcgctagactggggccagcgatagcaggagctaccggcccaccaacctcactacgggagtgattccatgacgagtaaaacaccacgcaccggaaatcagtattcgattcactatggcgattattccgccgtcatctgcgaactcggcgccaagattcgccgattcgattatcaaggcaaggaaattttctgcccgttcggagtcaacgacctgacccccacctgtaacggctatgtgctggccccgtggccaaaccgcatcgaaaacggcgaatacgatttcgatggcaagcattactgcgcgccggtcaacgaatatcatcccgcaccgcgcaacaacgcgaaccacggatacgcctaccactacatgtggaagcttgaatcgttgaccgatagcgccgtgacgctttcactgcgcttccccaacctggacggatacccgttcgatgtgaccgtgaccgtcacatacgaactcggcgacaacggcatgaccgtgaccgtcaatgcccgcaatgatggcgacgagccggcaccgtgggctctcggcctgcatccgtggctggccaacggcaagcagggcgcgacttccgccgagcgtgacgccgactccgccgcctgccacctgcagatcaaggccgccagtcatgtgacggtgaacgaggcgctgattcccaccggcaccgaaccggttaccggcatctacgacctgaacgatggcccgacgctcgaaggccgcgcctttgatgatgcctgggtcgacgtggagcgtgccgccgatggtacgaccaccaccacattcacccgcccggacggtattgaagtgaagctcattggcgatgagacgatcaatgcttggcagtgctacaccgccactggcgcgccgttcgccgagcatccgtatggtatcgccgtcgaaccgatgaccgccccggccaatgccttccgcactggtgaccacttggtgacgctcgcccccaatggcgactacaccactgtggtccgctacgaagtagtccagaagtagttctgttacgctggctcccctccagaggggagccaattttttatccttatgtgccgccgcgtcttgggacttgtgcgatacgattgtgagcggtaacaatctgtttcacaaaggagtgtgcactatggctttgaagcctcgcactggcaaccaatatgtcatctcgtccggcgaatggagtgccgtcgtcaccgaactgggtgccagcctgcgcgagctgaagtggcgcggcgaagacctcatcgtccccttcgacccgaacaaggtcatcccctgctgcaacggctgggtgctggcaccgtacccgaaccgcgtgaccaatggtcagtattctttcgatggcgaagactaccagatgccgatcgacgagttcgaccgccaatcctccctgcacggctacgcctaccgctacatgtgggagctcgttgatttgcaggaatcacatgtgacgctctcctggcgctcccccgacatcgccggctacccgtttgatatcaccatcaccgccacttatgcacttgacgagaacggtctcacggaaaccttcaccgtgcacaacaacgacagcgtgaaggccccatgggcatttggcatccacccgtggctggccaacggcaagcacgccaccggtcaggccattaccgccgacaacgagtcctgccgtcttgaactgcactgcgatacccacgtgaccgtagacgaacacctgctacccaccggcgaagagccggtttccggcatcttcgacctgcgcgataaccccacgctggagggacgtggcttcgacgatgcctggaccgatatcaccaaccgcggcgaagacggcagcacttccgccgcgttcacccgccccgacggcatcaaggtcacgctgaccggcgacaagaccatcaactcctggcaggtgtgcaccggcaacgaaatcggcgggaaggctcgtcaggccggcgtggccgtcgaaccgatgaccgcctacgccgacgccttccgcaccggcaaggatctggttgtgctcgagccgggcgatgactacaccaccgtggtcaccttccacgccgaacaaatctgaaaaaccgaataaccaagcctgacgatcatcgccacatggacacccgtgttgcatcacgtcgtacttatgtggcataattccgaaggcttatttttttactgcagcaaaggagtccatcatgggcatgcgcggacgtaagcgcaaggatcgtcgtaagaaggccgccaaccacggcaagcgtcctaacgcctgattcttcgcgtttcttatagaacgctcaaggcccgtctgatgatacatcagacgggccttgttgtatatgtcgttacttatcttcgccgcagcagtgatcaagcgtggccttgagccgggccatcagacattcgggcgccacatccgggcgcaagtaggcacgcaacgcggcaatcaacgcctgttcacgctcgtcgcagcaggtacgggggtcaaaacagtcgccctccgtaacgatatgcacgtctgtctggaccgacgcagcggccgagccggtatctactgaacgatgatgcaccgccgtgatatgcacttcggtctggcttaccgtgccatcggccgccgtacgggttatggagatatggcgagtacgctctaccggctgatcgttcatcagatctcctttcccgaaagcttgcttgactgttgtggcgtgtgggcgtgagtcgcatgactatgtctcactacggcttgcgtgtcgccattgctgccaacagtttgttcactactttcattatggccggaatcggcgattcgaccaacgttttcgctcaacttcgcggatggtgaaccagccgacgaaccagtcgcatacccgcgctctttcgcatacgaggcgagctcacgcttgagttgcgtgcgggcgcgattcaggcggctcatcaccgtgccgattttcacgccctgctcatcggccacctgttggtaggacttgccgtcgatggcggcgtcgatgaacacctgccggcgttccggcgagagtttggcgagcgcggccatgatttcctcgggcgcgaaggcgtccaaatattcctcttcagcggacttgagcccgtccgacgtatgttcggcggcatcgtaaatgtcccaatcgtcgtattcgccagtggagtcgttggcacgctgcgggcgccgcttggccttggcatactggttgaagtaggcattgcgctcgatggtggtcatccacgcctcgaagttggagcccggctgaaatgagtcgaaggccttgaacccgcgttcgaaggtgtcctggaccagatcctgcgcgtcatcgggattgttggtcagcctcatcgcctgccggtacagtgcattgacggcgggcatggcgagctgctcgaatctggcgcgcttggctgccatggactcgcccgatccggctgactgcccggattgcgtagttgcttcgcttgtcgtcacggttcaccattctaatcaaatcatgtgcccatatcgtggtcgatgacgtgtgagccacaacacgctgcaccccacctgtagaatggcgtatcggctagataatagggagtaacaattatggctttgactttggcttcggccgctgacctgctcaaggaacaccatctgctgcgtgaaatcatccaaggggatgtctggaccgacgacccggtccgtatcgcttcggcggatgaaccgttcgccggcatcacctacgacacccgcaaggtcacgccgggcaccctgctgtgctgcaagggccgattcaaggccgagtatctgaacggcatcgacgaagccggcctggccgcatacgtggccgaaaccgagtactcagccgcaaccgccgcccccggcctgatcgtcaacgacgcacgcaaggcgatgagcctgctgtccgcctcgttctacggatatccgcagaacgagctcacggtcatcggcgtcaccggcaccaagggcaagacgaccacctcgtacttcacgcaggcgcttatcaacgccgtctccggtggcaaggccgcattgttctcctcggtcgataattgccttgacggccacacctacgtcgagtccgatctgaccacgcccgaatcgatggacgccttccgcatgatgcgcgaggcggccgataacggcatggagtatctggtgatggaggtctcctcacaggcgtacaaggtggaccgcgtctatggcctgactttcgatgtggccgcgttcctgaacatctcccccgaccacatcagcccgatcgaacaccccacgttcgaggattacctgtattgcaagcgccagatcatcgccaacgcgaagtcgctggtactcggcgcggacagtctgcacgccgatctgttgcgggaggacgcggcggcagccggcatcggcgcaaccaccttcgccctgcatgacgcggataatgccggcaccagtgcggacgtcgtcgcctggcccgccgacacggcgcacgcctccttccacatcgccgacggagatcagacccttggcgactaccatctgtccatcgatggcgacttcaactacctcaatgcggcggcagccatcgccatcgcccatgcggctggcgtatcgctcgatgacgccggcgcactgcacgccctcgaatccgtacgtatcgccggccgtatggaacagttccgcgacccgcagtcaaacacgctcgccatcgtcgattatgcgcacaactacgcatccgtcaccgcgctgcttgacttcgtctacgagcgttggggcgaggaaaacccgcgtatcacgctggtgaccggatcggccggcaacaaggcctacgatcgtcgtaaggaaatcgtcgaggctgccgagaaccgcatcgcgaacttcattttcaccgccgaagatacggacaccgagccgttcatcgacatctgcatggaaatgcaaggctacatcacgaacaaggatgtggcctccacggtgatttccgaccgtccgacggccatcaccaacgccatttacgatgcccgtgcgcacgccgaccgattcaacatcctgctgattatcggcaagggcaacgagcgttggatcaaggaccatcacaagcatgtgccgttcgacggcgacgatcacgtcgtcgaacgcatgtttggcttgtgacgggattccggccaatcagatcctgatcggatcccgattggcccacatcagatcacgcgcaatacgaccaaaccagaaacacgacatacggatacgaacgaaaaaggatagctgaatcgtaatgatcacgttggagaaagttgacggagccacactggaagccgaagccgagaaggccggcatcacgttgcccatcgaacagaccaaggtttggtctggttttcaggcggatatcgacggacgcacaccatggggcgattatctgatcaagcgtgatggtgaattggtcgccgtgatctcctttatcgattttgagacgcacggttatcattatctgcgctcgatgcatgggccggcgtgggtcgccaagcccaccgaggctgaggagcgcgaggtcgtcgacgccatcgtggacaccgtcaagaaggccgacaagaacatcgcgttcctgcgtatcgacacctggttcgccgatggtacggagaaggtgctgtccacagtgccgtacgaccagaccgtggtcatcgacgtcaccggtggcgatgatgagattctggctcggatgaagcgtcgtggacgccgtgacgtgcgcaagtctctacgtgagtgcccggccgaggttgccgatgagacggataaggcgctggccgatttctccgaatattacgatgtgatggtcgagaccggccagcgcgatggattcacgcctgctccgatgagcgactattccgatatgatcggcgcgttgggtgccgatcattgccgtgtgttcgccgcacgtattgaagaccgtgtggtggcatggtcgattgtcaccgtgaacggcacgcatgcggtgcgctactatgccggcatgcgcaacgaggttatgcgtctgcatgtgaccgacaagctgctgtattccgaatgctgcatcctaggctcgcagggtattactgaatacgatctcatgggcatcggctccgatttcgcgccgtctctcaagggccttaacgagttcaagtgcaagttcaccgaggaaatcaccccggtggcccccgcccgcgacgtacccatcaagaaggtcttctacaagacgctgcagactgtacagggcgtgcgcaaggcattgcgctaatacctccccgctcccgctggtgggagctgtcgaacgaagcgagactgagggcggtctttcgatatggaccgccctctgtcacctgtggtaccagttcctgtcagcgggaaccattcgtttatcgttcgagtttttgactcaccacggctgttacgccatcggctctcatggttacgccgtaaagcgcgtcggcaatcgacatggtgcgttgctggtgcgtaatgatgatgagctgcgcatgggcgcgtagctcattgaacgcattaatcaaacgggtcaggttcacgtcgtccaacgcggcctcgacctcgtccatcacatagaacgggctggggcgggcggtgaaaatcgcgaacagcagcgccagcgcggtcagcgaacgttcgccgccggacaggaggctcagctgtttgacgcgcttgccggccgggctggcctcgaccagtacgccggtggtgagcatgtcttccgggttttccaggcgcagtcgtccggtgccgcctgggaacagcgtggcgaacatctgctcgaatgcctcggcggtatcgtcgaacgcggatttgaacacctggaccatcgtggaatcgagatccttgatgagctgcatcaaatcgtcacgtgatttgaccacatcgttgcgctgatcattgagatacttgttccgctcctcaagcgcttcgaattcctcggtggccaaagggttgatcttaccgagtgcggccagatcgcggcgagccttatcgagacgcttcttctgctcctgacggttatacggcacggtcttaaagagggcggaatcgccgttggtgccggcctctcccccggtttctccctcttcggtcccagcctcagcttccgtctcatccaacggcacagggttgccctcatcatccagcacgggcaccggctgttcggggccgtaatcactaaccaattcctccaaagtgagaccgagttcgtcggacactttctgcatgagctgcccggattcggcggccaaccgttcgcggtttacatccaaggcatgttcgcgcccggtcagatcggtgaccttgggctcgatctggttgcgctgcgcgcgcagggccttgagttcctcgtcatggctggaggcggcggcctgcagctcgtctcgtttggcggccacgtcatgcagcgtatgctccaccatggcggccactgctcgcgcgtcatcggccacgccttgcaggtgtgcggcctgctcgcgtctgcgatcgttcaacgcctcgatgcgggcgcggcgttcggcggcttctctggcgttgtcccgcagcagcccggcctgtcggctcagtgactcccctttgcggcttgcctcggtccacgcgattttcgcggcgacctcatgctcgcgagtcaggttcagttcgcgctccagcgtgcgttcacgttcatcgagttcgtcgaaatcggcatgttccgctgtggattgccgggccgatgccaaagcgcgattgagatcgtcgagcttgcgctgatgctcgttgcgattctcttgggtctcggtgattttcctatccagctgctcaagctgacgggtgaacgatgcgacgcggtctgtggcggatttcagagatttctccgcctgttgggctttgagccgggcttcggtgcgtttggcggattcctggtcgacgagtcgggccgcttcatcgcgtttggctttggcctcggccacttgctcagccattccgccgtcttgggcggccaactgtttgacctgtgccaatgccttgtctcgacgggcggccagagacaggtccgattgagagatggaagagccgccgaccgccgccacgccgtgtgtgaaggtctcgccgttcttggtgacggcccgcatggcttcgccggatgccacgatgtgctgtgcttcgtcggcggtgccggccatggctacatcagccagcaggagacgcacggtgtgcacgacagcttcggcctgtgccgggttctttgcatccgggttcgcggtgacgagtgctgccagcgcgttgcccgattgcggggcggccgccgtgttctcggcgctactctcctccgactccgtgcctggctctgtggcgggatcgccggcaatgctcgcggtcagcaccacggctttgccgagcttatcttcccgagcgcgttcgagggcgtgcaacatgttgcctgcctcgggtaccacgatggcgctggcatactggtcgagcgcgtgggccacggcttcttcccagccttcggccacatggatgaagtcggtgagtcggccaagcgaggccacgtccgtgtcgcgttccaatgatccggaggcattgcggctgcctagcgtgtcggcaagcgcatcggccttggatttgagcgagatgatcttggactgtatctcgcgctgcttatcggcgagttcgttcagtcgttcgcggcattcggcgagcgttgcacgcgcggcgtccaatgcggcaccgtcatcgtcggcaatggagtccgcttcgctgcgcaatgcgtccagctgttgctgggcatcgtcacgctgggaagtcagcgagtcgcgttgggaggcataatccttggcgcggctggtcgccagttgcacggcggattcctcgcgggcgatgagttcgcgcagtcgggcgatctgcgcatcgcgctcctgtgcggttttgcgcagttccgtcaaggtctgacggactgaagcaagcttcttctcgtcgtcggcgcgttcctcggtggccttgtcaagtgcgatgcgcgcatcggccacggccttggtttgtgccgcggcctgagactccagttcctcggctcgtttgacgagcataccgggatcctcaccgaagttggtgacgatctggccggtgagtgaccggctacgctcttcggccaactgggcgagagcgttcagtcgttcacgggtctgcgagaattcatgccagtattggttggccttggcgatggccggactggattcagagctcaacgcctcgacctgttcgatgcgtactttggcttgggcgagttcacgttgggcgacggccagctggttgcgcacatcgccaagctcttgacgtaccgtgtcgcggcggttcatcgagcgttgggcgtcttcggcatacagacgagcttgggcgtcgcgtacggatatctgaatcgcgtcggcgcgccgggagatgcgtgcctggcgtccgagggggccaagctggcggtgaatctcccccagcaaatcgtcaagtcggctcaggttcgtttcggtattggccaacttgcgcaacgcgcgttccttgcgcttgcggtgcttcaggatgccggcggcctcttcgatgaacgcacggtgaccggacgggtcggccttcagaatcgcatccaatcgtccctggcccacaatcacgtgcatctgctggccaagaccggtatcggagaggagttcctgaatgtcgagcagacggcattgcgagccgttgatcgcgtattcggagcctccgttgcggaagatggtgcgggatatggtgacttccgtgtaatcgatatcgagcgtgtgatcggaattatcgatggtcaggctcacctgtgcacggcccaatggcgggcgggaggacgtgcccgcgaaaatcacgtcctccatcgaagtgccgcgaaggtttttggcaccttgctcacccatcacccaggtcagggcgtcgacgatgttcgacttgcccgaaccgttggggccgacgaccgccgtgatgccgggctcgaagcgcagcgtggtggcggaggcgaaggatttgaatccgcggagggtgagttccttgagatacatggcgtgagactgttttccgtatgtcgggcgtccgggtatccgatatgccttggattcgggttaccgggcgtcggcggaatcgtcggtgcctgtgtcggcactggccgtgccggtgccggcgttaccgacgtcactggcctgttccttgccgagaccgaggacgtcgaacacgtcgaagtcgtccgggctcaccgaatcctcgaggttgtcggcggcctcatcctcggccttgtctgccggccgatccgaatcgtccgggtcgaccgccggctgatggacggccatggcctgcctcatcgtggggctggcatgctcctcaagcatcaggcgtgcgtcgccggcggtgacgaagctgccgcagataagcacgccgtggccgtagcccacgcccagctcgtcctcggcatcgaccatgttgacggcagcctgaatcgcgtcgggcaggttcgcttccttgatcacacggtcacggccgaacacgtccacggcaatcttctcgagctcatcggccggcatcacacgctcgcgccacgagttctcggtgaccaccacggagctcaggatcggctccagaacacccagatattcctcgacctgcttgtcgcgcatcatggcgaccacgccgaccagctgcttgaagtcgtagctttcctctatggccttgcgtagggcttcggcggcattcacgttgtgtccgccatccagaatgatggtcggtgaggtgcggatctgttcgatgcgtccgggaatcttgaccgagctcaacgcctcgcccaccaagtcgccgtccagcgggccattgaccggaatcaccacttcagaggcggcaagcgcggcaagcgcgttgtgggcctgatgctcgccgaacttggcgatcggcacgccctcgtaagtgccgttgggcgtggtcagggtggcgacctggccgccgactgcggccatacggtcggacacggtcatttcgtagccgtcgcgcacgagcatggcgtggttgcgttcggcggcttcggtgagaatcggcatgacggcttcctcatgcggctgaggcccgatgatggcggtgcagttcggcttgatgatgccggccttctcggtggcgatctgttcgacggtgtcacccagccactgcatgtggtccatgtccaccggaccgatgatggccgcatccgcgttgagcacgttggtggcgtcccacaggcctcccatgccgacctcgacgatggccacgtccacgggcgtgtcggcgaatttccagatggccatggcggtgagcacctcgaagaagctcatcttcggcttgccttgctcctccatcttggcgtccaccagggccacgagatccttggtctggtcccagatgtcgatgaaatcgtcgtcggacagctgctggccgtcgatggcgatacgctcgttgatcttctccagatgcggcgacgtgtacaggccggtgcgcatgccgtaggcgcggcagatggcctcggccatgcgtgcggtggagcctttgccgttggtaccggtgatatgaatcacgcggaacgactgctccgggtggcccaggatgtcgagcatcaggttcatccggtcgagatccagattggtggtgttatgctccggcgggcggctcatgatgtccagttcgacgtcccgcatgctctcgttgttccgattcggatgctcgaatgacatatcctcttctgacctctgctcgtgttgctgttgaaccgttcggagtgcgtatgccacttacgtgttcgtgccattctcgtcatgtctacgcatgcccgcatatattccgcttccgcatgcgcaggaagctcccctcgcacaggtttgccctgcatggttcgggattcttgccttcacgcgtggagtcacactcctcaattccctctatcctagccaccggggtggtttatcgtgcgcgcacagtgaaaccgtctcatatgtcgccgccgcgcgggcggccttttcctgcagcgcgcgcagtgaaaccgtctcatatagttgcaatgcggctcttgccgtcggcatcccattcttagtcggctgcaatccaaaacttgtatgtccggcgacgctgatgctattcagcgtcggtacagtgccagcttctggcggtacaccgacgctatgatgctcttgcgagtcggcagctggccaaaacctggattaatcccgactccatcgcctctcagtgtcgcctcctcgccaaggcatgccattctgccgtcgctgagaaatttcaacatcgtcaatcgaccatgtcttgccccggaaacgactctcacaaacgtcctctacatcatcttttgaactcgcagaggctcattcactgttatgactgctctcaccgtcggcagccgtccaagccctggatctatgccgccaataaattgcagcaaatcgtcggccacgatacaaccattggactcacgccgacgctagattccacactcagacagaagccagccaatatctgaaccagcaccgacggcgtacaaagcataagcactgttaaccgtcaattcgccgccctctaccagctacatccgtcttcgccgatgatatcttgttcgaatccccaaagcacgttgttcgaatgacattactgatggtggataagttttgtatgttatccactattccgaattagcggcctaataccttgaaattatcgggaatatctcactccaagacagccaagctccgaggctagaaccacaatggctgaaattcatacttacgctgcttcgttccggctacgctcgacgtcatgaagacacacaaagcagtggcctcgctcatatcagccgcgcagaatgagctgagatgcgtctattcaagaaatgaagcggaacagaccgctctacgccgccgtgcccagagtggcgagttgttgaaagtgtatgacggcattcccagtctttatgcaaataccgcatactgggatggtttgacgccgccggagcgaacgttgcatatggcccgcgctcttgcgcaagagcatcctcagtgggtttttggcggcttggtggcagtaagtgcttatggattcgaacatcaatggcatttgcatgatggctgcataaccatcgtgacttccgatcatggatctcgtcaatgccatcagcgcttacgacatgtctatatgcccgatatgaacaatccgaagacacattacgaggcctccggcctatccctgatatcaccggctagaaccttggtcgaggccgctatagaccttgattttcggtttgcgttgccgatctttgattcggcccttgccaagggaataaccaaggaagagatagccgccgactgcgttcaatggagaatcgattatgcccgagtattccgcctgctgcgctatgcaaacgaaaggagcgagaatggtggagaatccctcgcgcgaggcaccatcatcgaggatcgcttcctcacgccgcgtattcaggtaacggtgaccgacccgcagacgaataccgagcaccgcgttgatttcgtatggaagctcgatgacgggcgcgtgatagtggccgaatacgacggcacacaaaaatacgtggacccagccatgaccgataaccgcagcattcaggaggtggtggccaaggaacgagcacgcgacgagggactgaaacgagccggtgccaccgaaatcgtccatttcacatacgccgacgtcatcgaacgcactccgctgcgggtaaaactgctcaaagccagagtgccccagatggaggcatccgcagagcagcgggtcccgtgatgcgatgaaccttcatcgcatgggttcacatggattcagcccgcaaaatatgccaatatcaatcggcaagctccagcccatgcccctccttccctaccgagaacaataaacgggcccgcattccagcccgatgcactcgccatatgggcatgtccggaagaccgtccaaattccgtacttggttttaccgtcagccgtcaatcgtggcacatcgcataaagccgactagtatgaggtgggaatcgatgattcgacaacaactacatacaggagagtggcaatgggtgaagtgatcaccgccaaggacaaggaatatgaggccgaggagcgcgctacggcgccgggcgcgaaccagtcgatgagcgaccgtgtgaacaaccgctcgctgcgcccgcagtcggctgcattcaaggagtttatgaagtccggctgggccgacgatgatccggagatcaagcctctcgaatcctccaagttcacgccagcccgccttgaggcgctgggcaaagccttcccgggcgagcgtctggtcattccggccggccagccgaaggtgcgcaacaatgattgcgattacatgttccgcccggacaccacgttcgcctactacaccggtctgggttccgattacgaggccggcgccgtgctggtcctgaacccggtcgaccccgactcccccgaagccgccgccggcaagacgcacactccggaactgttcgtggcacctcgcgccgacaactccaccgaggacttcttcatgtccgcccactacggcgaatactgggttggcccgcgtgctggcctcaaggagatgcaggcgatgaccggcatcgagacccacgacatcgcccagctggccgacgccctgtccaaggacgtgggtgccgaggccggcgccgtgcgtgtgcgcgtggtcagcgagaccgatcccgaaatcacctcgatggtcgagtccatccgcgaggccaacggtttcgccgatccggacaagaactccgcatccgacgacaagctgcacgagttcgccgccgaggcacgcatggtcaaagacggctacgaaatcaacgagatgcgcaaggccgtggacgccaccaagcacggcttcgaccgtctgctctccgcactgccggccgcgctcgacaagccgcgttccgagcgtatcctcgaaggcgcgttcaacgccgtgtcccgtgagctgggcaacgccatcggttacgactccatcgtggcctccggcccccacgccccgattctgcactggatgcgcaataccggtgtggtgaagaccggcgacatgctgctggtggatgccggcgttgaggtcgattccctgtacacggccgacatcacccgcaccttcccgaccaacggcaagttcaccgacttccagaagcgtctgtaccaggccgtgctggactcgcagcaggccggtttcgaagccgccaagccgggtgccacctattccgacatccaccacgcctgcatgcgtgtgatcgccgagcgtctgcacgattggggtctgctgccggtgagcgtcgaggagtcactgtccccgcaaggccagcagcaccgccgttggctcgcctgcggcgtggcccaccacctaggtcttgatgtgcatgattgcgcgcaggcccgctatgagtcctatcagggcgcgaagatcacgcccggcatgatcttcaccatcgagcccggtctgtacttccgcgaggatgatctgctgattccgccggaataccgcggcatcggcatccgtatcgaggacgacgtgctcatgaccgagaacggccccgaatggatttccgccggcatcccgaagcagatcgacgacgtcgaagcgtggatgcggagccgtaaagcaatcagtccggtggactgattgtaggcgacgccgaacgctgacaagcgcgaggaaaatgaaatcatgcgcgaagcgcaccatattaagcaggctgcccaagccaagtaacccttaagctccctcatcagagggagctcctttttttctactaaggaggcaatgtgcctactccggaatttgtgttggaattgcgtaagaagatcggccatgatctgctatggctcaatggcgtgaccggttgtgtactgaacgaacatggtcaactgctgttgggccgtcgttcggacacgggcgaatgggcgatggtctacggcatcaacgagccgggcgaacagccggcggacacggtggtgcgcgaaatcaaggaggagacgggcatcgatgccatcgtcaccgatttggtggccgtcacctcgtcaaacaaggtgctgacctacgccaatggcgacaacaccatgtacatggatcattcgttcctgtgcgccctgaagcccggcggcaatgccgagccgttcgtgggcgacgaggaaagcctcagcgtcggctggttcgatctggatgacctgcccactcccctggcggccagcacgagcgagcggctggagctgttccatacttacatcgagaacaaaaagcacggcgacgcccacgccctgttccagttcgatgggcagcagtactagcggatataaagttagctccctctgacgagggagctccaatgctatgcgattacgcctcttgggctaggagctcgtggaggtgggcgcggtgctgctgctgttcgcgcgggtcgggcacgggcagggaggccagcagcttcttggtgtacgggttctccgggtgctgcataatctggtcggcatcgccgtgctccacgatctggcccttatgcatcaccatgatgcggtcggcgagcatatcgaccaccgccaaatcatgggtgatgaacaggcacgcgaagccgatttccgcctgcagtcgcttgaacagctccaacaccttggcctgcaccgacacgtccaatgcagaagtcggctcatcggcgatcagcagcgacggcttcaacgccaaaccacgcgccaaagacgccctctggcgctggccgccggacagctcatgcgggaaacggttcatgtaggcgcgcggcagctggaccatctccagcaggtcgcccacatagttcttggcctcggccacggaaccgtacttgtggtgcacgagcagcggctcggccacattctccgcgatggtcatcagcgggttgaacgaggagcccggatcctggaacacgaaaccaatgtccgcgcgcttgggcttgaagtcacgctccttgacgccgttcatctcgatgccaagcacgttcagggagccgccggacaccttctgcaggccggcgatggcacggccggtggtggacttgccggaaccggactcgcccaccaggcccagcacttcggagcggtggatggtgaagttcgcgccgtccacggccttgaagtcgggctgcatgagatggcccgggtacgtgatggtcaggttcttggcctcaacggcgatcggctgttcgcgccaatcggccttgcgctcgatcggcttgccctcgcggtcgcgcacgaccagcttctgaccgatgcgcggtacggcacccagcagtcgcttggtgtagtcgtccttcggatggtagaagatctgctccacgtcgccctgctcgaccacgtggccgcggtacatgacgaccacctggtcggcgatgtccgcgatcacgcccatgttgtgggtgatgatgagcacggaggcgtcgaactcgtcacgggcgaggcgcagcaggtcgagaatttcggcctgcacggtcacgtcgagggcggtggtgggctcgtcggccagaatcaggccggggttcagcaccaacgccatggcgatgacgatgcgctgcttctggccgccggagaactggtgcgggtagtagtccacgcgggtttcggcatccgggatgccgaccttcttcaggatgtcgatggccttggcgcgcagttccttcttgtccttcatgccgtgggcgcgaaggccctcttcaatctgccagccgatggtgtacaccgggttcagcaccgaattgggctcctggaacaccatcgcggcctcggaaccacgcacttcgcgcagctgttcgccgctcagggagagcacgtccagcgaatcggagccatcgcgcttggacaggtagacggcaccggaggtggtggccgtctccggcagcagcttgatgatggagcgcgcggtcacggacttgccggaaccggattcgccgaccacgccgaccacggtcttgcgcggaatggtgaagttcacgtcctcgacggccttgatggaaccggcgtcggtcatgaaggagacggacaggtccttgatatcggcgagattcttgttgtcttcgctcatctctcactccttgccttccggcttgccttcgccggtccattcggaggcgacgatggtcgggtcatggtcggtgacggtggccggcgggtcgacgttcgcgtcgagttcggcgatcacctcgttgcgtgcggacggcttctcgtttgggtcgacggacgtgtcttcgatcgatccgaccacttcgccggcggacttgcgggcgcgcagacgcgggtcggccagatcgttgagcgattcgcccacgagcgtgatgccgagcacgataagcacgatggcgatgcccgggaacacggcggtccaccagatgccggcggtcacgtcggaaaccgaacggttcaggtcgtagccccattcggcggcggcggtcggctcgatgccgaagccgaggaagcccaggccggcgagggtcaggatggcttcggacgagttcagcgtcaggatcaccggcagcgtgcgggtggagttcttgaacaggtgcttggtcatgatgcgccaggtggaggcgccgaccacgcgcgcggactcgacatacgcggattccttgatgcggatcacttcggcgcgaattgtgcggaaatactgcgggatgtacaccacggtgatggagatgccggaggccaggatgccgctccacaggccggactggccgtgggagatcatgatggccatcagaatggcgagcagcagcgaggggaaggagtatacggcgtcggcgatcatcaccaggatgcggtccacccagccaccgtagtagccggacaccagaccaagcagcacgccggcgaagatggagagcagcacggccacgacgatggcgatgacggcggtgcgggcaccccacaccacacgggagaacacatcgaatccggcggcggtggtgccccagatgtgttcggcggagggcgcggcctgcgccgggaaggacgtgccgtcggcggccttgatctgggcgtggccgtagggggcgatcagcggggcgaagagggccacgagcaggaagaacgcggtgatcgcgagaccggtgatcagcatgcccttctgccagccgaccgccacgcgcagttccttgatgattggaatcttggtccagaacggcgtcttggtgctgacgttgagcttggtgaggcggtcgtcaccggggacggtgatcttgtcggaggatgcggtggtcatctcagtacctcactctcgggtcgataagcgcggcgatgacgtcgacgaggaagttgacgacggccacgatgatggcgataaggatcacgatgccctgcacggccacgaagtcacgggccttcaggtactgggacagcatgaagcccaggcccttccattcgaaggtggtttcggtcaggaccgcaccggcgagcatcagggcgatctgcatgcccatgacggtgatgatcgggatcagggccggccgccaggcgtgcttgttgagcaggcgcttttcggagacgccgcgcgagcgggcggcctcgacgtagccggaattgtaggtggagatgacgttggtgcgcaccagacggatgaacacgccggcggtcagcaggcctagggcgacggccggcagcacggcgtggcgcagcacgtcgacgagcacgttcatgtcgccgagctggatggcgtcgatgatgtagaagccggtcggcgataccagacgggtgaactgcatttcggagttcaggtcggagcggccggaggctggcaggatgttgagccagacggcgaagatgagcttcagcacgaggccgaggaagaacaccggggtggcgtagcacaggatggcgaagatgcggatgccggcgtcggcggcacggtcgcgtttgcgggcggcgagtcggcccaggccgatgccgacgatcagcgccacgatcagggcgaggaaggccagttcgaatgtggcggcgccgtagtgcgtaaggatgctgatcaccggctggttatcggtcagcgtcgtgccgaggtcgccgtgcagcaggccgccaagatagtcgacgtattgcacgatcagcgggcggtcatagccggccgcgtggatgcgctgctggagttcggcgggtgtcaggcggccgcccagggcggcggaaatcgggtcgccggtggcgcgcatcacgaagaacacgatggtgaccagaatgaaaacggtggggacaatgaggaggaacctcgtcagcacgaagcggaagaaactacctgacagtcggttcttcttcgtcttggctttcgccagagtggtgctggaggtcgctgtggcgctgtctgacacgcgatgctccttggtgttggtaatcggtatataaagcaataaaggctcccctctccgaggggagctggcggcgaagccgactgaggggagtcatacgagttgggctcccctcagtctgccgtcgccagacagctcccccctcaaagaggggagctcatgctggatcagcccttggtgacggaggcgtagcggaagcggaaggaagcgtcgagggtgacacccttcacggaggtgccggtgacggcgacctgggcaccctgcagcagcgggatggtggagaggtcttcggtctcgagtttctggacctgcttgaggatgtcctcacgggcggaggcatccttctcgccggcctgcttgacgatcaggtcgttgacttccttgttggagtagccgttgttcacgaagttgccgtcgcggaagaacggggacaggtagttgtccgggtcggagtagtccgggaaccagccgagctggtagaccgggtacacaccgtcggaatcgtcggtgaccacgcggtccttggagtactgggtccattcggtggactgcaggtcgaccttgaacaggccgccttcctcaagctgggacttcaaggccgcgtactcgtcggcggaggcggagccatagtggtcgctgttgtactggagcttgaggtcgaccggggtggtgacgccggcatcggcgaggaccttcttggccttctcggtgctcggcttgccgttgccgtcgccgtaggcggacttcagcgtgtcatcgtgaccggccaggccgtccgggatgaaggagtacatcggggtgtaggtgcccttgtagaccttggtggagagctcttcgcggtcgatgaggttggcgacggcctggcgcacggccttggccttgttagcgtcggcgtcgggctgggattcaccgtagggctgaatcttgaagttgaaggcgatgaagcgctcctcaccgcccgggcccttgacgaccttgaccttggagtccttggagaggtcctcgatgtcggtcgggctcagggagcggtaggccacgtcgacctggccctgctggacggccatcttcaggttggaggcgtcggcgaagtacttgacctgcacggcggagttcttggccggggtcaggcccttgtaggagtcgttcttagcgtaggcggcggactcgttgatcttgaaggcggtcagcgtgtacgggccggcgaaggccttcttggagacgatggtgtcggcgtcggtgagcttgtcggcgtcgaaggtatcctcatcgacgatcgggccggcggggctggacatgacctgcttcaaagtcacgtcgaaaggcacggaatccttgaacaccacggtggtgtcgtccttagcggtcacggattcgacgttggcgagcagggagctcgggccgttcgggtcgttgatcttcttgatgcggtcgtaggagaacttgacgtcggaagcggtcaggtcgttgccgttggcaaacttcaggccgtccttgagcttgacggtgaattcggtgccgtcatcgttccaggtaccgtcatcggcggcgatgtccgggctcagctcggaggtgttgtagtcctgggcatacaggaacgggaacacctggatctgcacggcgtaggagccgttgtcgtaggagccggcggggtccagactggtgatcttatcggtggtgccgatggtgatggcgttgccggaatcggcgcctgcggtggtgtcatccttcacaccgccgcaggcggtcagggatgcgatggcggccacggagacggcggcggccagaatcttcttggaattcaacaggaatcctctctcataacttgtttccacgccatcactgcgggcgtggattaccgcctgactatggtgaggatgtgttactcctgcgtttccacagccatcgacttatgtttcgcttgtggcgaccatggccggttttatgcggtatcgagcagtattacggattcttgtattacgacgtgaataacgttcaaatggtgagatgaacatgctatcatgtcaccatttgaacatgcttgtagacgaatgctttccattcgtcaaccggtcggcctactgctacttgagcttgcggcccgcgcaccacacctgttcgaccgtccaatcggtcggatcggcaaggttgaaatcggcggcgaagccgggggcgatgaggccgataggcaccccggtgaccgggttcggccggtcgaagccgaacgccttggcc

SEQ ID NO: 125 - DNA, 3844 bp, Unknown
  R206_24m  MAG No. k141_36345
cattcgagcatgaacacatccggatccgggtgctggaagagcacgcgctcgtattcccagcggaccatgtccttggaggagaacagccacatctggccgcgcttgtccgcagaggagacaccgaaggtcatgtaccaggtgtcgccggtcttccagaccttcgggtcgcggtagtggtgatccaccttgtcggtcgggcagtcgatgatcatgccgcgcttggtggcgctggtcagctcgtcgttgtccggctcggcgagcatctgcacctgccagtcgccgccggtgttgtcttggccgttggcccaacggtggccggtggagtagaacttgagcgtgccagcggcgacgattactgcggaaccggagaatacgccgtcctactcctcttcaagggtcggggcgaacctgattggctcacgcttccagttgagcatgtcggtggaggagacgtgtccccagtgcatcggaccccacggggtgccgtacgggtgcagctggtagaacacgtgccagcggcccttatagaagcacaggccgttcggatcgttgatccaaccgccgttggatgcgatgtggaacttcgggtaccagcggttgttgcgcttggcggccatggctgcaacgcctgcttccgcctgtgccagagcttcgctgtggttcttgatttcgtggaggacgggtgcatccggagtgaagccagtcatcgttgaatagcctttcttaatgattgatgaatcttgcgattgttgaattgttgcttattgaatttttagataaaagttttaagaatgctgcccgaaacggaaaaaggggaaacgcttcgggcagcacgatttagttgtgtttttgccgattttggcggttgcgctcaggcgtttgctttagctgcggcttgggccttgagctgcttatcggtgtagaacggatcaccgccgacttcctggttgtccttcttgatcacgaagaagccgtagattagggcggccagcacgatgccggagatggtgaagaaggtcggacggtcgcccatggcgtcatgcagggcgcccatcggggtggagaagatcacctggccgatttgggaagcgatctggaagcccaccatgtacagggttgccgacagtttggtgtcgaagtgcagggtgaagtagcggaatgccggtaggcagaacagcggaacctcgatggagtggaacagtttgacgatggagacactgaccggatcgtggaacacgccgcacaggccgatacgcaggaacatcacggttgcgccgagcagcagggagttacgaacgccgatcttcttcatgataatcggaacgacgcccatcatggcggactcgaggaacacttggaaggagttcagggtgccgtaggtggcgttgccgatttcggtggtcgggaagagggaagcgtagtagttagggaacatctgctggtcgaacacggtgtagaaggtgttggtgaacagcatgaagacgatgagcacccacagagtcggcatcttcagaacggagatcatctctttgaaggatgggttggttggagccgcgttcggatcggcttctttcttgagctcttccttttgcttggccggaacccagaaagcgtagacgcacagcatgccaaggccgcagatggagccgacccagaagttcagcagcgggttgatgttgaacaggcaacctgcgcacagtgccacgatggcgtagccgaaggaaccccaagcgcgggactggccgtattcgaagccgaacttacgggagtagcgttcggtgagcgcttcgaacagggaacagccggccatgaagcctgaggagagcacgatggagccgatgagcacgccgatgaaacgggtggtgccgccggcagtcagcatcggggcatacacgaactgtacgaacgggccgacgagcgctgcgatggcggagacgaagatcacgagcttgcgcttgatgcccagctgatcttggatggcaccataggcgaacatgatgaccagggttgccaaggagttaatggagtagatctggccctgctctgcggaggtcatgcccagaccgtgggtcgggtcggtgagccagcgggagaagaaggaccaccagatgccccaggagcagaagaacatgaagatgccgaaggaactctgcagataggaaggattcttccatgcggatttggttgcacttgccataatcatcctttgattactacttggttggttattggttatgtgacgctcctgctcgggcggctgtgcctttgtagaagttgttgtgtagtaattactatgcgacgtcaatcgatttacgtcaatcgatttacgtcatcggcgtgtcgtacccgttcgagacgcaaaaaggcctccgtgctgaacggaggccttgagaaatcgcgtgggcctcggttacttcaccgaggccttttcgatcagcgtgcagtggatcttcgccggaatcggcgcgtcgatcggcggcaggggagcggtggtcgctggccgtgagacgtcgtccatcgagcgtccttcgataattgacaccagcttggccacggcccagtagcccatctcgaaatgcggcagttccacagtggtgagcatcggttccagcgtttcggcgaacacgcgatggttgtccacgccgatcacggagatgtccttgccgaccgtgagtcctcggcgtgcggcgcattcgtacacataccaggcgcgggcatcgttgaagcagaagaatccgtccggatgctcggcgtcgaacaaatcgctgactgcggtcagtgccggcccgttattgagcacattgacgaccagacgatcgtcatagtcgaggcaggcgtccctgagcgccgcctgatagccttccaaacgaccatcctgcgcaatcatcggttccgagcaacccacataggcgatacgtgcgcatccggccttaaccaatctggtggtggcgtcgtagccgatttggaactcgtccggttccacgctcgggattttgccaagcgagtcggtggcatccaccaacaccagtggcgtcttggccagcgaagaaggcgcatgggtgatgcggttcgacatcttggcgtacaggaaaccgtcggtgccgtatcgcttgagtgcggcgatttcctcgctctcgctgttctcaccgtcggtgctcacggtgatgagcatatagccgaactggcttgcggcggtctgcgcgcccagaatcataccgccggcgtacggggtggtggccacctcctcactgatgaaaccgaggatgtgcgtcttgcctgtacgcagcgaactggccagcggattcgaccggtagccgagcttggtggcgatggcgcgcacattgtccgcaatttcggactttacgcgcccctcgtcgcgtccgttgagcaccagcgacaccgtagagacggaaacccccgccttgttcgcgatttccttcatcgtagccatgcgtcaaacgatacaccctaattgacggactgtcgggaaagtatcagtgttctccaccgactccgccgaggttgcgcaccgcaccgatgaataatggtatgccgtccggggtgacgtacgaatacaggaatgggcgatccaccgtgaactcgatgttgtccaccggcgcgctagtgaagtctgcgccggctttggtgaaggacatggccttggcgccggcctcgttcacctcgatgcgcgtgccttgcagaatcgaaccgatatacagattctcgccgtgcgaaccggcgtcgaccatcttggtgaagtcggcgtcgcctgcactgaacgcatcggtcacccccagtttttcgaatgccttgatggtggcttccgagtcgaacatgctgtcga

SEQ ID NO: 126 - DNA, 27117 bp, Unknown
  R206_24m  MAG No. k141_36583
catagcacatcacggctgccacaccgaggatttcccgtcgggggctagatatatgcttccggagcatatactttccggaaacctacaggtcaatccgtgaaaatccgcgattccggacacactttttgacccttaaccctgttcggcgatgccgatcccagccagctgaagtctctcgccaccctgagcaacgccaaggtattcgacggccgctccggcgacctcgccgccgtcttccgccaagtcaagggcttcaactgatgctccaggtaatctgtggattcgttgtcggactgctgctcgccgggctcggtttcggactggtcggcggcggagtgcccggcctgatcgtggccgtggtactggccgcacttgggtatatcgccgcctccacgctcaccgagccggagcgacgcatcggcaaaatgctggtttccgccttgcccaacggtcagaagaccgccgatacgatcgacgcggcgaacgctcaactcaactcgatcgccatgctcaccaagcaagtacgtgacccagccgtcaaagccgaagccaacgacttcatcgccgctaccaaagattgagtgcaatacgtgacccgagacacctccgcctacccgacgttgcgccactacatcaccgtgtacggcgagcagaccgagaaactgttgcgctcctacgtggacgtggaaagttccggcgcacgcgatcagatagccacggtacgaatcgaaaccatcgaggcgctgcaagtgctcgaacagaccgccgccggcgaactcagccgggcggtaagcgccaagacgttgggcattacggccgactccgacgccatccaacggttggcccgcatggatggatacgacgacgtcgcaccttcgcctgtgccttcctcggctgctgatgaaggacggcatgcacccagtcagactccatctggcggcccggctcaccagtcggaccagaaaacggacgcacaatgaaactctccaaatcaaaaatcatcggactgatcgccctgcttgcggtagtgggcgtggtctgcggcacgctggtgtggcggcaatcgcaaccagcgccggccgaaccgaccgaacaggtgagcatcaccggctacctgggcggcgagaaaatcggcctgttcgatgacgccaagttcaaggcgctcgccgccaagcaaggcattgccatcgactatcgcaaggccggatcgctggccatgatggatgcggaccggaaaggcatggattacatgttcccctcctcgcgcgcggccgtcgaatacggcaatgcgaaaggcgtcaaggccccccaaagcgacatcgtcttcaactcaccgattgtgctatacacgcacaaggccgtggcggacgggctcgtgaacggcggacttgtgaccaaggacaattcgggcgcgtatcacatgtgcttgatttggccgtgaaccagacggatgcgttcaagcagatcaaggacgacgtggtcatcgtctacccgacgccgaccgtgtggagcacccacacgctgatggccttggacgagaaaggcgacacactgctgaacctgttgaaaacaccggcggcgcagaagctggcgtgggagcgccacggcttccgcgcggccaacttcgccggcaccgattcgatcagccgattcggcgtggccggcacgctcgaccagatcccggccgtatccgaactgcccaacaacgacgccatgcaacacctcatcaccaccctccaatccgcgcaagccaaactcgtggccgacatctccatgtacgacacgatgtacacgcagaacgcccagcaataccgcgagctgaaaatgaccgtactggccggcaagaaggcgctcgccgacttcaacgccaaccagctgccagcgctggaggccgaggccgccgccagtggcgacgccatgcaggcgcaagtgctgaaggacttcaagtccaagctcgaccgttttgccaagcgactcgacgacctcgaccgcatcagcgtggtcaccttgcagaccgcgccgcagatcaaaatcatccagaacgcggaccagaccatcgtggacaagatcgacaccaccatctccaccacgattccggtgtggaagagccagatggtgatcgcgctgggcctgtccaaccagcgcaaggccctcgacctgcagaacaaggccgacgatgtgaccaacaagctgctggcgcgtaacgcggccgccctgcacaagggtgcggtggacgcggaaaaggccaaccagcgttccgtggtggaaatcgacacgctggagaagatcaacgccgaactcatcgccaccctgaaggagaccgtgcagatccagaaggaaggcaaggccaaccgcgaggccgcccaggtcaagatgcgccaaatcgagtccgacctcaaaaacgccttgctcgaaaacgcccagcagatgtgagccgttcgcgcgccagcatgctcccgttggcagaggtatatgagtacgcctactggtgtgcgtatatatgctcccgctggcgggagctggcagccgtaagactggctgagggtggtcacggcgctcggctcggccggctttaccggcaaccattccccgccgcaatttctctgtgggcataatcccggaatgattgccgcgctcgggaattgggtgaagtgaaggttaaaggttgagagcccgggagggttccggaaccggccacgataaccgctgctagccccgcgatacgggttggcggccggcatccaagccgattctctcctaatcaaggagtaccgattatggcaatgtttccggctttgatgaatgacacgatgttctcggatctgttcgatgatccgttctttgagggttggcgcaacacggacaacacgatgagtgccgcaatgcctgccaacatgatgaccaccgatgtgcgcgagaccgacaagggttacgacgtcgacatcgatatgcctggctttaagaaggaagatatcaaccttgagctcaacaacggctatctgaccgtgtccgcctcgcgttgcagcgagcatgaggacaaggctccggccgctgagggcgaggcttccgacagcaagtgcgcttgcgcgtccgattcgggcaagtggctgcgtcgcgaacgctacatgggctcctgctcgcgtagtttctacgttggcgaggacgtgaaggagtccgacatccacgccagctaccggaacggcacgctgtgcatccaggttccgaagatgcaggcccagccgcaagtcgagtccaagcaccaaatcgcgattgagggctgacgatacttgattcgtcccgaagtcccgcttcgagtagctttgccccctctgacgagggagctcccgcgaagcgggtgggggagagataaatcgtaaccaaaccatgcttcccacgccgcctgccctacgctttcaacgccgactaacctgacagacggcgggaaacatagccaatgcaaatgccgagtagggatttaccctacccggcattttgctgtttcaatcaccgaaccccaccctgttcgcgcgccggtcgtgtgccgttctgcagctgtacacatccgatgagtagaatgccttcgaaacgaggcaagagaggcggacatatggcgaacggcgcacagaacgcaagcggcacgccggccccggcggcaagccgttccggcggccacgtcgtatccgcgcgcgccacgaccatcggcctgatggcgatcctgctgtggagctttatggccggcaccgtgcgcatcgtctccgaaaacttcggtgccacgcttggttcggccctgatctacacggtcggcggcatcctgctgctgatgttccggcgcccggccccgattcgcgagttccccaagaaatacttgattatcggcggcctgttgttcgtattttacgaatcgtcgatatccctctcgctgggtctggcctctaccgacgcatcctcggtggaagtgagcctggtcaactatctgtggcccacgatgatggtgctgctgtcggcgggcgtatcccatcgcaagcacgcggtcgtcaaggtgctgccgggcgcgattgtggccactgccggcgtggtgctggcggtcggcggtaattccgggctcgactggcatgcggccgtgcagcatatcgccgccaaccctttgccctatgcgctggcgttcgcgggcgcgctcgcttggtcggtgtacgcggtgttcacgccagccatgagtcatggggtggacggcacttcattgttcttcccctgcgtggccgtggcgttgtggattatccacttcgcgtccgggcaggggtggccggccgagccgccgagtctggtcgcatggctgtttgtgttgattgccgcggcggcgattggcggcggttatgcctgctggggctatggcattctgcatgggtctatggagcggctggctattgcgtcctatgccacgccggtgctgtccaccggggccggtgcggtgctgctgggtttggcgctgtcgctgccgttttggtgtggcgcgctgctggtggccgccggatcggtgctcaattacttggtcagtgcgcgcaaatagcggggtggctttgctcatggggcggtaataatcccatggggcggtaaaaccctcatggggcggtatcccaaaatggctttattctgccgtttcacaatttcttcaaaccgccccatgggccttttaccgccccatgggtaaattaccgcccgatgggcagcaacaacttactcgccgcggcgctcggacgggcggcgaatcgggtcaagcagcgtattcggatcggagatgccgaacatgctgcgcccgccggtggattcagggtgcttggcgagaacggccagcgaaatcgcccccggaatcataatgatcaccgaaagggccgccaatccccagttcacgaagaatccgagccccagtacgatggccaccacaaccaccaccgtgacgataatcgtcaacagtgctcgacgtgggttggtttccctggtccaagaggtgctggctgcgggttttgctgttgaactggccgcggcgtttgtggctgttgtgccatcagccgtgccggtcgtgggccttgccgccgcgctcgtcgcggggtcagtaggggcgtcagacacgttatcggcgacattgccggtcgctgctggacgttgttcgtttgcgtgagtcatatccaccaacatattccctgcttccggctaaagctgggacaagcctgcgcaccgctaatccagcgccgacactggccttgagctgcggacgtccaggccggatgtgaacaggagctgaacggagtctggggaaaccatgagaactcgcgacaatttttgtgaaattgggtgacgctctatgaatcgcgcgctagtattgcgtgagcttacaagacgaggagcctggagcgcggggacgaaggatgaagaactccgtttggaagacgttcatggaattgtcgctggtccgcggaatcgtgccgtggaccgtgttcggactgaccgcgatcgcggcaatcatactgattgttgggctggcattgagcaagaagcgcggcccggcagcagacggcctggcgccggacggcctggcgccggacggcgaatcgtcggcccaatcgcccgtcgacccagataaccagccggccaaccagcctacgaacgcggctgctacggcgtcatccacagcttcgacggaagagacgtttatttcccatggcctgcgtacgccgcaacgtcgtcacttgcatccgctggccgccgcgctggccgccgccgtgctcgccggcgcgggcggactactggccacatggctgatgtccgacgtgttcatggtgttcggcgtatcgttgggttggccggtgatcctcaccgtcgcgggaggcttcgcgggcctcggcttcgtgctggccgccgccgtgacgttgcggggggcccgtcgcgcgctggccgtcgtgctggtgccgctggtgctggcgtccaccgcgcttggcgtggactcgatctacggcgaataccagaccatcggcagtctcgtcggctatacgccataccccccgctcggttcggtcaccgtgcgcaaggcctcgatgagcgtcggcgagtggcgcgacaaggcgcgcaagggcgctctgccgtccatgcccgattcgggcaaggtgttcgccgtcaccatcccgaacaccgaatccaagttcaaggcgcgcaaggcgatggtctacctgccgcccgccgcgctgtccgaccgcccgccggccctgccggtgatggagctgctcgccggtcagccgggcagtcccggtcgcctcatcgacgccggcaacatcgccgccacgatgaacgcttacgccgccgaacatgacgggctggcgccgatcgtgctcgcacccgaccaaaacggttcggccatgcacaacagcctgtgcgccgacaccacccgaggcaacgccgaaacctacctcaccaaagacgtggtgaactgggccagggcgacgctgccggtagccaagtcggcccgtatgtgggcgatgggcggattctcgcaaggcggcacctgcaccacgcagctggtgccgcgtcaccccgacatctacggtgcgatgctgccggtggatggtgagctcgagccgaccgacggcagcgtcgagacgatggtccggcgatatttcgccggcgaccgcaaggcctacgacgggcaggtgccggtcaacgccatcgccgccaccggcacggccggccaggcgctgttcgccggcgccggcaaaggggatcggaagtcggtcgccaacatgcgcaccatcgccgcggccgcgcgcgcggccggcatgcagaccaccgaactggtcgtgcccggcgccgaccatgactggcatgcggtgcaggcggtctggaaccccggtctcgactggttcggcgcgcgaaccgggctgggcgaaatgacgaaatcgttggaggaatacccacaagtggaggtgttgcaatgagcgaagaacaacagcatgggaacgcgcggccggcggccatgccgcagacgcggcggcccctgcgggacgcggaaccctcgcggacgaagcccgccacgacctcccgcgccaccaaaccgcatacggcaaggtccagccatgcggcggaaagctggcgtgaactggccggtgacgtgcggcagtgggcggacgaccaccggttggccgtcaccgccacggcggcgctggtggcgctgaatctggtggcgtggctggtggccgcgatggccggattcgcgtttccgctgcggctcagcaccagcatggccgcattcaacgccggcaaactcatctgctcgctgttcctggcgcgcggcgtcatccaactcatggtcgacgccgtcctgtggctcgtcatgctgtcgatagccgaaccatggctcggccgtgtgcgcaccgtcgtcaccgcgctcgcctgcgcggccggcggcgtgctggcgggcctgaccctgtgcgcggcggccggatggatgttccaggactccctgttcgtctcccgcatgcggttcgcattgagcccgctggtgttgccggtcggcgcgctcatggcggccagcgcgttctgcagccacctatggcgcaggcgcatccgactcgtcggctatgtggcgatcctggtcacgttgctctacagcggcaaccccagcggctactgcatcctcgccgccgcgctgatcggccatgccgcaggccgtgtgatggccgggccgcccgcgcacgtcgaagccgaatggcactggctgcgcagcacctccttcgaggcgcggcgcatattcgcggccatcgccgtggtgctggccctggggccggtcatcgccatcacctcccataaccatgcgggcccgctcagcacgatcggcctgctcatgagcccggtttccgtcgacaacggcatgctggccaaatgcctggctggtgacacgcacggcggatgcttcctgcagttcaatctgctgcgggcctcgatgcccggcgcggtgctgcgctcgctgctgcccactgccgtgaccttggtgctggcgtggggcctgtatcgcggacgtcggttcgcggccatctgcaccgtggccatcaacctgttcacggtggccatcgccgttgcctactatctggtcgtgccgctgagcttcgcgccggacggcatggcctccctgctgcagcacggcgcgatcgtggcctgcgtggcgaacgtcctgcccccgctgctgttcgccatcgccctgctggcggcaatgaaacacttcccgattcgcatcggctggcgcaggctggtcggcggcatcggcgccatcgtgctggcttggctggcgtgcgccgccatatacctgatgtacggtattgcccaacccgccaccttctcgccacgcgccaccgcctcgtcgctgctggccgaactgccgggccggttcctgcccatcggcttcctgagccatatgaagctgtcgttcgtgccgcgcactccaatggcttcgattgtgtaccaaggcatcggcctggtgttctggatcgtggtgctggccgtggtgatccactggatgggcgacgtgagcgaatcgaacgagctggcccgtgcgcgcgccgaacgtctggtcgaaaccggcggcgaatcgatgagcttcatgaccacatgggaaggcaacagctactggctgtcccccacaggcagatcggccgtggcgtatcgcgtgctcaacggcatcgccctgacctgcaccggaccgttcggcgatccagcggaatggatggacgatctgaacggtttcacccagtactgcgtggaacgttcgctgtcgccggtgttctacggcgtgcatcgggaacagcgcgacgcgttgctggaagccggctggaactccatcgaggtcggcagcgagatggtggtcgacccgcgcaactggaagacgaccggcaagaagtggcaggatgtgcgcaccgccatcaacaaggccaaacgcgatggcgtgagcgacgtgcagtccaccttcctggaagcgtcgcttgacgtgcgcgagcagatcgaggacatttccgaggaatgggcgcaactcaaggcgttgccggagatgaggttcacgctcggcggcgtcgaggagctccgcgacccgcgtgtgcggctgctgtacgccgtcgacgcggacgggcgcgtgttgggcgtcaccagttggctgccgacctggcgcgaagggcgcattgtcggctggacgttggatttcatgcgccatcgcaccgacagccccaacggcatcatggagttcctgatcgcgcgcatggccgagcgtctgcgcgacgagggcgaagccgatcccgcgcacgccgtggagttcatgagcctgtccgcggcgcccctggctggcatgaatcccgatcgggacaacgccggggaggacggggtaccggccagcgaaggcacgcaggtgctccagcacgcgctgcagatcgtggccgactggatggaacccgcctacggcttccactcgttgttcaacttcaaacgcaaatttcagcccaccgaggcgccggtctacgtgtgctatcccgatccggccgcgttgccgaagatcggactcgccgtggtgcgcgcctatgtgcccagcgtgacggccgccgaagtggccggcatgctcagcacgctgcggtcgtgaaggtgtgcacacgggtacgcaggttagccgattcgagcctgagacggggtatctgctttcagagaggtacatttggccccttgcggacaactaactgccttcaaagaggtgcctgaactctgaaatctcgagtatgagcgttgcaatgacaacgtttgtactcggggtttcccgtatccggtgcctctttgaacgaagatagcattctgcaaaagcccgaatgtacctctttgaacggagaaagcctgacaaggagggtgcggcaagcgctatctccgtttcgaggggctgatttggtctctcccggaggtctactcccgtttcgaggggctgatgccgaagtattcacgctccaaaatcggcggaatggcgttggcgcggatgggtttttacatgcggtctagcggccgaccagccccttgaaacgggagtagacctccggcgggggtcaaatcagcccctcgaaagcggttttgccggtgcagaggtgtcgttgactgcatcgcgagccgcctcgacgtagtaacgtggggcgtatgagcgaacgtaacgaacacaatgacggaaatacgcaaaccgcatacttcgccggcggctgcttctggggtctggagcgctacttccagaacgtcgacggcgtcacggacaccacggtcggctacgcgcaatccaccgtcgaatcgccgacctacgagcaggtatgcgcgggcggcaccgatgcggccgaaaccgtgaaagtcgagtttgacccggcacaggtcagcctgcggacgctgacattgctgttcctggaggtcatcgacccgttctccgtggaccagcagggcgaggaccgcggccggcagtaccgcaccggcatgttctacacggacgagacgcagcgcgctgtgtatgtggcggctctggagcagctggtcgaccgccaaccgcagcgcccggccgtactggtcgaaccgctgcgcaacttctacccggccgaggcacaccatcaggactatctggtgaacaaccccggcggctactgccatgtaccgatcgccgcaatcgcgaacgtaaaacgccgtcagaagtacgtggaacgcatctgggatctgacgcttgagcagttcgcggtcacgcagaacgccgctaccgagcgcccgttcgtcaacgagtatgacgaggagtttgagcccggcatctacgtggacatcgtcagtggcgaaccgctgttctcgtcgcaagacaagttcgattccggctgcggctggcccgcgttctcccgcccgattgccggtgacttgctgaccgagcatgaggaccaccgcattccgggccgcgaccgcatcgaagtgcgcacgtcggacacacagattcacttgggccacgtgttcaccgacggtccggccgaccgcggcggcctgcgctactgcatgaattccgccgcactgcgtttcgtgccgcgctcgcgtatggtcgaggagggctacggcgactggattccggccgtggatggggatgatcaggcatgagcatggagaatatcgcgggcgctcgcaagcccgccaagcgtgaggatgagcacacggtcgccggcgagcatcgcatgatgcgccgtgcggaccgcgaggtgaccgatcccgagcggatcgccgcgatcatcgccgcctgcgacatcgttgaagtggcctatgcggatgccgagggcctgactatcgtgccgctgaatttcggctttgattacgacgaggcgactggcaagctgacgctctggttccactccgcgccgcgcggccgcaagctcgacgcgattcgcgccgccgccggtggccgactgcccgtggctttcaccatgcagaccgactgcgaggtggtggcgggccgcaccacgtgcaattggggtgaggcgttcaagtcgatcgtcggcaatggcacggcgtcactggtcgaggatctggatgaatgccgccacggcttgcagacgctgatggcacagcaggcgcatatgccgaatgtggaattcactgatgcgcaggtccgcagcgtcacggtgtggaagattgagtccgactacttcaccaccaaagtccgcaccaaacccgtgcccgcacacatgcatcagcgttagccggggatagcgcgccacctccccactggcgggaggcagcgcgcagcgccggtggatggcccacgtccggacccgatagacttgccgccatggcagcagtgacagtggtaattaccagctacaatcagggcccgttgattcacgaggcagtcgagtcgtcattggccccagacggttcgtccggaacggatcatcatcgtgaacgatgggcccgatgaccacgcatccgtcgagatgctgaacgccactctcgacgattgccggcacggggcgatggatgcgaatggtgtggccatcgacctcatcggccaggcaaacgccggtccttccgccgcgcgcaaccgtggcatcgccgccgccgaaacgccgttcgtagtggtgttggatggcgatgaccgtttgcggccggccttcattgagcgcacgttgccgatgttgtccgccgacaaaacgatggtcgccgcatccggctggctgcagactttcggtgtcctggaatcagtggtccagccgactggtggcaatgccgccgcgttcgtgtcgcataattgctgcccggccacgtgcatgattcgccgtgtcgcgtgggagtgctgcggcggctacgacgagtcgatgcgcggcggcttcgaggactgggacttcttcctgtcgttgttggagtgcggattgacggtggaaaacgatatctgcggtgctggggttactggcggtactgagcatgtcggaggttttgggagtgcctgggatacagagaatcccgcaaaagacgcggcccatatcggcatcgccctcgagccgctgatcgagtaccgcacggccccggcctcctcaaacgtgaccagcatgaccaagcgcctcgatctcatgcgcttcctgatcgccaagcaccgcgatctctacgccgcgcacatcgccgacgccatcctcggcgttgaagccatctccatgagccgcttaaccatgtgggaatcgttgatgtgcggtgacgccaccgccagccaagcctttatgctccaccccacctacggcgacggcggaatggccgccgccatacgcttgcggagttgagaggcatcagctgaccaaatgccgatagagctccggatcgattggccgggccaaccgcaggatcgacagcgtgaccttcacgctgccttgtccgcttgcgtcaggtttggtggtgagctgagggttgtcaaacgcagcaacgtggccaacgtagtagtacttaccctcggcctcttccgccttgcgcataacgaataacgggacgaaatgcgtctggccccaattcgggccaatgccgttaagcgcccattggaattcgggagactgcggagttcgtccattcttgctgaagtatttcatttcctgtgtgctcagaattcatcttcgtattgacttgccgcgtatttcacgaagatgggcatggtattggtttccttgtcgaggaggtaaccacccacgttttgcggagtattctccttcttccatccgcacagtcgcatgacgtctgccatggaatatttgcgttcgtacaagaacatgtgatcaaagacctgttgcctgtcggcggcctcacggaatatatctcggcaattggccataccggtgcgcagagtgtccgcaaagaagatacggaacgttctgttcgtggcaagcatatcggcgaatctgctgttcaatcgatatgcggtaccgttttctgtgccggtgctgttcgcggcttcgactaatggctgattgccgaaacgattgcagtttgggccggtgaaatatgagtaatcgagcacgctgatcgcagagtcgaattgcgtgtctgaaccatcggactgcgggaattcagtacgaatcgcatcgagcaattcgctgcggccgattggcgagcccgcactccaatgctgcggtacgtcgtcgtcgagccgttcgctgacgaaatggcatagctgagcaagaatgaccaattcgtgcggtcgcaatccgggcagcagcagctccgctgccatcttgagtatcgcgtcttcaacgtcggtcaccggctccaactgatcctcaaatgtcgcttcatgatgtttgcctttgcccaggcttttttcacgggaacgcacgaaatcaagatagttgctgcgcttcgatgcgatggtatacggcagtgaggggtcgtagttatagatgtccgtaagcatggggatgcggcccagctcgtaacggacttggcgatactgttcggacagctttttcatgtcggaccagtcggcggtgtccaaagacttaaggatgcgctccttggcgatcgggtcgaaactgatggacgacaggccgattgactttctctgcaggttcttgcgagctctgtcgcggtcgccggtgttgccgtataacgccaccggaatcagatagttgttgttgtaattgccaatgaaatcgataaccacaacgctttctttgtgcgggaatttgcgcagtccgcgcccgagctgctgcgtgaagataatgctggattcggtgctgcgcaacatgacgatttggttgacggcgggaatatcaactccctcattgaacatatcgacagtgaagagatagtcgagttcgccttcagtgagcttgcggacgtattcgtctcgctgcgtctgggacatgggcctgccgtcatcgtccgtgctggtaacggcagcggtgcgataggggcgttcggcttgttgattccactgttggttaaacagctgggatagcttatgggcttcctcctgtcgactgcagaacacgagtccggtgaccggaatgttgaactgcccatattcctgcaacttgtcaatgatgtggcggactcgcttttcggtggcaagctgctcgatctcgtacttgagctgtttcgagtccttcgcatcaaggcccttggagacatcgagacgatgggcgattccattcggatcgtcgttggagccaaggtattccgcaacaccgtagtagtggaatggacagagcatgttctcgtccaacgccttttgcaagcgaatttcgtacgcgatgttatgcccgaatagctcgaagatgttgatgccgtcggtgcgctctggcgtggcggtcatgccgagcatgaagtcggcatctttgaaatgattgatgacgcgctgatatccttcggctccagcgtgatgaacttcgtcaaccagaacgtagtcgaattcatcggatttgaattgcgccaaaacctccggctgccgcatcgtctgtaccgtggcgaatacgtagcggcggtcctgttgcttgctggtgcctgaatacaatcccaattcggattcatcgcagccgagcaccttttggtaagacttcattgcagtttgaagaatcatctgctgctgggcgatgtacagcatgcgcttcggctggcattcgcgtacgtcgaatgcggaaaggtacgtctttccggtgccggtggccgacacgataattgcgcggtgctcgccttgttcacgaatcttcttgagattcgccaacgcctcctgttgcatggcgtttggctgaatgtcatgcccctcaagcgactgcagaatctcatgacgcggtggggcgtatttcttgaaatcttcctcatactgtttgatccactcttcggtcagcggaacggaatcagccacctgtgagtcgatttcatcctggaactgcccgaccagctctccatccgccagcgatgagactttgagattccattcgcgttgcgtggtcaatgcggctccagtgagattggaactgccaacgtacaggtcgtaatagggtgtaccgtctttcatgcggcgagaaaagatatatcccttgggatggaatggttgtccttgagccattgcggaaactgaggtattacgggaaccttcccacacgcgaacgtcaacaccagtggtgttctgaagatgcagcagctcccagaatgccctgggatcgttgaaatgatttttcgttgaggtaatcagtgtgcccgctcgggtcgctgtttcatggtgacttctgaagtcttcaaataagctgagcacggcctcagccgagacgaatgcgacagaaatgtcgaaggaatcgctagtagccaaggaattgccgatttcctcgcgcatggtcaatccaccggggcgatttgcgatgagggtcggcttatattcgccgggagcatctgagcgcggctcgatcagacctgagatgacatcttcgaggatcgagggggttggatcagaatcgtgatgttgcgtgttggctggagagtctgaggtgctgaccagatttatagacatgttgccctgttcccttgcgattcggatcgtttgatgactgcctgactgcgctgtggcgcgttcatcggagcgtcagttgtttgttcgcgataatcgcgactgcttcgcgatctaccggagcccagttcaatgtcggcatatcagcaggattcagccatcggatatcggtgtgctcggtgagatgcggcgtaccggcgatgaggtgacagatgaatgtggtgagccgcacggttccaaagtcgtaggcgtattcgctggtacatacctcttccgcgacctcaacttcgcataacagctcttcttcgatttcgcggtgcaaggcttgccgcgctgtttcatgaggctcaattttgccgccggggaactcccagtatccggccaacgactttcccgggccacgctgggcgcatagtacggtgccgttggtgacgattgcagctcccacgacgttaatgattttgcgttcccgctccatgaacaaccaggatacaacgcttcacgatccacaagcgatccacgatcctcggtggttttgcatatcgatcctgatgcttttgattatgcgatcggacgggtcgaaaatgtcggtgtggacgctgccgactattgtggtagccaagagaagcgatccgtttccgaggtgagattcgggaacggtccgactctcggcagtgatttatctacgcagacaagccaaaggagcctcgccatgattctcgtcaccaccaccccgtccgtcgacggatacaccatcaccaactaccagggcatcgtcttcggcgaagtggtatccggtgtgaacatgttcaaggatcttggcgcgggcctgcgcaacatgttcggcggccgcagccagggctatgaggaagagctgatgcgtgcccgcaacgaggccatcgccgaaatgcaacaacgcgcggaggcgatgggtgcgcacgccgtggtcggcgtggacatcgactacgaggtgctcggcgccgacaacggtatgctgatggtcaccgcgtccggcaccgccgtgcagatcgcgcgtacggcctgagtccatcgagcacagcctgggcccgagctcgtccaccgagccgggctttgtcggttatcgtgacgcattacactgacgctcatgaccatacgaatcgaagcatacgaccggttgcccgacgcggcccgcgccatccgcgagcaggtgttcatccgcgaacgcgactggcggccggaattcgatgaatgggatgccgcgtccgtgcatctgctggcgttcgattcggataatgatgcgcccaatcgccctggctcgtccgcgcaattggcctcacgcagccagcccattcagcccagccagaatcaccccgtagcgacctgtcggttctacgcggaccccgatcatcccgaccagcccgggcgatacatcatcgcgcgactggcggtgctgcccgaggcgcaaggcaggcacatcggctcgcggctgctggccgacgccgaacgccgcatcgcgcaagccggcggaaccatgaccgccgtgcactcggaaaacgaccactacaagttctacgaacagcgcggctaccggctcactgacgaggtctatgaaggcggccgtcacggctggctggtcaaggacctatctcgtaacgtatgaaggcccgcctcggtactggtcgagcgaacctacagcgcgcagacaatcagataaatcgacacgacgtggcagacatacccgatgaccgtgcccaagtgaaacacctcgtgaaactcgaaccagccggggacgggattcggcttgcgtagcgcaaagcatacggcgccggcgatatatgcggcgcctccgcacgcgatgagcacggtcggcgccgggcctactgcgggagccgtccagagctgcggaataagcgttaccggggccagtcccagcacgacgtagacggtggtgaacacccagttcggcgtccgcagccagacgatatgcagtatcgtgccgatcgccgcggtcgcccagatcaccgtcagatatggccggcgaatcgccgggctgagcgcgaacagcacgggtgtgttggtgccggcgatgatgaggaagatgttcgaataatcgatgccgcacagcacgcgagtcaccttcgcgctgcgccacggcacgacgtgcagcagcgcgctgttgccgaacagcagcatggccgaggcgccgtacaccgcgcacgccgctttgacgggccctgccggcgcgatacagatcagtacgatggacgccgcgatgcacagcggcagggtggcgaggtgcagccatccgcgcaggcgcggcttgcgattgccgaatgcgtccacggggacgatttggcgtttgatcgccttcagcgcggccttggcttggcgatagcgcgattgcgcggccctgtactgagccgatgcgtggtccagtgcggtggggctggtgcttgcgctggatttttgactcgcggttgtggaaggcgcaactgttgcggcggaagccatgtttcgtccagatggcgtgctgatggaaacgctcatactgatcacctcgctatggccggcgacgctctcccggccactaacttacgctaccgtaacctagtataggcccgcgcaataatcaaggttgatttcgtaatgcttacagttcttccgtggtgtggtattcggtggtgcggttgcggaatacatcgctgagtctgtgaactcgtattatgcgtgtctgctgggtccgacttgtgtcggttcctgatttcggattgctgcgaatgatgctctcgacgccgccctgctaattgccggattcgtacggctcggccgttcggccgagctggtcgtcggcgactccagatacttcgttggtttcgtctcggttcatgatgttatgtaatgctagtttatggcggatggaaagttgaggaaagttaaatctgcttcatgagcttctctctgatctgtatttgtcccagttcatatgtcaatcgtttgacctgccgaccgggggcagaatccgctgtcccggtcggcgatttcggcttgttttcgtgaaccgggacactccggtttcctcaactcatatcgtctggcagacggaatcggcggaataaggccgattctggaattggcacgttgtcccggttttcgcataaatcgattgacatttataccggggcaacaaaaattgtcccggtttgcaaagatcgcccgaaatcgcgaaccgggacagcggattctggcctggcttgaacgtcaaacgattgatgcaggtaccgggacattttccgccacgaaagttgggccataagtctcaagtcctaaagcccccctgaaaaacggcgcttgcccggacaaagcaaaagagccggaacctttcggttccagccctttagttgctggtgcgagtggggggagttgaacccccacgagcatacactcactgccacctgaagacagcgcgtctaccattccgccacactcgcagacaatcgactaacttacacccggctgggtaatcatgcaatcttcggcgtgtcgcatgggaggcagggatatatcgcttgtgggtctcctgcgggcgccgtgatctttgagggtggcggcactcccctcagtcacttcgtgacagctcgtccgcaattaaggacgggccttgcctgcaacctgctggttcgactatcgtctcaccttcgactacaaacagcccactgggctgtttgcttaacgtctcagcctcagcgaggggagcagagagaagttcggcacaagccgcaacgaaggagaaaaactcacaaccctggccggcgctcgccgttgccgtagaagtgggccaacgcttcgtcgcggaactcatcaaagtatccgccgtcgatcgaggcgcggatgtcgtctagcagcttcacgaagaaatgctcgttatggatcgtggccaacgtaaacccgttgaactcgcgggcgcgcagcaggtggtcgacgtacgcgcgcgaataatgctggcatgtgtagcagtcgcatccctcctccagcggcccgaaatcgaacttatgctgggcgcgcttgatgttgtaccggccggcgcgcgtgtagatcgcgccgttgcgggcgcagcgcgcgggggccacgcagtcgaaggtgtcgccgccgttctccacgcacgcgaagatatcgtccacggaggcgatgcccagcacatggcgcgggcggttctccggcatcgcgtcgcagatccacgcgcaggtgtctccaatgatgcgcttctcgattgcgccgccgattcccacgccgtcgaagtccagcgaggcgatctgcgaggccgcgcgccggcgtagatcctcgtaattcgcgccctgcaccacgccatacagcgcctgatagggcttgcccagccgctcagccgtcagccgctggtgctcgtccacgcatcggcgggcccagcggaaggtgcgttccaccgagtcctcctggtaggagcgggtgttcatcagcgtggtgagttcgtcgaacgcgaacatgatgtctgcgccgattttgtgctggatgcccatcgaaatctcggcggagaaacgatgtgcgtcaccattcaaaggcgacttgaacgtcacgccgtcctcatccacccaggccatgcgctccttgcccttggcgatgatgtcgtccgacttcatgccggtcacgtccattgccagcgtcttcttgaagccgacgcccagcgacatcacttggaaaccgccggaatcggtgaacgtgggcccgttccagttcatgaaacgcgccaagccgccggccgcgtccagcacgtcctcgcccgggcgctcgaataggtggaaggcgttggccagcaggcactgtgcgcctagattcttcatctgctcgggcaacacggccttcatcgcggcttgcgtgcccaccggcacgaaggcaggcgtgcgaatatcgccgtggggcgtgtgaatgatgccggtgcggccgtatcgggcaccgtcgcgtccaagtccgctggccgtggatggcaggcgggtgatcgtttcgaaatggaaggcgctgcggtcgccgggctgtccgggctgtgcgcccaacggatgttcaagaaggctgatcgtcatatgttcactttaggcagaagggtcagaaaagggccggaaattgtgaagaactcggtttcgaggggcggatttcgccgctcccgaacgtctacttccgcttcaaggggctcccggtcaagtaggccggctgcaaaaatggcggaatggcgttaaatgagggcccttgatactcggaattgaccgcgcgaacagccccttgaagtgcaagtagatgttcccgaaacaggaaatcagcccctcgaagccgagatgcccataagactctgcgatgattacgcatagactttcaatcaacgttcagaaaacctccagattgactgcctttactactgaggtagcacacgagaagtggcaatgggcaagtgcccgaatagccgccgaacagacgtgataggaatttaggaaaaggagcagcaatggctgacgaatttaacccgcagggcgtcgaccagaccccgcggaataacgaaaaccccaatagtactgccgataccggcaacgccgagccgaagaacccgtttgtgggtggcgactcggttgatgccggcaacgccagcgattccagcgagcagcaagccccggtttcctcggccgccctcgctgccgatcagcagcctacgcaagccgctaccgacactgccgccaccgagcccatcccggactacgcctccgccaagggcgagagcacggtggtctcctcctcgccggcttctccggcagcaccggccgcaggccagacctcggccacaactccgctgtatcgtccggccccggaatatggcgcttatggtccgaccccgactcaggcacagggccagcagggcggccaggccggcagcaatgcccagcccacgcagcaattcccgttcggtcagcctgcacggcaaaccccacagggccagcagggcaaccgcaatccctactacaccaataacccgcagccgcagggcaacggcaatccgttcaatccgcccacgcagccgcagcagaacaacggcaacccgtttgccagccagtccggtcagaatggccggaatggccagcagccccagcagggcggtctgttcggtttcggcactcccggtaccggtacgccgaacggtcaaggcccggcccagccgggacagcccggtcagcccggccccgccaagcagggcatgtccaagacggcgagcaacatcctcatcgccgtggtcgccgccgttctggctgcggccctctgcctgggcctcggttacggcgccctcaccagcggcctgatcaccttgccgaccagcaattcgctgtccaacgtcagctcgaataagtccggctccgggtccgccaccgccaagagcggcgaagcccccgactggcagactgtcgccagcgatgtctccggctccgtggtctccatccagaccgcgttgagcaacggcaccgccaagggctccggcgccatcatcgacaccgaaggccacatcatcaccaacaaccacgtgatctccggtgcccagcagattcaggtgacgcttgccaacggcaacatgtattccgccacgctcgtcggcaccgacaccaccaccgatcttgcggtcatcaagctcgacaacccgccgagcgacctcaaggccgtgaaattcgccgattccgacaagctcgccgtcggcgagaacgtgatggccatcggcaacccgctcggctacgacgacaccgccaccaccggcatcgtctccgccctgaaccgcccggtgaccgtgaccgacgacaacaacaacgagatcgtcaccaacgccgtccagatcgacgcggccatcaaccccggcaactccggcggcccgaccttcaacgcggccggccaggtgatcggcatcaactcgtccatcgcctcgaccgccacctcatccgactccgcgggttcgatcggcatcggcttcgccatcccgtccaacctcgtcaagcgtgtggccgacgaaatcatcaaggacggcaaggtcaagcacgttgccctcggcgtggtcatcaagtccgacacggttgaagccgacggcgtgactcgcggcggcgcgaccatcaccaagtccagcgccactggcagcgcggtcgtctccggcggcccggccgacaaggccggcctcaaggagggcgacaccatcgtggccttcaacggcaacgcggtgaacaacaactactcgctgctgggcttcgtgcgcgccgcagctctcggcgataaagcgacgctgaccatcgtgcgcgacggtaagaccatggatgtggacgtgacgctcgatcaggaggagtcgtcggtgaacggttcgtccagctccgattccaacggcaacagccagaataagcagaacaaccagaataaccagaacggcaacggccggaatggttacggtaacggtaacggcaacggcaacaacgatggcggcaccggtgacggcggcggcttctccgacccattcggcctgtggtaaagctggttcagcgcgtcacacggtgttgagcggtaaccgttgaacgccgtgtcagataggcaaaggtccgcagcagtgagcaactcctgctgcgggcctttcgtatacgcgggaagcgtttggctgggtcggccggagcggcggcagatatcttgttccgtgggcttttgtatgcacgggaatcgttctggcaggacgtcagctgcaggcgcataagggctgcgagcccctcatatgcacgggaattcttggcggaatcgtaggaggggggcgattgatgccttccgactgagctgccaacgtagtttcgccgcccggcatgtcgcgttcaggccgctgatagggtaggccaagcgctgattcgggcaatgtctcgaacgatgcgcacaataattcaacacataactaaaaacgatttctttacgccgtgtatcggatggtcgcgcggagccgaaaggccctaagcaaagccgccggtgggttaacaaggcgtgaccgcagcgccgattgcgcgggccacgcttgccgcaatcgactccgtatacgagcgtaaggagcaatgatgagcggactcatcagattcttcaccaaaatcctcgacatctgccgacttgtgccgatgcttcccgttgttgttatcgccgcaatcccgctggcattgctgggcgattggcacccatggggcaacgcaattgcgatgccggtgctgggtaatcctggtgtaggccaatggctgataatcgcgctggtggcaatcattgtgattgacacagtgcgtggcatgattgacgatttgcgccacggacaagtcggcgtcgatttgctggccgtagtggcgattctttccaccgttgccgtccgcgagtactgggcaagctgggcggtcatgctgatgattacgtccggcgaggccattgaggaatacgcgcaggccaaggccgagcacagtttgaccgcattgatgcaggcagcaccgcaaactgcgcacgtcgtcaacttgcctggcgtggggtgtggggctgccgctgataaggacgattcgtccgatggcttccggcgtgtaggctcggttccagcgacgtcctcccctcagtcgacttcgccgacagctccccttggagaggggaaccaagtaccgccgtcgaggggagctgactcgcggagcgagactgaggggagctggtcagctgaggccgccacgtaccgcttcgacacggtgccggtcgagcaggtgaagctcggcgatgtgctcatggtgttgccgggcgaaaccgtgccggtcgacggcgaactgctttccggctcggccacgctcgatctgagcaacatcaatggcgagccggtgccgcgcgaggtgttcgccggtgcccgagtgatgtctggcgcagtgaacggttccactgccttgaccatgcgcgccacccaggtggccgccgattcccagtaccagcgcatcctcgaactcgtcgcttccgcacaggagtcccgtccggccgtggtgaaaaccgccgaccgattggccgttccgttcactgtgctgtcgctggtaatagcgggcgtcgcctgggcggtgtccggcataccgacgcggttcgcccaggtgttagtgctggctacgccctgtccactgcttatcgccgcgcccgtggcatacatcgccggtactggccgtctcgccgccgccggtgtgctcatcaaggcgcaggatgtgctcgaaaaccttggccgcgtcacccaggtattcttcgataaaaccggcacgcttaccgtcaagcagccgcaagtggtgcgcgttgagatgctgcctggagctgagacccgtcttaatgaggaccatgtgctgatgatggccggcgttgtagagagctattccgtacacatcctgtcgaagggcatcgccaaagccggtgccgacgcgatggcccgcttgcgtcagcgtttcgcggacggccagcgtctctgccccgaaccagaggccagctggcccggccacggccgcgaatatccggtcgtcaagaatattaatgaggactccggcaagggcgtgtccggcgaggtgaacggccatgccgtccgcgtcgggcgactgtcgttcgctgcagccggggaggatgggttcttgactgccgaggtagcgggtgtaagccgggcggatggcccacggcaggaggcggccgacctcctcagcccgcttcacggacagtcccctctgggcggggatactgaggcaggatctggccgtacgattgccgggaacactaaggaaaaggaaacgctgcgtacgcgattcggtatgctgcagccggacgaaatggcctcctacgtgtccgttgacgggcaactgatcgcccgcatcgtgctgcgagatgtacctcgcgccaacaccaaaaccgcgctcgccaatctgcacgaactgggtgttaccaagctcgccatgcttaccggcgataagcacgcctcggccgaaatcatcgcggacgaagtcggcatcgacgaggtccacgccgagctgttccccgaagacaaggttgccgccgtcaaggctgccacggaggcaagcgccgcgccggccgggcgcgcgaatcacgccgccagccctgtgtccgatgccgtagatggcatccggtccgatggttctcaaccgtcgcgttctcgatgcagccgcgccgccgcaatccgcaagccggtcacgatgatggtcggcgacggcgtgaacgatgccccggtacttgccgtcgccgatatcggcgtggccatgaccgacggcacttccactgctgcttccgaaagcgcccaagtggtcattatgaatgacgatattgccgctgtgccgcgcgctatcgccattgcacgccgtaccaagcgcgtgatgctgcaggccgtgatcgctggtctcgtactcgccaccatcggcatgattgccgccgccttcaacctcattccagtggtcgtcggcgctttcctccaagaggtcatcgacgtggtcagcatcctctgggccctcactgccctcatcgaccgcgactaggcggggtatctcctcgactgagtcgcggttttgccccgctgacggtctgtaagcggggcgattctgtgggctaatagtggttttgcttcgctggtgggggtcagtggggtgctttggctggttagtcgcggttttgctccgctgatgggctgtaagcggagcaatttctcgggttactcgcgattttgctccgctggcggtctgtgagtggggcaatttcttgatcgactcgtggttttgccccgctggcgtgaggctggcagagggtattaggcacaggattcccaccactcgcccctgttgcaacggaaggctttgcgataacctgtaacgcgtgactgaatctgtgaatactgaactccgcattgctgtaattggcgctggtccggccggcgtctactcatccgatatcttcctgcgccagctcaagaaactcggcgaggaactcggcctcggcaccaaggcccgcatcgacctgttcgaaaagctgcc

SEQ ID NO: 127 - DNA, 7320 bp, Unknown
  R206_24m  MAG No. k141_36924
ggactgatcaagcaccacggccttgacggtggtggaaccgatgtccaatcccacacgcaggggcttcgggtgtgaagcgggctttacgctcgcgtcagtgacgatgtcaaccatgtgttcctcttaattccgacttccgggtatgtgcgccttcaggcatcatgagccgtttcgggatggctggcagatacctgcggacggcttcgcccggctacttcttctggaatattagtccgaccacctgcccaacgtgacgccgggcatggtgatttcgctcacgggaagggcgttccccaacagttccgacgatattgctgagtgcggcattccggacctgctactacgaggcctgttggccttcgccggcttcgcggtctctcaaatagatttcggggatatctcgttcttgatcgtggagcttggcccagatgaccggttcgccggcttctagggacttggacacatcgaggatgcgctggtttctggagccgcggaattgcagcagcgagtccttctggtctttgaggtagcggccgtcgacgaggatgtcgataagatgcagcaattcaagcttgtctggtgtttctccgaggcgcatgagctcttcccatgtgtagccggtccacgaccagatatctttggtatggccgaattcctgacggatacgttgtgcgagcggcaccagcacaggagtgttgaggaatggctcgccaccaaggaacgtaatgccttgcacccatggcgctttcaggtcttcgatgatcttgtcttcaagtttttgcgtgtattcgtggcctgcttggaagtcccagatggaggcgttgaagcagtcgacgcagtggaaggggcacccggagacgtaaagggagttgcgcacgccttctccgtcggtgacgatgaaggttttgtagtcggcgatcatccgcttggacatgcgccggccatcccattgaccggctttcggatcgttggcaagaccgttggagggtacggaggggccacgcccggtctcgctggccgcaaagtcatggcgcttgggttcgggcttggtcgtatgcaactccggcatgattccctccttgcggaaagcattagctcccctctttgagggggagctgtcgtcgtaggcgactgaggggagcttcggaatagctcttcggactcccctcagtcagctttgctgacagctcccctcagagaggggagcctactcacgaataaccctacttggcctcttcgaaccactcgcgagtggtgccgtcatccagcgtcacacgaccggtttcgccgctcatgtgcttgactcggtgggcgatctcctcgtgacggccgtgcaccatcgggcgctggaccgggctgccgaggtagccgcaggtgcgcttggtgacgttgcacttgtccgggttggagttaccgcactccgggcacttgaagccttcctcggtcggctcgaagtcgccctggaagccgcacacgaagcagtggtcgatcggggtgttggtgcccaggtagccgatgccgatgttgtaggcgtaatcccacacggcttcgagcgccttcgggttgtcctgcaggcacgggtactcgcagtagttgatgaagccgccggaagcgtagtacgggaagtccttctcgtagctgagcttctccatcggggtgggctgcaaccacaccgggtagtggaaggagttggtgtagaagtcgtggtcagtcacgccttcgatacggccgaacttttcacggtccatgcggttgaagcggtcggtcagggattcagccggagtggagtacacggaatagtggtagccctccgctttgctccactgcttgcacagctcgttcatgcgcttgacgatggacagcgcgaactccttgccttccggatcccagccgtggtcgcgaatccagttcttgccgtagaagaccgcggtggtctcggcaaggccgatgtagccgagcgacacggtggcacgctcgttcttgaacagctgatccacgttgtcgttggcaccaagacgaccaaacgcaccgaagcggaacagggtcggggcgttgaccggggtggcttccttgcaacgcatgatgcggaactggagggcctggtgggcgacttccatacgctcgttgaacagcttccagaagcgagccttgtcaccgtgggattcgatggcgatacgcggcacattgacggtgaccacgccgaggttcatacggccgtcttcttcatccttgccggtctccgggttgatccaaccctgcaggaaggagcggcaacccatcggagccttgaaggagcctgtgatcttgacgatgttctcgtagaacaccacatccgggtacatgcgcttggtggcggactcgagggcgagctgcttcagatcgtagttcgggtcacccgggtcggcgttcacgccgtgcttcacagtaaagacgagcttcgggaagatggcggtgtggtgttccttgccgaggccgcgaatacggttcagcaggattgcgcgctgcacttcacgagagaaccagtcggtgccgagaccaaagccgacagtcacgaacggggtctggccgttggacacacggttggagttgatctggtattccatggtctgcatggcatcatagatggccttgcgggtacgaatcttggcgaggatttcacgctcctgctcaagttcgtcaacgtcggtgtggaacggggtgtccatcggcagcggttcacgggaaccgaaatgcagtttggcgggctcgttcttcttggcgctctcgacctgacgacgggcgaattcaaccggcatgccgtcggggatggtctcacgagcttcctcaaggaacttctcgtaagccttcttggcatactgggcaagatgctcgtcggcacggttggcggtctggccaccatactggctggaggccacgtccttcatgatctgggtaatctgggtggccgcaatggcgatggacttcggggaagccatcggagcgttgccaagagtgaagccattggccaacatgtcccagaagttcggcaaagagcagttggactgggcagtgaacggcgagtagtcggcatcgtggaagtgaatatcgcccttcatgtgggcgttggacaccgctggaggcagcatgttgaacgcggcggccttggacacggcaccagccagcaaatcacgctgggtggagtagacgttggaatccttgttcgcgttctcgtgaatcagggtcgggtcatgattaatgaagcgagcaacggcctcgttcacatcagtggccttggcgcgctgaatgtctttgtcgagacggtagttggtgtaggcgcgagccacatcgtacaggtgggcgtcaatgagggcgtgctccacgaggttctggatgtcctcgatcttggcggggccggcgtaacgccccttgatttcgccttcgacttggttggcgaaaccacggatcatggcatcttcttcggggccgacttccttgttcaggtcaccgaaagcagacttgaccgcagagatgatgttaatggggtcgaagtcgaccacacgaccatcacgcttctcaacgagcacggtggaggccttggcggccaccttggtctcgttatcggtgacgatttcctccaacacctgtgcgcccatcgggcacccctttcctataaggcgaacactctcctgagttccgcattttggccgcactcgacgtgggccacacgaaattacattgatgtcgtttttttgaacctctagaagaatacggcatctccaccactatatctagtgctcaacagtggtgtgtcgaactatttatagggttttcggctattttccgccaaaaccacaagtgtgtgattagcgtaactgttttctgctcgcgtgtcgcacagcgagctcactaacgactctcaatcgtcagcgcaacgcatatctcactcctcttcatagcacccgtttcttcgccataatgactcctttcttctgatgcaccagaccatctccatcatcggctgatacatcgcttcgtacggttctcgcattcatcatcacaccgttttcaggcgacggtaaatatttaccgtcatcaaccaacgcacttatagtggagtgcatgactactgcaatgggctacccatctaccggccgtccaccgaccgccgcttcactggtctcggctggctttgagccgggtcaaggcactttcgcgcctgatcagggcaccatcaatctgccgaatgagcctcgccctatcgatcagctgcctgcacgcgccgctgaaaccagcgcgcaaaatccgtggccggtaagtgtgctgagccagaagttctacggtgccgtggaacgatggccgtccgcgtgggtcaccggccagatcacgcagatcaatacccgtcgcgccggctcggcctacatcacgctgcgcgacgacttcgaggatatcgccatggaagtcaatggcttcggcaggttcgcggccgcggccagccagttcgttcagggcgaccgcgtggtgattcatggcaaaccgaacctgtggatgaagcgcacttcgctgtcgttgcgcggggacacgattctcaaggtcggagccggtggcagcctcaaggccatgatcgacgaattgcgcaagcagcttaagggcgagggcctgttcgatgccgatcacaaactgcctctcccggagtttccgaagactattggcctgatttgcgcacctcaggcacgtgcggaaggcgatgtgatcaccaatgtgaaccttcgttggccttccgtaaccttcaaggtggtccatgtgcatgttcagggcgagcaatgcccggccgaagtggttcaggccattgcacaactcgatgccgacccgagcgtggatgtgatcatcgtggcccgtggcggcggctcgtttgaggatctcatcggtttctcggatgagcgtgtggttcgtgcggcgtatgcctgcaccacaccattaatctcctccatcgggcatgaggatgactggacgttgctggatctggtcgccgatcttagagcctccacccccaccgatgcggccaagcgcgtggtgccggatgtgcgtgagcagtcgcagctcatcgaaggtgccatcgaccgtatgcgactgcgggtccgttcgcgcgtggagaacgagattcgacttatcgagggatatgcgaaccggccaagcctgacccaaccgcataccatgctcgaaccgcatcagcggctaatcgacgattccctgcagcggcttgacatcggcctgcgacgcatcgtggacgatgcccagctcaccgtcgagcgagctcacgcctcactgaccgcactcagcccgcaatccacattgaatcgaggctatgcggtggtgcagtcctccgatggccacgtgctggatgacgcttcgcgggtcagtaccggggatgacatcaccgtcaccctgaaaaagggcgtcattactgccaccgccacatccgcaaccgcaaccgcgtaatgcaccatatgcattcacgcatatataccgtatatataaggagaacaagatgaccgagaacaccacacccaccgacaagaacacccccgcctcgtccctgacggacaaggaacgcgagctcatcgcccagatgccatatgaggaggcgcgcgacaagctgattcaggctgtccaggcactggaaaccggcggcctcaatcttgaccagtcgatgcgtcaatgggaaatcggcgaggccttggccaagcgcgcccagggcctgctcaacgacgtacgagccaagctcgaccaggcacaagccgagcaagccgccaacgaagccaccgcaggcacgcagtccaacctcgactgagttgcctcccggcgcggcatcccgcggctcgcacctgaatccggactggactgagttctgcttcccggcatacgatagtggtgattaggccacattggtagcagttatagaagggaaatcccatgtcaacgctgattcttgtattccatccgcacctgaaggacggctcgcgagtgaacgcccgtctgcttgccgaactcgccgcacaaggcgaggacgacatcatcgtacgcgacgaatacgccgaatatccgaacttctccgtcaacgccgacaaggagcacgagctactggaggccgccgaccgcgtaatcctccagttcccgttctactggtactcctcccccgcgctgctcaaggaatgggaagacgaggtcatcaccgcaggctgggcctacggtggaggccacgcactcaagggcaaggagctcaagctggtggtcaccactggttccgacgccgccaagtaccgcaaggatggcgagtacagccgcaccatggaggagctgctgagcccgtttgaggtcgtggcgtacaagatcggcatgaactatgctgagccgttcctggtgcagggcaccgccaccatcggcgatgcggagctggatcaggccgccgccgattatgtttcggcgattttggactgaataagctgaggccgggtgcaagtcgcacccggccttgttgtttcgcgggctagccgcggtctctcccagtcagcctgcggctgacagctccctcgtcagagagagcttattttttggatcagagggagttgatagctacttcttcaacggcacgtagatcacgtcgtcaatgagctcgcgatagtgctcaacgatttgcgcgcgacgggtcttcaggctcggggtcagcatgccgttggcctcggtgaattcgtctggcagaatctcgaacttacgaatcgactcggcgcgggaaacgccctcgttggcggcgttcaccgcacgctctacctcggcatgaacgatggcgttcttggccagcgaggccagatcgggttccggtttggcgccttgggattccaaccagttgttggcatccgccagatccagcgtgaccagagcggccacgaacggcttcttatcgccaataaccaagcactggttgaccacgggcgaggtcatcacggaagcctcaagcagacccggcgacacgttcttgccgccggcggtgatgatgaggtccttcttacggccagtgatggaaatgaatccgtcttcggagatatcgcccaaatcaccggtgtgcagccagccatcggtgatctgctgggtggtgacctcagggttgttgtggtaccccttgcacaccagcggtcccttgatcaccagctcgccatcctcggcgatgccggcggtgatgccgcacatcggcatgccgatggtgccgatgcgattgtcttccggcaagctcacgcacaccggaccacaggtttccgtcatgccgtagccttccagcaccggcatgcc

SEQ ID NO: 128 - DNA, 63779 bp, Unknown
  R206_24m  MAG No. k141_37198
ccaggcactgcctggtcggataacccagatgctccaccacctgggccgtcgtcatcggcgtggtgaaatacaactccaccgcacgctctcgttcctcaagaccggacatacgaaaatctttccgttcggtctccaagaaaacgtccgcagccccgtcattcaagatacactgggcggataatgttggggtgcacgcttgcggtagactgtggacgactaacaggaaggtgggatggcatgaaacgtgtggcgcatgtgttaaaggggtcttcctgtaatatcgcgatttttctggtgttgttcacactgcaggcctgcatgttcgttgttcaggtcggtcctcttaccattccagatcccgacatgcatccgttgtctacgtatgcgttggctaccggtcaatcgttgaatcctcccgtaaagggcaaggacaaacatggtaatgccataaaaagcagtacctcaagggtgatgatcgcttgctgatgattcccggtgccgggaatatattggttttcgatgcattggagcgagcttggcgtggtgattcgttgcaagacgggcagcgatccgctgatattatgccagctagtcagattgttgttccgaatgagacacgatccaaccggtccaacgcatatttcccgcttgattatctgcctcaggccattggcatgaaaatagccatgctggtgaacctgtcgccatatgcgcagtggcaggcggcgcgaatatccaacagcatactgtatgcgattatgggatgctttgccattgcactgttgccgcgttggaaaacgctgatggcgttgctattagttattccaccggtggcgtttgtggcatcgagtctgatgattgacggcatgattgtggcgctttcggcctgtatggtggcagccatcgctgcgattgcagggaacaaacatgtgatttctctgccatgcactgtggcattgggagtgctggcatgggctctggcatgtgagaagctgtcctatgcgtttgtggcgggtgccgcgctattcctgccatctgcggtaatgactgtgcagcgcaaagtggaatttgttggcgttgcggcggtgctgatgggggtgttgtaccttccctggagcgtgctgtttagtagttcgttggcgcaagtgaatgtgtcgcataacatgagcgttgcgctgtcccatccgatactcaccatcggcaagatagttcgttccatgatatttcttgggacttatcacctcactcagcttccagtctggtataccgtgatgtcggttgtgcttgtactggtttggcttgcggcgttggtgtatacggtgaagacaactggggctgctcgtatggcaccgtccgcatgggtgggaaagtatcggttcctgatcttggccctagtgattgcagccgctgagatagcagcgttcgtgctctttgtgggaatgacttggaatgacttggaatcgatgggtcgattcggagtgttccaaggaatacagggacggtatgtgctcccggtgttgccagtattcctgctgggactagtcatagttgacgataggaaggtaagccagcgcgccctagcttgctgatgataagggtttgctggtcggctattgctctacttcatcgagtgaatgcggttgtcatacacaacgttctcgcaggagcgaatcgtggcaagtaccgcgcatttcaggcgttcgccgatgctcagcttgctgatcagggcgcgcatggtggccacgtcatcgagatggttctgccagtcgctgtcatgtagttcttcggagctgagcgccttgaggcctttgccttcatcgcgcacgctggcggtcagaccgaagtagttccggcacggggtgatgccctgctccagagtgaattggaaattctcggctgcggagagcacgttatcgtgccagaatgcggcggttcgctttgagtgcgtcaccgagtcgggctcctgaagccagtagtagagcacgcaatcgatgtcggccactttgcccatgcgggcgtacagggggcctgccatgcggatatcctgcgcgtaatggccctcggggaaccgcaggccgtcccacagctcgcgcttgtataggcggcaccagttcgcctcgttgaagtagcgggcctcggtattgcggccgagtttgctgccaagcagtcgcagactcttgcagaacacggtctggtaggcggcgagcgggtgctcgaacacggtgattttgccgggcgcctgcgcgcctgcctcagcctctttggacacctcgcccagctgggagacgccgaactggcgccagcgggccttgctcatatccgccccggtgctttgcagtgcgtgcagcaggtattcgatattgcggcggttgaggatgtcgtcgttgtcggagaacgcgatgtactcgccatgcgcggcatcgaggccggtgttctgggccttggcgatgccgccgttttcctgatggatcacggtgacgcggctgtcctgcgtcgcatactcatcgcagatggccgggctggaatccttggccccgtcgtccaccagaatcacctcgaggtttgtatacgactgctgcaggatcgaatcaatgcagtaacgcaggtagtcttcggcgttgtacaccggcacgatcacggagatgaggggagtggcgttgttcggcaaggcttatgcttcctctttgtatatgcggacgtatccagtatggcacgcttcctagccgagctgcgcaacgtttaatggggtacttttgctcgaggatgtttgattattgacgatgaagacacctgtggaagtcaattcagactcaaggcatcgagaatggggtagaggcgattcgcaaattcgggtacaccgcttttccggagcatgtctgcgtagtcttcaggcgtttgtggatatcatttatagctcagcagtgccgtgtgacaaactcttgccactcttcctggatcgagatccaatacatcgaggaagaaatcatcgggtctctttacttcgatgcgaagaggctgtgtcgaagtttcaggaaaatctttcgtgttgaaggtgaccaaggtttgtgcgggtaaataatctgctgctgcaagtacgtgccggtctttctcgtcgcatgtcatatttttgatgaggctttcgtaaccagtgactagagcctttgggaatgcggcagtcatcgcattgatacgttgcgccgaacgctcttctcctatgcgtaattggaggtctctcctcagctcatcgagtatctgttgtgaccagtatggggcatagaggtgttcctcggcgagacggaggatcaaatcgttgatgagttcgttgaagagccataaatctgtgtggaatgaaatatgtgacaatccagcattgagtttgagctcgtaattttggtatggctcgtctcatcggtaggataatgacgaatcgaaccttgcgcttgaacgcttattaccggaaggattgcctgagcatggcagattctgttgagtatcccgatctcgttatcgtcggcgcgggcctgttcggtctgacggtggcgcagcaggcggtggagcacaccggcgcgcgcgtgcgcatcatcgatatccgtgaccacatcggcggcaacgcgtactcgtactttgatgaggagaccggcgcggagatccacaagtatggcgcgcacctgttccacacgtccaataagcgtgtgtgggactacgtcaatcgtttcacgagcttcacgaactatgtgcaccgcgtgtatgccacgcatgacggcgaggtctatccgctgccgatcaacctgggcaccatcaatcagttcttccatgcgcgttacacgccggccgaggcgcagaagcttatcgccgggcaggcgggcgagctggccggcaccgatccggccaacctgaacgacaagggcatccagctcatcggccgaccgctgtacgaggcgttcatcaagaactacacgggcaagcagtggcagaccgaccctgccgagctgccggcggccatcgtcaagcgtctgccggtgcgcttcaactacgacaaccgctatttcaaggacacgtgggagggcctgcccgcggacggctacaccaagtggatggagcgcatgatcgatgacccgcgcatcacggtttcgctgggcgtggacttcttcgacgaatcccagccgtacaacaagaaggcgctgaaggccgcgggcgtgccggtggtgtacacgggtccggtggaccgttacttcggttacgagcttggcgacctgaagtggcgcacggtggacttcaaggaggtccgttacgacgagggcgaccacttcggttgcccggtgatgaacttctccgacgctgacgtgccgtacacgcgcgcgatcgagttcaagaacttcaacccggagcgccgcgatgcccagaacccggacaagaccgtggtgtgggaggagtacagccgtttcgccgagcgcggcgacgaaccgtactacccggtgaacacggacgcggacaaggccctgtacgcgcggtacgaggccaaggccgcggccgagccgaacaccgtgttcggcggccgcttgggcacctacaagtactatgacatgcaccaggtgatcgacaccgccctgaccgcctacgaggaacaagtcgcgccgctgctggccaagtaacagccgattgcgcgattacgcaacgaatccaaccccaagtccgaagccgttatgattatgccaacgataatcatgacggcttcggacttgttgattctttggggtgactacaaaccgctgacggcgatgtgcgctttgaggtagtcgtctatggcgaatacgcctgaggtgtctccggcacgaatctgggcggagatggagtcatattcaacggtgcctccggtttgcagatcggtaacgtcttcagcatcgtccgccgaaatggaggccgggtcggaggcggcggcaaatgcccatcgtgtggcccacatctgcacgggggtgttgccggcctgatatttctggatgaggctggtacctatgtctccggcgttgctggaatccgagacttggaacgtgcatagcgcatatttcgggtgttctcggtcggtgacggtgatggtgctgccgtccaccgaggtggtgattttgttgtgccacgagtagggcaaggtgacgcgatacgaatcagattccatggtgagcgactttttgactgcgtcgctgtattgccagacgatattaatgacgttgccgctgtgcttctgataacggtcataatctcccagcgacgtcacagtccacgagtcgctgagatctgcggtgtccgcaatatccagttcatcggccatgcaggagcgctgtgacgagccatccataccgccctcggtggcgtgcatccacactttgctgtgatctgtagacctcttctaggagaatgcctcgggatcgggcgcattgtgcggtgcgcaatccagccatgcttcgtcaagctccccgtccagatcactggggccggagtaggcgtctgtccagtcgccctgggttgggtcatcaacaacagtcttctgctgattggaatccgtgttgctgttgctcttgggagtctgcgaggattgctgcttttttggttcagtggtcggcgcagattggggcgtcccgcaagaagcgagtagcgcaatcagcggtacgagaagaaccatggcaaaacgacgatgtctcatatcacaagtctaactgtgtaggagtttgattacaggggctgtagaaaggggatgtcgtattctcgtgcatctttcgttacgattgtcactgggaatagaatgaaagtcatgcctcatcgcgaggcgtgcgcaagctgaaggagcagaggctatgactgattccaacaccaatccttatgccggttcggggcagtcgctgtggcagcccgagcaggttccggcgccttcatctgaatccgattcgggtgctgcaaatccatccggcgaggctggatcccagcagcccaataatacttatcctggtggcggttccgtgcctccgcagacaccgtacaatccgtacgctcaaggcggaacgccgtatgggcagcagtgcaatccgaactacagccagccctatgcccagcagtatggctacatgcccccagcggccaatcagcagtacaacgggtttgccattgcgggctttgtctgctcgttctttacctcaatcatcggtttgattttcagcatcatcggcttgaaccagatcaaacggtcgggcggcaaaggcaaaggcttggccactgcgggcatcatcatcagcgtggcaaagctgggcatctatctgctgctgattgtgatgattatcgtcggtctcttttcgggtatggtcgatgccgtgacgaatgatttgcggtcggattattcatacagcagatacgacgacatggacgatcagtatgattcgtactattatgacgaccagtacgactacgacgattctggcgatatcgatatcgatgatttggatcgtgcgcttgagcggctgaatggcgtgtcggaatggtcccctgcttttaccgtctactctccagcggtttccatcagcgaatgaataggtgatgagattcctgcggcgtggcattgaccggccgtgagaggaatagtcgttgccgggcgcgggctgggcgtagtcttggattcatgagactcgcacgtttttctttgaatgattcgccgcgctacgccttcgtgcagaaggacgaaacggacggcaaggactacctcatcgaacttgacggtcatccgctggccggcgaccaggtcaagcccaccggcactcgttacccggtcgacggcgacggcatccgcctgctctccccggtcatcccctccaaggtctacggcctggccaagaactacgaggcccacgcccagttcatgcacgaggccggccactccgaaatcgcccacgcgccggaagacatggtgatcttcaccaagccgtccacctcggtgattggccccgacgatccgatcgtgtacccggcctgctccaaggacatgaacttcgagccggaagtggccgtggtgatgggccgtatcgccaagaacgtgtccgttgaaaacgcgatggattacgtgctcggcttcacctgcgtgaacgacgtgacgttgcgcgacctgcagggcatcgaccccacgtggacgcgcgccaagggcttcgatacctcctgcccgcttggcccgtggattgtgatgcgtgacgacctcgactggaaggacgccaagatttccttcacgctgaacggcgaggatgtgccgatggcgtctggcaccaccgcgaacctgattcacggcatccccgagcagattgccgcgatttcgtcgttctccacgctgctgcctggtgacgtcatcatgaccggcaccccgaacgcctccggccacctcgacccaggcgacgagaccatcgtgcacgtcgagggcatcggcgatctgcgcaacgtaatcgttcgggcgtgactcgttctggatcccctctctgaggggagccgtccaggcggagaagctgactgaggggaaccaagaacgcgccttacgcttccggcagaagtgcgtgcagggcggtcatcaccaccaagctgatgatggccgtcactgtcagcgagaagccggcgagcttggcgttgccggttagcgaatcggtgaacttggttgagaagatcgtgataggggcgaacgagcccaacacgatgatctcgcgaatcctcatgtcgaatggcagtaggaaccaggcggccacggcgataatcgcgccgaataccatgcgccagacaatcaccttgcccaactccaccttgtccttgcgattgttcggaatctccatcatcagtccgatcatggccatcgcgcagaaggcgttcgcattggcgaacggggtgatgagcgtaacgatgggctgtgggatcgtgatgtgcaggaacatgaacaccagcatcagcatgtagatgtcgaaggaaatcgagcttaggaagtccctggcaatattgcgcagacgcaggatgagcggtagcgacttgaaattgtcatccatatgcagcagcgtgcgtgtgatggtcagtgacccggccgtggccacggtggcgttgccgatatcgagcatgatgatcggcagaccggcggacgggcccatgaacgtctgaaccacaggcaggcagaacgcgcccaggttcaggcccgaggcgttgagcatctggaaggcgcggtagttcttctcgtcgccgcgagaaccgaaatacacgatgaacagcggaatcgcgcaggcgaagaagccgaacaacacgatccacagcatgcgcatgtcgtgcttgttcgtggcgaacgacaggataatcgcacaaggaagcgtcagattgaataccagaccctgcacgattttgtaatcacgctcgccgaaaatgtggacatgtttgagtatgtagacaccgatgataacgagcagcagcgaaccggcctgaaaaatcatgttcttctcttatcccacaagcacccgccgcagcaccggcggcggtcaggcgcataacaaaccagccgtgagtataggagcgttcgcgcggcgctggcgcggggcggtgcatattgtggacagtcccgtaacgttgatatgccatgctggcgagatgaatatatccaataccaagtggagctcggcacgatagagaggtaggaaaacatggcagagcagacggtcaccgtaggcgttggggcattgagcatcgaggacgttatcgccgtagcgcgcggcggtgccaaagtggcgatttcggacgaatcgaagcatgagatggcgctaagtcgtgcggttatcgatcatttggccgacgacaccgtgccgcattacggtatctccaccggattcggcgcgctcgcctccacttccatccccaaggaacagcgcgcgcagctgcagaaaagtctgatccgctcgcatgccgccggtgccggaccggaagtggagcgtgaggtggtgcgcggcctgctggtgctgcgcctgagcaccctgtgcaccggacgcaccggtgtgcgcccggaaaccgcgcaggtctacgccgatatgctgaacgccggcatcaccccggtggtctacgaatacggttcgctcggatgctccggtgatttggcgccgctcgccgcctgcgctttggtggcgatgggcgaaggcgaggcccgcaacgctgacggccgcaagatcggcggcggcgaagcgctgcgtgcggccggcatcacgcccgtcgatttgaaagagaaggaaggcttggcgctggtcaacggcaccgacggcatgctcggcatgttgtgtatggccatcaccgatctgcgcctgctactcaagacggcggacatcgccgccgcgatgagcgtggaaggcatgctcggcaacgaccgcgtgttcgccgccgacttgcaggcgctgcgtccgcatcgcggccaaggcgattccgccgcgaacatcgtccgcatgctcaagggctccggtctgatcgaggccggccgcccgggctccaccgtgcgtgtgcaggacgcctactcgctgcgctgcaccccgcaggtgcacggcgccgcccgcgacaccgtggaatacgcggcctccgtggcgggcgtggaactcgcctccgccatcgacaacccgtgcgtcacgctggacggccgtgtggagtccaacggcaacttccatggcgcgccgctggcctatgtgctcgatttcctggcgattccgactgccgacgtagcctctatctccgagcgtcgtaccgaccgcttccttgacgtggcgcgcaaccgcggcctgccggcgttcctggctggtgacccgggcgtggactccggtttcatgatcgcccagtacaccgccgccggcatcgtctccgaaatgaagcgcaacgccgtgcccgcctcggtcgattcgattccgagctccgccatgcaggaagatcacgtgtcgatgggctgggccgccgcccgcaagctgcgccggtcgattccggcctttgcgcgcgtgctggccgtggaactgctgtgctcctgccgctccttcgacttccgcaagccgtaccgtccgggtgcggcgggcgccgccgtataccgcgtggtgcgccagtacgccaacgaaatcggccccgacgtacgcgatacctggaccaccccgcaaatcgaaggcgtagccaacgccatcctctccggcgaaatcctatccgccgccgaagctgccgtcggcctcctgaaatagatgtgagctccctcatcagagggggctactgttcaccctccccaccaaaatccaaaacttgagtcacctgcactcaagttttgggaatagaatgggttccaggtcggttgaccatatcagacaacgacaagttgcggtctgcggtggcgcttgcggggctttcgaagcccgcgagccgctccgcgcgggccgcatgatatggaggaatacgatatggaacagaagttcaccaccatggcccaggaggccgtcggcgacgcgattcagagtgcgtccgccgcaggaaacgcgcaggttgagaccctgcacgtcatggatgcgttgctgcgtcaggaaaacggcgtggtgcgctccctcatcgaggctgcgggcggagacccacaggccatcggcgccgccgtgcgtaacgctttggtcgcactgccgagcgcatccggctccagcacttcgcagccgcaagccagccgccagctgaccgccgccatcgcccaggctgagaaggaaatgcagcagatgggcgacgaatacgtctccaccgagcacctgcttatcggcatcgcggccagcaagccgaaccagtcggccgaaatcctggagaagaacggcgtcaccgcagcctccctgcgcaaggccgtacccggcgtgcgtggcggcgcgaaggtcaccagcccggacgcggaaggctcgtacaaggccctggagaagtactccaccgacctgacggccgccgccaaggaaggcaagctcgatccggtgatcggccgtgatcaggaaatccgccgcgtgattcagatcctctcccgtcgtaccaagaacaacccggtgctgatcggcgagcccggcgtcggcaagaccgccgtcgtggaaggcctggcccagcgtatcgtggcgggcgacgtgcccaccaccctgcaaggcaagaagctcatctcccttgacctaggctccatggtggccggctcgaagtaccgtggcgagttcgaggagcgcctgaagagcgtcctcaacgaaatcaagaacgcggacggccagatcatcaccttcatcgacgagatccataccatcgtcggcgcgggtgcggccgaaggctcgatggacgccggcaatatgctgaagcctatgctggcccgtggcgagctgcgcctgatcggcgcgaccacgctggacgagtaccgcgagaacatcgaaaaggatccggcattggaacgccgtttccaacaggtgttcgtgggcgagccgagcgtggaagacaccatcgccatcctgcgtggcctgaagcagcgttacgaggcgcaccacaaggtgacaatcggcgatgacgcgctggttgccgccgcgaccctctcgaaccgttatattccgggccgtcagctgccggacaaggccatcgacctggtcgatgaggcggctgcccacctgcgtatggagctcgactcctcgcctgaggagatcgatgaactgcagcgcaaggtgacccgtcttgaaatggaggaaatgcagctcaagaaggctgaggatcctgcatccaaggagcgtctgggcaagctgcaagccgaactcgcggacacccgtgagaagctcagcggcctcaaggcgcgttgggatgcggagcaggccggccacaacaaggtcggtgacctgcgtgccaagctcgatgacctgcgtgtgcaggcggacaagttcacccgtgagggaaatctggctgaggcctcgaagattctgtacggagagattccggctattcagaaggaactcgccgccgcggaaagcgcggatgccgaatctgccgatgccggcgcggccaacccggccgatgagccgatggtcccggaccgtgtggacgccgactcggtggccgagatcgtctccgactggaccggcattcccgttggccgcctgatgcagggcgagaacgagaagctgctgcatatggaggactacctgggcaagcgtgtgatcggccagaaggaagccatcgccgccgtgtccgacgcggtgcgccgttcgcgtgccggcatctccgacccgaaccgtccgaccggatcgttcctgttcctcggtcccaccggtgtgggcaagaccgaactggccaaggcgctcgccgacttcctgttcgacgacgagaaggccatggtccgcatcgacatgtccgaatacatggagaaggcttcagtctcgcgcctgatcggtgcggctccgggctacgtgggctacgagcagggcggccagctgaccgaggccgtgcgccgccgcccgtattccgtggtgctgttcgacgaggtcgagaaggccaatccggagatcttcgacgtgctgctgcaggtgctcgacgatggccgcctgaccgatggccagggcaggaccgtggacttcaagaacacgatcctgatcatgacctccaacctcggctcgcagttcctcgtgaacgaggacatggacgccgacgccaagaagaaggccgtgatggacgccgtccacatgaacttcaagccggagttcctgaaccgtctggacgacatcgtcatgttccacccgctcacgcgtgaggagcttggcggcatcgtggatatccaggtggctggcgtggcccagcgtctgaccgatcgccgcatcacgctggacgtcaccgcggcggcccgcgaatggctggccaacaccggttacgacccggcttatggcgctcgtccgctgcgccgcctggtacagaccgaagtgggcgaccagctggcccgtatgctgctggccggcaaggtccacgatggcgacaccgtgctcgtcgaccagaccggcggcgagcatctggagctttccgcctgggccagcgaccagatcgtctccgacgacccggatgtgagcgtggacaacgtcaccgaagataagtgacaatcactggctcccctctctgagcgaagctgactgaggggagttcgggcggtttcgcaacagtgatttttctctgcaaaatctcttaaacaggtgggtatggtagcagtcatacccactttttcgtctttgtgggtctatctcgatttcgaggggctgatttgccccctttcggaggtctacttccgtttcgaggggctgctcttctgccgaaccgcgagtatcagcggctttatggcaacgccattccgccattgttgcgccgtgtctacttggctaccagccccttgaaatggaagtagacctcctgcaacatcgaaatcagccccttgaaacggaagtatctgtccgatccgtctcaattgtgttccccaagagtggaagaaccgtggcatcaaggtgttcactgtcgcatatggtaggaaagtgagtgttaacggacgaagggagagccagtgaccggacgattggcgccgacgccgtcggggcgcatgcatatcggcaacgtgtacgccatgttgggtgcatggctttcggcccgttcgcgtggcgaccgcatgctgatgcgtatcgaagacgtggacaagccgcgcgtggttgccggtgcggaccagctcatgatggacgacctgcattggctcggcctcgactgggatggcgaaccgatgttccaatcccagcgcactgagcgctacgaatacgctctcgaatgcctgcgctcgcaaggtgtgctatacccctgtttctgctcgcgtgccgacattcgcgccgcctcggcccccaacgagggcgacggctttatggtgtaccccggcacgtgccgccgcctgctgcacgaccatcccgacgaggtccgtgcccgtctgtttcgcggcgaccagcattccatccgtatcgccatgccgaaaccggcagcgggagaaaagcaacgtacagtgcctgacgattccgctgcgctgtcgggagccgtgccgccggaacagcagggcgatgccggaatcgttgatggtgtcgcatgctttaacgaccgtgtctatagtccacagcactacgatttggcccgcgaggtaggcgattccgtgattcgccgagccgatggactgttcggctatcaactagtcgtggtcgtggatgacctcgatatggatgttgatgatatcgtgcgcggccgtgatctgctgcgctccaccgcgctgcaaatgtggattcgccagtgtctgttggctggcggctttgagccggaatgcggcaacacggaaaagcctctcgccgagcaccccgagtatgcgcacctgccgctcatcgacaatgcggccggtcggcgtttagccaagcgcgaacgttcgctggatatgggagccttgcgcgcccgcaacgtaacccccgagcaaatcatcggatactgcgcctggttgctgcgtctgcaacccactccaatcccttgcaaacccgccgatctgctggcagatttcagctgggagccgctgcgtgccaaccacctggaccgcgcgctgaaaccggacgatccaaccactccacaatggctggcagaagcgttaggctagaggcagcccaacaggaaggattccaatgtcgtcgaagctctggagaaacgtggcgctggcaggcgtggccgccgccggtgctgccgtgtgggccgtggccccgcgcacgttcaatgacaagcgtcgtaatttcgtgccctccattccgaaggtatggtatgcccatcgtggcttgcatgatgcgggttctggtttggtcggctataccgatatcgctgattatggtggggataattcggtcagcgcccaagccgataccactgagcgatccatcgccgaaaacgatgattatgtgtcgcttgcccgtcgcatggctgtcaaggccggctacggcagtgcggatatgaccggtccgatcgctcctgaaaactcgctggccgcattcgccgccgcctgcgaggctggctatggcatcgaactcgacgtgcagcttacgctcgacggtcaagtggtcgtggtccatgacgccgatttgctgcgcgtggccggcgaccctcgtcgcgtcgaagacctgacgtacgacgaactgacccgtattccgctgttcccgaacggcaagtccggtgacttgaaggccgaaccgttgccgggtgccgacgcgaacccgccgctggtggtcacgccttccaccgcccccgctggctactaccagcatgtgccgctgttctccgacgtgctcaaagtggtggctggccgtgcgccgctgattgtggaatacaagttcagcgacaatagcgcttgggatgctcgtaccgaggagctgatggagaagggccacgccctgcttgaggattatgacggtccatacgtcatcgaatccttccacccgggcgccgtgaactggtacaaagaacatcatcctgaggtgtgccgcggtcagctgagctggccggcgaagctgagcaagaatggtgcggctgaatgggccgccggcttactggcgttcgactggctgtctcgtcctgatttcgtggcctatgactggaccggtggcgcttcgccgcaagtcaggctcgctcgttcgatgggtgcgatgccggtttcatggaccgtgcgcagcagcgatgaactcgcccagtgcgcgccctacttcgaccgccacatcttcgaagcgttcgtccccgacgcagtgtgaggttgagggcgttattgatgtgcccatggggcggtaacttgcccatggggcggtttgaagaatatgtgaaaccgcggaattaagctattttggcataccgccccatgagggttttaccgccccatggggcaattaccgccccatgggggatttcccgccccatgaggtatggcgttttacttgtgatatggctcgccagcgttgatcttataagcgcgataaatctgctccagcagaatcacgcgcatgagctgatgcgggaacgtcatcttcgagaaactcagcagaaaatcagcacgacgcagaatcgcgtcgtcaaggccgattgagccgccgatgaccagctgaatatggctggtgccacgcaatccaaggtcgttgattttggcggccaattcttcgctggacagctgcttgccattgatggcaagggcaataacaaacgcgccgtccttcagatgcttggcgatgcgttcgccttctttggccttgatctgtcggtcaacgccttcggaggcgtggtcaggcgttttctcatctgccacttcaatgatgttgagcctgcagtagcgcgaaagtcgcttggaatactcgtcgatggcgtcgcgaagatatcgttccttcacgcgtcccggcgcaataatgtcgatttgcataaaaagcccatcacattggctcccctctctgaggggagccaggaaaatcagtcaattacgccatagagacggtcgccggcatcgcccaaccccggcacgatgtagcacttgtcgttgagcttctcgtcgaccgcgcacactacgaccttgaagtcgatggacggatcgatgtgctcttccacgaacttgatgccttcaggcgccgcgatgatgttgatcgcggtcacgtccttggcaccgcgctcggccagatagtgcgtggcagcaaccagcgtgccaccggtggcgagcatcgggtcgatcaggaagcactgacgaccggacaggtcctccggtagacggttcgcataggtgacctgctgagtggggtgttcctcgtcgcgcttcataccaaggaagccgacttcggcggtcggcataagacgggtcatgccatcgagcatacccagacctgcacgcagcaccggcacaatgatcggacgcggtttggccagcttcttaccggtcatcggagcgaccggtgtttcgattggtgcggcaactacggacaggttgcgggtggcctcataggcctcgagcatcacaagctccgagacgagctcgcggaaagtggaggagggggtgttcttgtcgcgcagcacggtgagcttgtgctcgaccagcggatgattcaaaacgtgaagttccatactccccagcctacccgtagttcgcggggaagtcacttgggcggcagtcgcgcgcgtatcgcacaccaatgtaaacagcgttcgacggcgggccgcgtaacaccgttgattttgtaacgtgagcgttatgtatgagacgcatatgaaatattcaggcaacggaaattcacgcaggcactgccatcgtatagtgcagtcggccggaagccagccgtcgatatccggcaagtggttcagcatgatatcaggcatcagggcacggtacggcaatcagcgtagacattccgcggacgggcaacgttcgcggaatgtagtcgtatgtggggaggaagagccatatgactcgattgcaaagactgaagatgggtgctgcggtgtgcattgttgccgcagtgcttgccaccagcggttgtggctggggtcgcaccgtggccgagaaagaggcccaagagaacaacgcgactgcggcaagcgacacctcatcatgtgtggacacctcaggcaacaccatcaaaatcggtttcgtgaattcgctgtctggcacgatggccatttccgaacagacggtgagtgattcgctgcacatggccgttgatgagattaacgcaaagggcggcgtgctgggcaagcagctcaaggtagtgcagcaggacggcaagtccgagccggctgtgttcgccgaaaaagccaagaccctcatcgaaaaggaatgcgtggccgcggtgttcggcggctggacgtcctcttcgcgtaaggccatgctgcctgtgttcgaggcggataacgcgctgctgttctacccgctgcaatacgagggcatggaagccagcccgaacatcttctactcgggtgctgcaccgaaccagcagattgtgcctgcgcttgattaccttaaggagcaaggctacaagaagctgttcttggttggctccgattatgtgttcccgcagaccgcaaatcgcgtggtcaaggcatacgccgagggcaatggcatggaagtggtcggcgaggaatataccccaatgggctccaccgacttcaccaccatcgtcaacaagctcaagttctccggcgcggatgcggtggtgaacacgctgaacggtgattccaacgtcgcattcttcaaggaatacaaggcttccggtctgaaagccgccaccacgccggtgatttccatgtctatcgccgaggaagaggtttccgctatcggcgttgacaacgtcaaggaccagctcactgcttggaactactaccagacgctgaacaatgcgcaaaacaagacgttcgtgaagaacttcaaggcgcgctacggagccaatcgccccacctccgacccgatggaatcggcgtacacatctgtgtacctgtggaagggcatggtcgagaaggccaagtcgttcgatgtggacaaggtcaaggctgcagcagacggtgtcaccttcaatgcaccggaaggcaaggtcaaggtggacggcgaaaaccaccacatctacaagacctcatacatcggcaagatcggctcagacaagctcatccacaccgtctggaagtcggacggtcccatcaagccggacccgtacctgaagacctacagctgggccaagagcctgagcgccagcgtcgagagcaactgagagaagaggacacaacaacatgggtatgttatttccacaaattgtggcaggtctgtccaacggatcgattctgctgctcgcagccctcgggttgtcgttgaccttcggccagatgggcgttatcaacaacgcccacggcgaattcatgatggccggcgcatacaccgcatacgtcatgagcatggtcatcggcaataaaacagtgtccctggccgtggcgctggtggtcggtttcgtagtagccggtttgcttggtttactgctggacgtgttgctgctggagcgtatgcgcaatcgtccgcttgatacgctgctggttaccttcggtgtatcgctggtattgcagcagctcgcacgcgatattttcggtgccactccggtctacgcttcggctcctgaagcgctgaccaatccggtgaccatctttggctacagcttctctgcaggccgactgttcatctttattctgtcgattatctgcgtggctgcgctgtacgcgatcctgaagctcacgccgctgggtcgccagattcgcgccacttccgagaaccgcgacctcgctgaggtttccggcatctccaccaagatggtcgaccatgtgacgttcttcctgggctccggcatcgccggtatcgctggcgtggcgctgagcctgctgaactcgattagcttcaacttcggtacgaccttcatcgtgcaggccttcctggttgttgtggccggcggcgttggccagctcaagggcgcggttatcgcctcgttcgtgctgggcttgtgccagtcgtccatcgaactgccgacctctgcctcgattggtcaggttgccgtgttcctgattgtggtggtgttcctgcagttcaggccgcagggcttggtctccatccgctccaggaacctcgcgtgagtgcttcagaagggtaaggaaacgacaatgaagatgactttgagcgaatacgccacgaaatataaggctttgatcggtgtggtcattgccgtggcgctgatcttcctttctccgactgtgctgagcgtgtacaacctcggcctgctgtccaaatacctgtgctacgcgatggtcgcggtcggcatcggcctggcttggggccaaggcggtatgctgacgctgggccaaggcctgttctttggtctcggcgcgtacgtgatggctatccacatgaagcttgaggacattggcgtgggccaagtgccggacttcatgtcccagtacggcatcaccaaggttcctggattctgggaactcttccgcaatccggtcatcgccgtgattggcgtggctgcggtaccgggcattatcgccgcaatcctcggtctggctgtgttcggccgtggcgtgcgtggcgcctacttcgcaattctttcgcaggcgctggttgccgcgttcgccgtgctgcttatcggccagtcgaaaaccaccggtggtaccaacggtctcaacgatttcaagggattctttggttacgacttgactgataacgccaacaagcagatgatcttctacatctgcgcgttcctgacgctggccatggtgcttatcgtctactggattcgcaaatcgtttatgggcgacctgattatcggcgtgcgcgaccaagagaaccgcatgaagttcttgggctataaccccgcctccatcaaggtgttcgccttctcggtggctgcaatgttcgccggcattggtggcgcaatgttcgtgccagtggtcggcatcatttcgccgtccgatatcggcgtgacgccgtccatcctgatgctcgccggcgtggtgatcggcggacgtgccactttgctcggcccggtggtcggcacgctgctggtgcgctttgcggaaacgcagctgtctgaggcgtatccgtccgcgtggacgtacatcgaaggcctgatcttcattctggtgattgcctttgtgccgaagggcttggggcagttcaagggcgtatggccttggattaaggagaagatcgggctcggaaagagttcggttggagcttcggctggtgctggtgctggtgccgttgccggtaccggtactgctactgcaaaggcggtgaacgcatgagtgaggagaagaacatgagctcgaatccatcggctcccgcacctgcatcgcaggccgatttggagcagttgcgcgccgaaatgattgagatgcgcgacgaagccaagcgtatgcgcgacgaagcggcccagatgaaggccgaaatcgttgaagagcgtacgaagctgcacgatcagcttgcggtgctggatgatcgcggcggccagtggagcgattatctggaagttcgtggactgcacgttgagttcgatggattcgtggccgtcaagaatcttgatttgactgtgcagcacggcgatttgcgattcctgatcggcccgaacggtgctggtaaaacgaccatcatcgacgcgattaccggactggtgccggccactggttccgcggaattccgtggcgagcagctgttgggccgcaagccgaacgacatcgtcaagctgggcgtcgggcgtaccttccagaccgcatcggtggttgaagagctgtccgtgttggagaatctgcagctggccgagggcttccgcaagaagggtcgtgagctgttccagccgatgggcggcgtttcgcagaacatcgaatacatgatggacgtgtgcaatctgactgtggatgcaaacaagcccgcaggcatcctgccgcacggcaagaaacagtggctggaaatcggtatgctgctcgtgcaggacgcgcacctgctgctgctcgacgagccggtggccggcatgactccggccgagcgtgtgcagaccggtgagctgctcaagcgatgcagcaagaaccgcacggtcatcatcgtggaacacgacatggatttcatgcgtcagttcgccgattcggtcacggtgctcaaccagggcgaaatccttgccgagggttcggtcgaagacatccaaaacaacgaagaagtagtccgcatctacctgggcggcggagaaaactaactccctgtctcccctccctgaggccgaggcgttaagcaaacagcccagtgggctgtttgtagccgaaggcgagacgatagtcgaaccaacaggttgcaggcaaggcccgtccttaattgcggacgagctgtcaccgaaggtgactgaggggagtaggtaagaggaagaagcgcaatatggaccgcactgacaacaaccatcgcatcccggaatgcgctttttcagtgcatattgagggtgatacaacgcgcctcaacatcaatatgcacgacgccgtagaaagtgaataatcatggcaatgcttgaagtaaaggatttgaacaccggttacggcaaagtgaccgtcgtcaacgacatcagtttcgacgtggccgccggcgaatgggtgagcatcgtcggcaacaacggtgccggtaagaccacgctgttgaaggcgattctgggcttgctgcccgtttcgtccggttcgattagtttcgagggcaaggacattaccaaggctgcaccgaaccaacgcatccgcaagggcatggcgttcgtgccgcagggccagcagtcctttggcaccatgaccgtggacgaaaacctgcacgtggtcgccgaccgctacggttcagaggccaaggcccgttacgacgaagccgtggaaatgttcccggtcttgaaggaatttgctggccgacgtgccggtctgctgtccggtggccagcgtcagcagctttcgattgcccgcgcgctgatcacccgccccaagctcatgattctcgatgagccgaccgaaggcatccagcccaatatcgtcgccgaaatccagaaggccattcgcatgatggccgaagacaagggtatcggtgtggtcttggttgagcagaaggtccaattcgccgtcgagcgcgccgaccgctactacgtcctggcctccggccgtttcatcgccaccggcgaaggcggccccgaccaagtagaagccgccaaggaatccatgagagtgtgattgattcgacccccgtttatggccatagagcgttatgagaaacgtcccgttcttataacgctcttattattgggcgatgttagggctcacattggtgtgcctgaaaaactccagtcaacaacagaggatgttatgagacttacaccacgagagactgacaagttgatgctgtacttggcggggcagcttgccaaagaccgcaaagccagaggcgtgaagctcaactatgtggaggcgattgcgttgatttccgccgaatgcgttgagcgggcgcgtgagggaagcactgtggcggagctcatggcatacggtcgcacgctgctcaagcctgaagatgtgatggatggcgtggccgagatgctggaagtggtggaggtcgaggccacgttcccggacggcaccaagctcgtctctattcataatcccatcgaatccaccgagaagttggtgccgggggaatatctgctggctgacgatgatttggaactcaatgaaggttccgaagacatcgagctggacgtggtgaacactgcggatcgaccgattcagattggttcgcacttccacttctttgaagttaataagtacctgaagttcgaccgtaaggcggcgtatggcaagcggttggatatcgcggctggtacggctgtgaggttcgagccgggtgaaacgcatcgagtgcggttgattgatattggtggcacgcgtgagattcacggcttcagcgcactggttgaggggaagttggatgaccctgaggtgcgggaggccgcgtttaagaaggcgcatgagcttggattctcgggaatctgagctaagggccaccctcagtcagcttcgctgacagctcccgccagcggggagcggactacctctcagtctcgcttcgcgagccagctcccctgacaaggggagctgaaaaacagcaaggacttttgacatgaagattattacgcgcaaggattatgcgggaatgttcgggccgaccacgggagaccgcgtgcgactcggtgacacgaacctcatcatcgaggtggaaaaggactacacgcactacggtgatgaactgaagttcggtggaggcaaatcattccgcgacggcatgggccaaagctccgtgcagctcgacgttgaatcgccggataccatcatcaccaacgccctcatcgtggactacaccggcatctacaaggcggacatcggcatcaaagacggcaaaatcagcgccatcggcaaggccggcagcccgcagaccatgagcggtatcacccccggtctcgaagcgggctccggcactgaagctctcgccggcgaaggcctcatcgtcaccgcaggcggactcgacacccacatccacttcatctccccgcagcagattcgcactgccctcgccggtggcgtgaccacgatggtcggcggcggcaccggtccggccgacggcaccaacgccaccacctgcaacccgggagccttccacctgacccgcatgatcgaggccgccgaagcgctgcccatcaacatcgcctaccttggcaagggcaacgactccagccccgaaccgttgcgtgagcagattcgcgccggtgccgcaggcctgaagatccacgaggactggggtgccaccccggccgtcatcgacactgcactcggcgtggccgacgaaaccgacacgcaggtggctatccacaccgatactctgaacgaaggcggttgtgtggaagacaccatcgccgcgttcaagggccgcaccatccacacctaccacaccgaaggcgctggaggcggccacgctccggacatcattcgtgccgctggcttcccaaacgtgctgccgagttccacgaacccgaccatgccgttcacgcgcaacaccatcgacgagcatctcgacatgatgatggtctgccaccacctcgaccgcaatgtgcccgaagacatctctttcgccgactcgcgcatccgccccgagaccatcggtgccgaagacgtgctacacgacatgggcatcatctccatgatgagctccgactcgcaggccatgggccgcgtgggcgaggtcatcacccgcaccatccagaccgccgacaaaatgaagaagcagcgcggtccgctccccgaagacgaacacgacaacaaccgcaacgacaacttccgtgtcaagcgctacgtctccaagttcaccatcaacccggccatcacccacggcatttccgaatacgtgggctccatcgaagtcggtaagatggcggatctcgtgctttggcagccgtccatgttcggcgcgaagccggaaatggtcatcaagggtggctccatcgcctactctcgtatgggtgacgcgaatgcttctatcccgaccccggaacctgtctactaccgcgatatgttcggcgcgctcggccgtgcgcttggcaagtcctgcgccacgtttgtttcgcaggccgccgtggatgacgatatcaagggcaagctggagctgcagcgccaggtgttaccagtgcatggctgccgcacggtaggcaagaaggatctgaagttcaacgacgtgctcgccgacattcaggtcaatcccgaaaccttccaagtgacggtggacggcgaaccggtccactctgacccggcgtacgagttgccgcttacccagcggtacttcctgttctgagagaactggtggctctcctcaaaggggagagccacttggttttagccttcggccacgaaatcggtcacgaaatcggccacatctcgaatgaggtcgaaggcgtcgtcgcctcgggtggtcagtacacgcaagcagatgccattgattacgcggctcacgccgagctcgccggtgaagccgatggcgtctgcgtgttcatggatgcgagtgatgagcgcgtcttcggcggcgatgcgggcagtctcgatgcgctcgcggatggcggcggaggatgcttctttagttgcggcatcttgtacagcgtcgctagggtcgagttcgggcaggtgagcgtagagaacgccgcagtgggtgaattcgcgccacatgccgagttcggtgtagtcaaaagcatcaggttccaacagcatgcggtcagcaaaggccagatgttcgcgcggttgggcagcggcggcttccgccttggaaggccggcctcggcgatgtgcgtgctgttgcgccaattcggctgcggcggccttggtcacggcttcgggttcggccacatatacgcgcatacgattcgtaaaacgtttcatggcccaacgctcatccatcccaacgcggccacatgtcgccacatccgcatacacgaatgctgactcggcggaaatatgcgcggtggtcaggttcatgaatgagctgttcttgaacggaatcactgggaacggcaggaacacggctttggcattgccacgcgccctgagctcgatggtgcgttcggccgagccgtccgcggtgtcgaacaccttctcgtagctttgcgttttgatggtcgaatcggtgcctgggccgaagtcgatatcgatatgggcttcatcgcccctcaggaagccaggggaggcgagcatcacgacgaaatccgaatgacgtccgttggtgaacggggtcatcagtttgaacggcgcctcgaaataaatatcgtcgattttggtacgtccgtggcggaatgcagtggatagacgaaaagtgctactgcccatggacgaatcgctgccttcttatgattggtgcctgacgatgacatgggcaattatgccgcacttggtgcaacggtatgtttcggcccgtccgtttttggatacgggcgggccaaaacatcacatgtcctcgaacagcacgctcttcttgatccatgcgatgacgtcgtccactccggcaccgcccatcaggtcggtgaagatgaacgggcggtcgccgcgcatcttcttggagtcgcgggccatcacgtctagatcggcgtgaaccaacggggccaggtcggccttgttgatcaccagcaggtcggagcgggtgacgccggggccgcccttgcgtgggatcttgtcgccctcatcggtggcgatgacgtagattgtggcgtcggccaggtccgggctgaacgtggcggacagattgtcgccgccggactccacgaacatgatctgcacgtccgggtgggtgcgggccatttcctcacaggcctcgaggttcatcgagcagtcctcgcggatggcggtgtgggggcagccaccggtctccacgccgacgatacggtccggcgcgaggcgtgagtgctcgataaggaactcggcgtcttccttggtgtagatatcgttggtgaccacgcagatgctgtattcgtcagccatcttgcgggtcaggcgttcgataagcgcggttttgccggaaccgaccggtccggcgacgccgatgcgtacgtatgacatggggtttctcctttatgtgggaattagttaggtatgtggtttgcgggtgaggttatcctggctcccctccttgaggggagccaggataattagctcatgtagagcctcgagtacaagatttcatgctgcatggcggcgatgtcgaggtaagctccggagatgccgagatcctcgggcttcaacgtcatcgcgatattcaccgcgcgcacgaggcgcgggaacgaatcatgcagggcgacttggccagcgtactggctgagcggaatcgccttcgcggcgcacatggtaagcgcgctcaacagcgaatatccatacatgatggccgcgtcgcgcacgtcgttcgcatggtcagccgcgtacaggcccatcgcgatcgaatgcaggccacggcagcggcgctcgcgaatcagcccggcatacaggtcgagcgacggcgagccgtacaggccgtcggcggcatcgtgcagctggtggcgttcggtgtgatgctcgtgcacggcgatgatgctgttttcgcgcgaatccgcagcggatgcggtggcattgtcggcaggacttggcttggcgaacccacgatgcccatccgaggtctgcgcctggccggcatccatctgctcggccagcttgaccaggcgggtacacatgcgctcgctgccttcacggatttcacgtgcggattgcagggccgaggccagctcgtcaagttcgatgagtcgctcggccagccctttgcgggagactcgcgaatcggtggcgtacttgccggccagcaccatctgcccgatttccttgtacggtgcgacttcgaggtagttcttcatatactcctcgaaatcggcgccacggcgcaagaagtcgcgctgtacgaaggtctccatgccgttggacagcgcgaacgcgcccacggggaagacgctgtcgcacacctgcagcatggccagacgtcgcgattcggtttcgttgatgttcatggggctatcagtgggtgtgccaggtgcggccgccgtcgtggctgtgggagccgtccgggcggtgcagcacgccgttcatctcatattcgccgggctcaccctcacctgcgtcgtgtgtatgcacatccagatggccggcggcctcctcggccgggaattccttgtcggcctcggcttcctgctcctcctcggccacgtcgcccgtggtcttgttggtgcccggaatcagtgtgccggtgccggcgtgggccttgacgatcaggaagccgtcaaacccaccctcgatgatatgcggttcataaccgatcttcttcgtgtattccatggtcggatggtcgtacggcaccagcacgcggtcgttctcgaccttgagactcaggtggcggttgcccagttcgaagcacaggcgtcccatttccgtcatcgagttaaccggaatctcaatcagctgtgcggttttaatgcgtgcgaaatagcgcttgtcttcggtttcggcgagcacatcgccatccttgatggtcttgccaaccatgatgccgaactcggtgccgtcctcggccaccttgcgcatgcgcttcttatcggtttcgaaccagtcgaaggcaatcgacacattaagtttgccgtcgctgtactgctgactgatgatgttgccggtgatttctttggcgatcatccgttctccttggagaaaattgcttgtggcgtgagaatccccacgtccttcatgccacagtgtagagagcctgttgcgtcactttgtaacgaatgatcgaaatatgcaaaaaatatagcggaaaaatatccgaaaacatggaaaccggatatatggtacacggtgtgtcgctagtaattgcaagctattttgcatggttgtgcattagacgaatcacagttgtgatattacatatcacgttcctggagcgggaggttgtggtcgagctccgaaatcaacaaaaagagggaagttggatataatcgaagtacctgacaccgtcacattggcgatgcacattccggataatttcatttcaccgtccaccggggcgttgttctacgtcatcatgattccggtgtgggtgctgtgcctacgctacgtgatccgcaacagcacgccggagaagatggcctacctgggcgccggtgcggcgttctcgttcctcatcatgatgttcaacgtgcccacgcccggcggcaccaccgcgcacggtgtcggcggcgcgctgatcgctctgctgctcggtccccagtacgcgacggtcgccgtgtcggtggccctgctgctgcaggcgctgctcttcggcgacggcggcctgatcacgctcggcgccaactgcttcaacatggcgttcgtgctgccgtttgtggcttacggactgtacgtgttgctacgcaaggtgctgcccgacggctggaaggaacgcgtggccgaattcgtgtccggctatatcggcatcacgctcgccgcattctgcgtggcgctggaactcggcgtgcagccgctgctgttcaaagccgctgacggccaggcgctctacttcccgttcacctttaacgtgacgattcccgccatgctgatcccgcacctggccgtagccagcgtggtcgagggtctggtgaccgtggtggttgtcgaattcgtgcgccgtaccgcaccggagattatcgaagacaatgcccgtgtgaacttcgccgagaccgccggtgctgacggcaaacaggtcgcgcacgccggactgcgcaagtctgcgtggattgcgctggccgtggtggcggtgctttccccgatcggcctgctcgccaccggcgacgcctggggcgagtggggcgccgaggacttcatgagtgccacggggctcaactacgtgccgcagtacatcgcccatggcttctcgtgggatgcgctgttgcctgactactcgctgcagggtctgccggacatcgccggctacattctctccgcagtgattggcatcgccgtgctcactatcgtgttccgtctgctggcgctcgcggtgagcggcaacggcaagacatccgcgcgttgacgatacctgcatggatgcgtgagtcggaggattacgatcctccggctgacaagtcatccttcatcgaacacaacctggggcatttcggcagcgtactcgagcaggttggtcatgcgttgccgattgagtcgagcccggtcgacaaggtgctgggctcggtcaatccgggcgtgcggctgctgggcatactggccgcgattgtctgtgtcaacatcacatgcaacatgctgttctcgtacatcatgctggcggtggtgctgctgatgatggcgacccggccggcgcgcctgatgagggcgttgctcggcccggtgctggccgtatgcatcctgagcctggtcgtggcggtgccgagcctgctgattgggcagtacagtgcgccggtccggctggtggtgcgtgcgttcgtggcggtgtcgctggtgatcgcactggcgcgtacggtgccgtggaatcgcctgattgccggactgcgcgcagttggctaccctgattcggtgatttatatctgcgacgtgacgattcagttcatcgatattctcggtcgttcgatggtggagttgctggatgcgctgcggttgcgcagcgtgggccgcgaccggaccaagctgacgtccgccggccagttgatgggcgcgctgtttctgcgtgcgaatacgcaggcgcggcaaatggctgaatcgatggtgtgccgggggtttgacggtacgtatcatatccaccacgagcgtctgctgacgtggcgcaacggggtgtatgccgtgtgcattgctgcaatgattgcgctggcggtgtattcgggatgagggtggttcgaatgaatggagcccaataatgttcggattaaagcgtaatcataaacaaactgcaaccatgcagccagataactcatggttccgcggcgacccgctggtcgaactgaatcacatcggcttttcctataaagattacggcgacgccgacgatgaaacctcgtcgcacgccgtgctacgtgatttttcgctgaccgtcgaacgcggtgagcgcgtggcgctgctcgggccgaacggcagcggcaagaccacgctgatgcgcatcatcaatgcgctggaatttccggactcaggcgagtatcggtttggcggtactccggtggttcgcgaggaagtcgaggcgaagaacagcctgttcgccaaagcgctgcatcagcgcatcggattcgtgttccaaagctccgacacccagctgttctgcccgtcggtggaagaggagattgcgttcggtccgttgcagatggggttgccggatgccgaagtacagcgcagagtcgatgacatggtgacgttgttcggcttggatcggatgcgggagcgggcgccataccgtctgtctggcggtgaaaaaaagcgtgtggcgattgcctgctgcatgtcgatgaatccggacctgcttgttctggacgaaccgaccgacggcttggacgagcgcaatactgacgtagtggttgaggtattgcgcgccttcactgatgccggcaagactgtactgttctccacgcatcaccacgacatcgtggagcggctcgacgctcgcatcgtgcgcgtgcatccgtcactatggcaatgacattcacgtggcgtctattggatatcttcatcgaaaaaagcagaaaggcatcggcgaggatcgcgagtccggcgagaactgcgatagtcgctttggtgatggttgccttcatgagagtttccccaaggtgttgacgttgatttcatgagattcgaaaaagagcgtatctaggccgaaccggacagtaagtcaacggtttctggaaaccagctgaaaaagctacggtattgtgaaatatgtctcatcggaatgggtcaagtttggcctagcgctcgcagtcgtgcgcgaagattcgttggattgattctcggtggattaagtcataggaagaaactagacaccttgcggtgtaaaaccgggaatcggaatggtgtaaaaccgggaatggaaatagtgtaaaatcgggaatgagaaaggtgtaaaatctatattgaggcgattgggtagctgagaaaggccggaaaatgaacgatttgaacaatcgtagtgataccttgactcaacctgattatcgtgctcgcgtggtcgatggcaggttaggtaagttacttaaagcattcggtgcggtggaaatcgtcgggccaaaatggtgtggaaagacatggacggcgctttcccgctcgcgaagtatggatcgtctggatgatgccgctacctttgcggccgcacagactgatccggcattggtactcatgggtaatgaaccgcatttggtggatgagtggcaagatgtgccgcaaatttgggatgccgctcgtcgtcatgtggatgacaatgcgaatcgcaaggggcagctgattcttacgggctcggccattccgaaggaccgagaaacaattcaccacagtggcacaggtcgaatttctcgcttgcgtatgtggcctatgagtctgtgcgagtcagggcaatctaccggtgtagtgagcttgtctggtttgtttgatggacaattcgagcctgccgaatgtgcaaccagcattgaagatattgccagatggtgctgtcgaggtgggtggcccgcaaatcttgatttggatgacgagtttgctctggaaattccgagtgaatatatcaagagtgtgcttgatatcagcgtgcccaagatgaacaagaaccctgaaaccgcgcgtgcactcatgcgtgcgctcgccgtgaacgtatcgcaggcaccaaaatatgcgacgctggctgcggatatggcctatggcgatgagcgccgtgaaccggatacgcagacagtaaagagctatttgggaatgctcaaggacttgtaccttctgacggatttggagggttgggagccgccactccgcgcaaagagtcgtgtgcgaaccaagcccaagcgatatttcgtggatccttcgttgcctgctgcggttttaggtgccgcgccgaatactctgatgcgcgatacacagacgctcggcgatctgtttgaaacactgtgcattcgtgatttgaatgtatatctgtcggccatgccgggtgcgaacaatcgcatcgcctactaccgcgatgacaaggggcttgaagttgatgtcattatcgagttgtctgacggcaggtggggtgctatcgaaataaaactcagtgaccttaaggtgaacgatgacaatgcggataagctcaaatccttccgcgacaaaatctgtggcaaccccatggcccaagttcgcgaaccagagttcatgatgttccttaccggccgaggtgggaaggcctatcgccgcaatgacggcatactggtcgtgcccatcgcaacgttcggggcgtgaatcgggtaaaagaaaagaagcgccgaaccgcgaaagcgcctgtcggcgcaagggccgctcgcggcggcaaaaaatggagcccggggcttaagcacggtccgacgcggatacttagtatagcttgcgatggggctcgccgcgccgggggaggtgtggtgttggctggtagctgattgttggggtgcggttggtgggtctctccctcagtcacgggcatcgcccgtgacagctccctcatcagagggagcctggagcagggctactccaaccgtccgcgacgccagaggttggcaccgtgctggaaatccttggcggtggccatgaggctgccggcggtgtgcataaggcgggcggctttggtgcgcacggccttctcatcggcatccgaggagaaggcgccgttggcctcggcccgggtcaccatgcgccgcgcctccacgcgcaagcccaacgccaccacatcggtaaacgccgccgcacgctcaagcgccacggcaaaatcgcccacaaaagcaccggagagaatcgaatcggccaatcgcacgatgtcatcttcactgggagcctgatccacgccggcgatggcggaggcggtagtggccaccggctcacccaagcgccacagatgcgcgatcgagtcgcgattcgatcgcatccacgtacgcaacatatacagtcgccacagcacaccaggcagcgaatccggctcggcatcgctccatagttcggcgatttcatccacgccgaccgtctccaccaacgtgagcacccgctcaacaaccgccgggtcttcgctatggcgcacacgatccagcaatgcggcagcagacagatgactcatctcgctcaacgcctgcgggtccatgccaccggccaatccatcggccacagccgggtcgagctgagccgggcgcgaggggcgtgaagaacccatgcgagcaggtccgaatgccgctccggccgcacgcaacgagccgaagcccgggcccagactgccggcggcaccattgtgcgcggcatgagctgcagcggcagcggccgaggagttggatgaatcaggaaatgcgggtctagtagacaagcggttgaaccttctgaatatcgatgattttgggaccatgaggcgtcggagtgacgaacagcgccaccgccgtgccggtcggcatgaacggtgtcttggcgatcaggcgtttgctcagagacggcgcaacgcacatgctgcgcaggtgtccgaacataccaccaatcaccggccggtgcatgcatatcgctatgggctgacggcgctcaagtgcgaactcgatttcgctgagtagacactcccatgcggtgtccggcgcagcggcgtatgcatcttcggtgagcggatcgagatgaaccatgtctcgtccggtctgccacgcgaacatctccaacgtctcctggcagcgcacccaaggcgacgtggccagtcgggtcggattgaaacacgccagctcgcggttcagcgcgtatgccgcagccgcgccgcgcggcgtgatcggacggttcgcgtccgaacccttccacagcttgcgcgcttccgctttgccgtggcgcacgataatcaccggcaccgcgtccagtgcaccttcttcgacccgatcaacgaatagcgcgaggatgtccttatcggtggaatggctgagcttcttgcgggcctcggccggcgtcagccacaaaacttcgtcgatttcgccgatgtccgcccgatgcaccgggccaaacgcatgggtacgccgcaggttgtcgatggcgctgatcggcgtggccatccagaactggatatgcttggtatccgccgaccgatccttggtatggcgctgtttgctgccttcttcggacagcgggtactcgatgtcgcccagataggggccaagttccacggacaggcccgattcctcgccgatctcgcgtacggcggcatgccggtgcgattcgttcgggtcgaccttgcctttcggccagctccagtcgtcgtatttcgggcgatgcacgacgcacagttcgatgcggttgagtacgttgtccgccgcggccgggctgtcggcctgcgccgggtccggggtgggagccgcgtccgatgcgccgtgtgctgccgtggccttgccgtcagaatccgtggtgttcgcgatgatggtgccatcggtggcaatattggatttcgctgatggagacgatgcctgcgtcggctcggcatcatccttccaccggtacagaataccgccggcggcttccacgattcgtctcatactgttcgtacccatctcttgtattgtaggtcacgttggaccgctgctacgtagttttgcgcgctgaacgacgatgcccggcatcctctcgaaagaggagccgggcatcgtaaccaccctcagtcagcttgcgttgacagggagcatcgagtgaaatcagttgtgcgaattggggcggcgctggtgcttgcgaatcaggtattcctgactgtcgaccagcgggcggccctcgtcgtccttggtgtgcagcacatatgtgccgtcgggctgcatgtgccagctcatggtggagtcggccatctgcaggtccacgtacttgatgagcccgtcaatctgctccggggcggtgacacgcaccagagcctccacacggcggtcaaggttacggtgcatgaggtcagccgaaccgatgtagacctccgggccggaagccggaccctcgccgatctgcgggccgtccgcattgcagaaggcgtagatgcgggagtgctccaggaagcggccgagaatcgaacgtacgcggatgttctcggacagaccgggaacgccgggcttcagagcgcagatgccgcgctccacgatgtcgatcttcacgccggcctgagaggcacggtacagggcgtcgatggtcttctcgtccacgatggagttgaccttgatcttgatccaggcctccttgccggcgcgggcggcgtcctcctcgcggcggatgcgctggattagaccggtgcgcacggtgcgaggggccaccagcaaacggtggaagctggacttcggcgcgtaaccggagagctggttgaacagacgagtcagatcctggccgaccaccgggtcgcaggtcagcagacccagatcggtgtacagtcgcgcggtcttcgggttgtagttaccggtgcccacgtggcagtagcggcgtagaccgtccgcttcctgacgcacgacttcgatgagcttgcagtgggtcttcaagcccacgatgccgtacaccacgtgcacgccggcgcgttcgagcttgcgggcccacgcgatgttggcgtcctcgtcgaaacgagccttgatttccaccaaagccagcacctgcttgccggcatgagcggcgtcgatcagggcgtcgatgatcggcgagttggagctggtgcggtacagggtctgcttgatggccagcaccttcgggtccgcggcggcctgcgcaaggaaggcctgcacggaagtggagaaggagtcataggggtgatgcagcaggatgtcgcgctcgcggatggcggcgaaaatgtcctgcgcacgggaggactcgacctcggcgatctgacggttcgtggtcggcacgaacggacggttcttcaggtccgggcggtccacgttgccgagctcaaagagcacggtcaggtccagcgggctgggcagacggtatacctcgtcctggctcacgccgagctggtcggcgagcagctgggagaggaacgggctagtggtgtccgtgatctccagacggatcggcggtccgaagcggcggcgcagcagctccttctccatggcgttgagcaggttctcggcgtcatcctcttccacgtcgatgtcctcgttacgagtcacgcggaaggagcgggcttccttgatgatcatgcccgggaacagggattccagatgcgcggcgatgagcttttccatggcgatgaagccgtaacgctcgtccttggactcctcgtcggtcatgtcgtccaccggcaccaggcgcggcaggttgcccgggatcttgacacgggcgaagtgcgacttgccggaggccgggttctccacaatcacggccaggttgatggaaccgccggaaatgtaggggaacgggtgggccggatccacggcgagcggcgtcaggaccgggaacacctgctggcggtagtagcgcgagagacgctcctgctcggaggaggtgagcttgtcccacgtcagcaggacgatgcgctccttctccaattccggcagaatggtgtcgatcgcgtaatgtgcgtgctcgtcttgcagacggtgtgcggtctcgctgatcgcgcgcagctgctgacgcgggctcaggccggcggcagacggcacggcgatgcccgagtcgatacggcgcttcaggccggcgacgcggaccatgaagaactcgtcaaggttcgaggcgaagatcgcggcgaagttggcgcgctcgagcaggggcatgtcttcgttctccgcgcattcgagcacgcgctggttgaacttgagccagctgagctcgcggtcgaagaaacggtccttgggcagcggtgcctcgccttcctgatcgacgcggcggtcgttgttgtcgttttcggcaatatgctctgcgatttggctgcgcagaattgccttcgagggtgcgtcaaatatctgtgccatagtctatatcgtaagctctggcgtggccggaaaacggctgaacgcgccagaattcaacgggtgttcatgttagttcggtgttggttggttctgagtgtgctagcgtgctcgcgacacgccgtgagcggcggtgaaacgaacgaaaccgaacatcagacgggttcgatgtgaacggttcagctcgttttccgatagccagaaagtgcgattgaacagttgtgataaaaaacgcacaacgactctctgcaggttgcgagaaacgggagtgatgaatagattatgaggtacaagaacaactgaacagagcagagcccacaaatagtgtatggtcacgaggactgttacgttggacgggcattggaaagacttaccgttacgacgatgatgttgtgcagagattctgctccagtagttgaacttgtagaaaaggcccgctccggcgggccttttcgtttgtgtgtacagtggagggcatgacggaaacacagcgtacgccagaggggatgtcgtcgaaaccccgtatcaagccggccgatgccgaagacggccgcccggtctctatctctgcgcgtctcggacgactgcaattccactattccggcaagttccgcgtgctgcagattgccgacattcaggatgggccgaaagtctccaaagacaccatcgccctgattgaggccagccttgatgccacacggcctgatctggtgattttctccggcaaccagatcgccggctacgatccggcctttgccaagagcttccgcaaacgccgttggtgcgaagaggcgattcctgaatctgtgttgaaccatacgcgtgaattggtgcgcaaggccatcggtcaatttatctctcctttggcgtcacggggcataccgtgggcggtgacctacggcaaccacgatttccagtgcggtttgagcaatgccgaactcgacggaatctaccgcgagtttcccggttgcatcaatccgccgagcgatgcgctggccaagcagaccgtatatatgtgtcataaggacggctcgcctgcggcaaccaatggtgaagaaaccgatgcgccgatttccgcgtccaccattcccggcacttttgcattgccggtgatggatgtggattgcacgcgcaacgtactgggactggtactggtgaattccggtgactatgcgcatggaggcggtttcggcacgccttcgcccgagacattggccttcctcaaggctttgcccgaacatatcggagccaaatcaatggtgttccagcacatgccgctgccggagtattaccaggtactcaaaccggtggccgccaatgcggctttcgccatgcagggctaccgcaagcatgcggatacctattatgtgctggacgaggatcgcactcaagccggcgggtatctgggggaaggcatttcctgcccggatgagtcggacgagtttgaggcgctgcgcgaggggtatttcggcgtcgtagctggtcatgatcatcgcaacggtttcgtcggcgaacatgagggtctgttgcttatcgctacgccaacctgcggattcaatacgtacggaccggctccggccaaacgtgccacgcgattgatcgaatttgatatccgtcacccttacgagccgcgtacgcaattgctggagtttggcgaactggtgggcaagcccagttccaaacgcgcctacacctatgcggtgaaccaaaccgcgcctggcgagggcgagggtgatgatttgctgcgcaagccgtcgctatggagccaactgtccggcctgtttaggtagcgcataacaaaactgcccccgccagcgggggcaatgtatgtgatgactagcgaacggctttgaccagtgcctcggtgaggtacttgccggcggccatcaccagcggcgcatagcggcgtccgggggcggcacccatgcggccggtcgggccggaaatcgagatggcggcgatgacctggccggaggcgttgcggatcggggcggaaatcgagcacacgccctcttcgcgttcgttcacggactcggaccagccgcgcttgcgtacggcggccagcttggtggcggtgaacttggcgtggcgcaatccctggtgcagacggtcggaatcctcccaagccagaagaatctgggcggcggaaccggcttccatcgacagcatggcacccaccggaatggaatcacgtaggccggaggtgcgttccacagcggcgatgcacacgcgctgatcgccttggcggcggtaaatctgcgcagactcgccagtgcgatcgagcagggtctgcaggatcgggccggcggcggtcagcagacgatcctcgcctgctgcggcggcaagttcggcgaaacgggagccgagtacgaatcggccatgctggtcgcgcagtacgaaacggtggcgttccagtgcaatagccaaacgatgtgcggtcggtcgagcgagaccggtggcggccacaagctggcccagcgtagacgggccggattccagtgcgtcaagaatctttacggttttatcaaggacgccaacgccggaatggatttccccatcgtccttggcggtggtgtcttcaaccggctcggactcggtcaagctgttgttcaatggttcttcttgggaatcagtcataataagggcgattatgccatctcacatagtgaaatggcaaattggggaagtgtctcacagggtggtcatgaagttgaaagggcgttcgtggatgccgaagagacatgtctggagcggaaccgagtcatgactaggtcatgttcgagtcgggtccgagtcatattgaggccatcatttgaccgtatctcaatatccggcatgctcatggccgggcccatcgcaagcacataggctaataccacgaacaaggcgcgaacacaatacctcgcgcggaattttttggaggaatcactatgggaacgacactggccgagaaggtctgggccgatcatctggtgcgcaagggcagcgacggagctcctgatttgctgtacatcgatctgatgctcatgcatgaggtcaccagcccgcaggcgtttgagggcctgcgcttggccggccgcaagccgcgtcacgtggatcagctcattgccaccgaggatcacaacacgccgaccgttgatatcgatcgcccgaacccggatgagacgagcgcgttgcagttgacgactttggagaagaactgcaaggagttcggcgtgcgcctgcacccgctgggcgacgccgatcagggcatcgtccacgcgttcgccccgattctgggcctgacccagccgggcatgaccatcgtgtgcggtgattcgcatacgtcgacgcacggcgcgttcggcgcgctggcgttcggcatcggcacttccgaagtcgaacacgtgatggccacacagacgctgtccctcaagccgttcaagaccatggccgtcaacgtcaacggcaagctgcccgcggacgcgacggccaaggacatcattctggcgatcatcgccaagatcggcaccggcggcggccagggttacgtgatcgaataccgtggtgaggcgattcgcaacctcaccatggacgaacgtatgaccgtgtgcaacatgtccatcgaggccggtgcgcgtgccggcatgatcgcgccggacgagaccacgttcgagtacctgaagggccgtccgcacgcgccggaaggcgagctgtgggatcaggccgtggcgtactggaagacgctgaagaccgatgacgatgccgtattcgacaaggtggtggatattgacgccaccaagctcggtccatatgtgacgtggggcaccaaccccggccaaggtctgccgatcaccgcctccgtgccggagccgggcaagatcgccgacgccaccaagcgcgccgccgccgaacgtgcgattacatacatgggtttgaagccaggcatgccgatcaaggacatcgccgtggacaccgtgttcattggttcgtgcaccaacggtcgtatcgacgatttgcgccaggccgccgcgattatgaagggccaccgcaaggccgagaacatccaccgcgtgctggtggtgccggcctcctcccgcgtgcgtttgcaggcggagaaggaaggcctcgataaggtgttcaaggactttggcgccgaatggcgtaacgccggctgctcgatgtgcctgggcatgaacccggacaagctggtgccgaacgagcgctcgatttccacttcgaaccgtaacttcgagggccgccaaggcaagggctcgcgcacgcatctggcgtcgccggccgtagccgccgccaccgccatccgcggcacaatctcgtctcccgccgatctctgagtcaatacacgtgagccccctctgacgaggggctgtcagtcgaagactgactgggggagagatccccgaaaggaaaattgttatggaaaaactcaccacactgaccggcgtgggcgtgccgctgcgccgctccaacgtcgataccgaccagatcattcccgctgtgttcttgaagcgcgtgaccaagtccggcttcgatgacgccctgttctacgcatggcgccgagacccgaacttcgtgctcaacaagccggaatacgccggtaagggccagattctggtcgccggccccgaattcggcatcggctcctcccgcgagcacgccgtgtgggcgctgcacgattacggtttccgcgtggtcatcgcgccgagcttcgccgacatcttctacggcaacaccgccaagaacggcgtgctggccgcgattatgccgcaggagtccgtcgaactcctgtggaagctactggaggaagagcctggtcgtgagatgactgtctcgctggagacccgcactgtcacttgcggcgacgtgaccctgccgttcgaggtcaacgattacgtgcgttggcgtctgatgaacggctacgacgatatcgatctgacgctgcagcacgaggacgacatcgccgcctacgaaaagatgcgcgccgaaaagttccccttcaagcccaagaccatccccgccaaacattgggccgaagaaagaatcgagtccgcccgcgagcctgaggacgcagactggacagggccgttggccgatcgcggcattatttagccgcgatcggcctgctgaaagcccggtgggctttcagcaggccctgtgccgagctgcgacagcagcgaggccagcattgagcctcgccgaaaggcgagtccataattgcaggcccagggccgttggctctgtgtctgattgagattattgggtcgcttgcatcgcatcaaacaaaggtctcactggtgcccgcgccccacatccattgcgcggcgggcaggagttgcggcaatattcccttcagtgccaacaacgccatacggtcgttatccaccgcagccaccaacaccggcgtggcggcgctttcctcaacactcatgaactccgtcctagcgttcgaaatactgtgcctgaattcgtacacatttgtggacataatcacgattcatccagtaatgacggttaggttgagcatcatgaccatgaatgacatgaatccgtcgaacgattccgatacggctccggcgcaatcgctgtcagcgcaaccgttgccacctcgaccggcaccgcagtctgcggcacagtcacagacgccgatgccacagacgccacagtatgttcagcctgggccgagcatgcagccgcaatatgcgggtcagccggaggcatgggcacaaccgctacctccacaagatgtttcacggggtgttccacggattgtttcacaaggtgtttcacaacctgtgccgcaagccgcaatacctgctgtgcagcctgcacaatacgccgcgcagctcgtatacccgacatatcccgtccaacctacgtatcctgcccagccgatgtatcccacgcagccgacgtatccggcgcaatccgcctattccccatacccggcgcaacagtcggctccacagcccctcgctcatccgtactacgctcaaccagtgggctacgcgccacaaccctattccgctgcgccgcaaccattcgtgcaaacggctccggcaatgccagtcacaatgcccaacgcaatgcctgccacgatgcccgcagcaatgcccgtggtcatgccgatcgatcctcgccgtgtatggcgcacgtggcgtcgcaaggtggtcaatcgtgtaatgggactgactctcgcctatgaaggcatgatgctcttgggcgcaatggtcgccaccattatcgtcggcgtaataaccgcgagcgatttgtccggcgtgcagtgggatggcatcatcagcctgatatcggtgttcgtcgcgttcggatttctgctgctcatgcgccaccgtgacatcttcacctgcgaattctggcttggtggccagcatcgcgactcgtacggggagcccaatcagcttggccacatcagccaatatggcggcgggcgcatgcagcctctctgggcgttgatgttcatcgtgctgggcatgggcgtgcaaggcatcgttatgttggtgcaggtcgctttttccaggctgggcatcgatcttgcctctcccacgtcagacagcatcgccgaatccagcgccaccgtaagcatgtggctgtacgttgggctggtcgctccgatttgcgaggaagtactgttccgcggcgtactgatgaaggagctcaagccgttgggcaagaacttcgccatcgtcacctcggcaatggtgttcggcctgttccatgacgacgtagtgcaaggcacattcgcgttcctctttggcctgattctgggattcgtggccatggaatactcgttggtttggtcgattgcactgcacatcttcaacaatgcgattctttccggcgccatcgatacccttgccggcaactatcttgatgacaacgcatatttgatattctcattgtcgctatctgtgatcggcgtgatcggatcgattatcatattcgtgatatacggcaaagagatgcgccaatatcaccgtacgaatcgtagtattccagacacgtactttggctgggcagctccgacgttcatcatctttgtggtagccaatgccgctttcgccattatttcgtttgtcggcgcgatgatgggttgagtgtgcgtgtgcgcatgcaggttggcttatcgttgaagcatgagtgattttgagccgttttacgatgtcagccgcagttacgaagacaactatgagcaagggccgttcggcgcgttcgccgaggcgctgaaggatggcaacggtgccgatgccgccggaaccaccagcgagggtgcctccgagggtgccttggccacttttctgggccagccggtcaacctgcctttcggcattcccgcaggcccgctgctcaacagccgtttcaccacggccgctttccacatgggtttcgatctggcgacctacaaaaccgtgcgttcgcgcgtctggggctgcaacccgttcccgaacgtgctcgccgtacaccccaagtcggcggacggttcactgacgccgggcagcgccgaactggacgaaggcgtgctggccgacaccaactatgaacagccgatttccatctccaacagcttcggtgtgccctcgcagagccctgacgtctggcagccggacatgcgcgccgccatcgaggccgccggtcccggtcaagtgctggtcccgagcttccaaggctcgcgtgtggagggcatgagcgaggaggaatacatcgccgaccatgccactaccgcccgcctggtcaaggagaccggtgccaagctcatggtgatgaacaccagctgccccaacgagggccacaaccgcctgctatgccacaatccgctgctcgtgggccgcatcaccgaggccgtgaagcaggagatcggcgacatcccgctgatggtcaagctcgcctacatccccagcgacgacgctctggagcttatggtgcgttccaccgtgggccacggcaccgtgcagggcttcagcaccatcaatacgatttccgccaaactggtcgatgccaatggcaatcaggccctgcccggcgcgggccgcgatcgctcaggcgtgtgcggcaatgcgattcgtggcgccggcctcgacatggtcgcccgtctggccgcgattcgtgaaaagctcgggctcgatttcgcgatcaacggcgtcggcggcgtggtctcgcccgccgactaccaggcgtaccgtgacgccggcgcggactcggtgatgtccgccaccggcgcgatgtgggacgccgaactggcccacaagatcaaggccagccggtaaatcggctccaaaaacaagcaacagcctgtacgggccgtgattcccagacgattcccagacagtgcccatgttgcattgaaactgttgctgttatatgtaatcacggccgaacaagctgcataacttaacctctttcttcttctctcctttctctccccggcgcccatcacgccggggtttcttttttgcggtgggtacagccgtcttactcggccgccgccttcatggccacggctccgacgtagtagaccggcttgtcgaagttcggctggaacaggaagtccacgttggcgagctggtcgatggtgaagccggcctgaatcgccatggaaatcacgtttgccgcgccggagatatcggccttggaacagaactggccgcccttgaccttgcgggtttccgggtcccaggtcagaatcgacgtgactggggtggtggtgagcatgaagtccgggcgataatcctcggtgagcgaggtctcgcggaccgtgagcccgcggcgttcggcaccggcgcgggtcaggccggaggcggcgagcgagagatcgtacagctgcacggcggacgtggcctgcgtgcccatgtacttcacggtcggcgtctcgatgttgcggcccaccagcaggccctggcgcaccgcgttggtggccagcggaatgtaatcgtgctggccggtggggttgtagaacacggtggcggagtcgccggcggcgtacacgcccggcgcggacgcctgcatgtagtcgtcgaccacgatcgcgccgttcggcagcatgtccaccttgcccttgagcaggtcggtgttcggcaggaagccgacggccagaatcgccatttcggccgtgtactcgcccttttcggtgaccacagtgacggtgtcgtcgtcattgtcgcggaactcgaccaccttctggccgagcgcgagcgtgacgccgtgctcctcgaacgcggccgccacctgatcggtgatggtcttatcgaaattattggccagcgggcgatcaaggccgtcgaccagcgtggtcttgacgccggtgacgctgaactgctcggcgatttccgcgccgatatagcccgacccgatcaccactgccgacttggcggttttcgccttttccttgatggcgatggcgtgatcccagttcttgcacagcagcacatgcgggctgtcgatgccggggattggcgggatgaccgggtgcgatccggtggtcacgaccagtttgtcgaaagcgagggtctgctcggcggggtctccggcctcgtccagcgcgcggtaggtgagggttctggcgtcgaggtccacggacgtcacgtcggtgcgcatgtgcatggtcgcgccggcttcggccagagcggcaggggaggagtagaacattttcttcgggtcggacacgtggtcgcccacccacagggcgatgccgcaggagaggaaggacagcgtaccgttgcgctcgaaaacatggacggtccaatcggggtgctcggcgagaatcgaagtggtggcgaacgtgccggcgtgcgtgcagccgatgacggcgactgtggtcataaatgctcctttgcttgtggccatggcgtctgatgccattgccctgaatcgtagcgtagaagtatggagaacgccgtggcggcaaatgtgaggaagatcacgttattggtttgattcgacggggtgtggaatccgttgtgcacggtgatcaaagttcggctggggcatttcacggagtcggcacatggcttatggcaaactggacggtagcatttttgaatcttgattgattgaggagagtggcgtggctgagaacccggatgacgtgctgcatgttgaaggcggcaagccgctggctggcacgattaaggtgcgcggcgcgaagaacttcgtgagcaaggcgatggtcgccgcgttgctggcaccgggcaagtcggtgctgaagaacgtgccggagattcgtgacgtgcatgtggtgtccgatttgctacgtctgcacggcgtggacgtggatgtggacggtgcgaacggcattgtgaccatcgacgcctcgcgtgtgcagctggccgatgtggccgacgtggatacactgtccggttcgtcgcgcatcccgatcctgttctccggcccgctcgtgcaccgtctgggcgaggcgttcattcccgcgttgggcggctgcgcgattggcggacgtccgattgacttccatctggagacgctgcgcaagctgggcgccacggtggacaaggaacacaaggacggcatccacatcaccgcgcccaacggcctgcacggcgcgaagatccacctgccctacccgtcggtgggcgccaccgagcagactttactggcggccgtgctggccgagggcaagaccgaactgtcgggcgcggccactgagccggagatcatggatctggtgtgcgtgctgcagaagatgggcgcaatcatttctgtggacgttgatcgcaccttccgcatcgagggtgtcaaggaactgcaggggtacacgcacacgtcgctgacggatcgcatcgaggcggcgtcctgggcgtccgccgcgctcgccacgcacggtgacattttcgtcaagggtgccacccagccggagatgatcacgttcctcaacgtgttccgcaaggtgggcggcaaattcgaggtgacggacaagggcattcgtttctggcatccgggcggggacttgaagcccgtggcgatcgagacggacgtgcatcccgggttcatgaccgactggcagcagccgctcgtggtggccctgacccaggccaacggcctgtcgatcgtgcacgagaccgtgtacgagaaccgtttcggcttcaccaagccgctggtcgagatgggtgccaccatccagttgtaccgcgagtgcctgggctcgctgccgtgccgtttccggcagcgcaactacaagcattccgccgtgatcttcggaccgaccccgctgaccggacgcgacatcgacgtgccggacctgcgtggtgggttcagccatctgatcgcggccttggccgcgtcaggcccctcggacgtgcacggcatcagcctgatcgaccgaggctacgccgacttccgcggcaaactcgaagcgttgggtgccgacttcgattaattcggccggtcctcggctcccctctctgaggggagccacaattttttacaacagcccgtccgcctcaagtgcggcggccatgcggtcgaagcattcctccagtagcgggtagggcatggcgaagttcatacgtacgcaaccgcgcccgacctcgccgcattcacggccgtccgtcaacgccacgttggccttcttgaagaaatagtcggccgggtcatcgatgcccagtgacgagaaatccagccacgcgatatacgtgccctgcggctccacatagcgcaccttggcgaatctcgtgcgcatctgctcgttgaccagcgcgatattgcgctcgatatatgccatcacgccctcgaaccatgccgcgccgccgtcataggccgcagtggtggctatggcaccgatggtggccgtctggtgctcggaccattccgcgttcctcatccatagttccagatcgtccggattggtgagaatcacctgcgcgcacttggtgccgggaatgttgaacgacttcgaggctgaagtggaggtgaaagcctgcatggccgtctgccggttgattgaggcgaatggcacatgcgtgtggccttggtagacgaacggcgcgtgaatctcatcggagaatatacgcacgtcgtacttggcggccaggtcggacaatcgcagcatttcctcgcgcgtcaataccttgccgatcgggttgtgcgggttgcacagcacgaaggcatggcagccgttcgcgaacgcctgctcaatggcgtcgaaatcgaacagccattcatcattgcgcccgctgctctcgccggcgccctcgcacagcatcggaatctcaagaacctccacgccatacaggcgcggcacgctcaggaacggcatataggccggagtcggcaccacgatggagttgccggcgcgcacgatctcgcgcaggaacacttcgaacgcctccagcacgtccggcaccgggcggatgcacgtcggatccacatcccagccgtatcgacgctgccatgcggcgcacgagcgggcgacctccttcttccacgggtcgggaatgtagccgagcgcgccacgttcggtggcctcttcgatggcttcggccacgcacggcgccagaccgtaatccatctcggcgatgaatgcgccgatgcagccggggtagcgggtccatttgtccgaaccgacctgcttcagatcttcgatggtcgtcacgtcgatgtgattggcatcaaagcaagaggcaccggcggttgcgctgctcaaagtcgttgactggggaatgttgttcatgctcataacatgtcattgttcctggtacagaagggccgctcaacggtctggctccccgaaatcgtgatggcgctcgcaagcttgcttatcgctgtgcgactacttggcactcaaatatttgagtgccgtgcgctcgagctcctcgagcaatgaaccgagcgcgggacgatggtcgccggcacgagtcacgatgccgacctcgcgcgccgcaaaatcgtcggcgatgggacaggccaccagatcgccttgcagattgatatgtgtatcgagcgccggcaccagcgagacgcccatgccaacctcgaccaggttctgcgtggcccagtaatcatccgtgcagtggcggatatccggcttgaatccggcacgggtggccagtttcaccaaatttgcgcggcaggtggggcagccggcgatccaatgctcgtctttggcggcggacagcggcacgggttcgccggtctcctcgaatcgtttggcgatgtcgctggagcggcggaccaacaatcgcatcggatcgtaacccagcgactggaaggtcagatcgtcgccgatgtgcaggaagttcgggatgctgctgtaccggaacacggcggcggcatcggccttgccttgggaaatcagaccgatcgcctccggcggctccatctgaatcaggctcagctcgatgtccgtgaacatactgagcttgaccacggtacgggccgcgatagtagagcagattgacggtggggccaccaaatgcaggtgagcaaaccgatgatgccgataatcctcgacctcacgggccgcccgctccagccgatcggcgatggcctcgccgtggcgggcgagcatcgaaccggtggcggtgagttccacaccatgcgaggtgcgttgcaccagagtcgaaccgcactgtgcctccagctttttgatctgctggctgatggccggctgcgaccaacccgtggccttggccgtggcggagaacgaaccatactgttcgatctgccacaacgtgaccaatgattgggggttgagcccggccatatgcacctctttcgcgcgtcgttccattatggccgccgacaatgaccggacgcggcacggtgtcgccgtcgccggtatccttagaagaatgagccctgaagccttaagtgaactgatttccagcattgcccacaacctcgtcgccgccggccaggccggcgcgttgaccgacgagctgattccgcccgtcgacaagctcgccgtgatgcgcccgaaggaccgcgcgcatggcgactgggcctccaacatcgccatgcagctggccaagaaggccggcatgaagccgcgcgatctggccgagccgttcgccgccgcgctcgccgaagccgacggcatcgccaaggtcgaggtggcaggccccggcttcatcaacatcacgctcgactccgcctcggccgccgccgtggtggacaccgtactcgccgccggtgccgtgaccgacaccgacaagcatctcaacaaggtcaacgaatacggccgcaacgcccatctgggcggccagaccctgaatctcgagttcgtctccgccaaccccaccggtccgattcacatcggcggcactcgttgggctgccgtcggcgacgccatggcccgcgtgctcgaggccaacggtgccaaggtggtgcgcgaatattatttcaacgaccacggcgagcagatcaaccgcttcgccaagtcgctggtcgccgcttgggctgaggccaacaacctcggcgaggccggttaccagaccgaaaccccgtgcgacggctacaagggtgcctacatcaacgagatcgccgcccgtgttcaggccgaagccgagtccgacggcgtggacctgaccgcactggcccaccaggatcaaggcctcaacgacgacggtgaaccgctcggcgaggccgacaccgaagtgcgcgaggaattccgcaagcgcgctgtgccgatgatgttcgatgagattcagaagtccatgaaggacttccgcgtgaacttcgacgtctggttccatgagaacagcctgtacgccgacggcaaggtcgacgccgccatcgaagagctcaagtcccgcggcgacatcttcgacaaggacggcgccacttggtttgaatccaccaagcacggcgacgacaaggaccgtgtgatcatcaagtccaatggtgagttcgcctacttcgccgccgacatcgcctactactgggacaagcgccatcgcgccgaaaacccggctgacgtggccatctacatgcttggcgccgaccaccacggctacatcggccgcatgatggccatgtgcgcggccttcggcgacgagcccggcaagaacatgcagattctcatcggccagctggtcaacgtgatgaaggacggcaagcccgtgcgcatgtccaagcgcgccggcaacgtcgtgaccatcgacgatctggtctccgtggtcggcgtggacgccgcccgctactcgctggcccgctccgactacaaccagaacttcgacatcgacctggccctgctcgcctcgcacaccaacgacaacccggtgtactacgtgcagtacgcgcacgcccgctccaagaacgtggaccgcaatgcagccgccgccggcatcagctacgagggtgccgacctggccctgctcgacaccgaggccgacggcgaggtacttgccgccctcgcccagttcccgagcgtgctcgccactgcggccgacgaccgccagccgcacaaggtggcccgttatctcgaagagctggccgccacctatcacaagtggtacaacgtagagcgcgtggtgccgatggccctgaccgatccggaaacccgtggcgacgatgaggctcgcaaggccttggagatcgccaagaatccggagccggcccgtgccgccgcccgcctgaagctcaatgacgccgtccagcaggtcatcgccaacggcctcgacctcctcggcgtcaccgcccccgaaaagatgtgattatgcccatttctccaatttggccggccgctacggctgtgaatgccgacggtgccattacattccacggtcgtaccgccgaatcgctgcttgacgagttcggctcgccgctctatctcatcgacactgatgaagtagtcgcacgtgccaggcacttcgtgcgcgctgccgccgaagcattcaacacatccactacgcacgtgagctttgccggcaaggcgttcctgtccaaagaagtcgtgcgattggtcaccgaggccggcatgttcgtggacacctgcacgatgggcgagatgaaaatcgccctcgccgctggcgttcccggacgtcgtctggtgctgcacggcaacaacaagtccgatgaggaaatcgcgctggccatcgaacagggcttcgccaaaatcgttatcgacgagcccgacgagccggagcgcgtcgccgccatcgcccgcaggctcggcaaacgcgcccgtgtgatgctgcgcgtcaccgtcggtgtccacgccggcggccacgagtacatctccactgctcacgaggaccagaagttcggcgtgccgctgctggccgccggggccgacgccgccgtgctcgatgtgctgaacgacctcaaagacgtgacgcctgccgctaccaacgcgcgtatctctgcgacgcattccccggaaaatggcgcggaaaagaccgagaaatcagagcgcgagctgcactacgacgtcaagtacccgtacgacctgagccacgaggaagtctccgacacagacaaggcgctggccgccgcgatggaagccattgcggacggtccgtccatcgccgtgctcaagaccatcctcgccaaccaggacgtactcgaactggtcggagcccactcgcacatcggctccaacatccacgatgcggacgccttcattcacgcggccaagcgcatgatgctgctgcgcaagaccctgtgggccaccgacgcctacatcctgcccgaaatcgacctcggcggcggctactccgtggcctacaccgatggcgaagattcaatggacattgacgtggaactcactcgcttggcggatgcggtcaacagcaccaaccgtgcgctcggcatgcccgcgccagccatcagcttcgagccgggccgctacatcgtggcacccgccggcgtaaccctgtaccgcgtgggcaccatcaagcacgtgcacttgtccgatgccaaagacagtgccggcaacccgattgccgagcgcgtgtatgtgtccgtggatggcggcatgtccgacaacattcgcccggcactctacggtgccgactacaccgcgcgtctggcgaatcgcaccggttccgctgaaacgatgcttgcccgtgtgtgtggcatgcactgcgaatccggcgacattgtggttcacgaggtgcagttgcccgccgatttgaagcgcggtgacattctcgccgtgccggttaccggcgcatacggccgcaccatggccagcaactacaaccaggcgctgattccggcggtggttgctgtcagcgagtccggcgcgcacgtcatgctccgccgccagaccgtagacgacctactcaacctcgacgtcagcgagtaatcagcgtgcagaggtgagcgcctgacagtctgtaatgtgcggccaaaaccgtcataatacgaaaagggccgtcagcttgatgagtactttcggtctgctgtcggaaataatccgtaaaataggcgtgggatatagaaaactttttggaaggaccctgaattggctcacaacagcgaaaccccgattcgcgtaggcctgcttggtgccggcaccgtcggctcccagaccgcccgcctgattgtcgagcagaaggacgaactgtccgctcgtatcggccgcccgatcgaactgaccggcgtcgcctgcctcgacccgaaggaaaccgagaagttcccgtggatcgaccagtccatcgtcaccaccgatactttgagcgtggccaccaactcggacatcgtcatcgagctcatcggcggcaccaccgtggcccgcaagttcgtgcttgccgccatcgaatccggtgcttccgtggtcaccgccaacaaggcgctgctggccaagtacggcccggagatctactccgccgccgaggccaagggcgtcgacatctacttcgaggccgctgtaggcggtgcgattccgttcctgcgcccgctgcgcgagtccctggtcggcgacaaggtgaccagcatgctcggcatcgtcaacggcaccaccaactacattctcgacgagatgaccaccaagggtctccagttcgacgacgtgctcaaggacgcccaggccaagggctacgccgaagccgacccgaccggcgacatcgaaggctacgatgctgccaacaaggccgccatcatggccaccctcggcttccacacctccgtgaccatcgacgacgtgtccgtcgaaggcatcaccaagatcaccgccgacgacatcgccaccgccaccgccgagcacaaggtcatcaagctgctcgccgtggtcgagaacggcgaggccggcgtctccgcccgcgtctacccggccctgatcgacgagaaccacccgctggcctccgtgcacggctccttcaacgccgtgttcgtcaaggccgaggccgccgacgacctcatgttctacggccgtggcgccggcggcgctccgaccgcctccgccgtcgtgggcgacgtggtgaccgaagcccgccacattgctgctggctgcaccggcccgtccatcccgctgtacaagaatctgccgaaggctccgattaccgcctccaaggctgcattcgccgtgcgcttcctgatccacgacaagccgggcgtgctggccgccatcgccgccgagttcgccaagaacggtgtctccatcaacggtgtgaaccaggatctgaagcccaccatgaccgaccccggctacgacggcgagattcagcagttgcgcatcgtgacccacctgaccgacgaggaaaccctgcgcaacaccgtcaaggccgtgcaggcgctcgacttcgtcaccggtgacccgtccatcctgcgcgtgctggactgacaccatctaggctccctctgatgaggcggtcgaacggctgcccgtgagttgaaagctgaatacccaagctcccctgacaaggggagctcctttttaaggaacaaccatgaacccaatctgcaatagcgttcacgtgcgcgtgcccgccacgtccgccaacctcggctccggcttcgataccgtgggtctggcgctcgactaccatgacgagctcactttcacgctcaacgacgacccgaacgacggcattgcccacgtgatcatccacggcgagggtgccgacaccctcccacgcgacgaaacccacctcgtggtctccaccttccgccgtgcctgtgccacgttcggcctcggccgactcggcttcacgctggaagcgaccaacaacatccctcaggctcgtggcatgggctcttccgccgaggccatcgtggccggcatcgccgccgccgcggccttcgcccagaccggtgacctcaaccgtccggccatcttcgatatggccgcccagatcgaaggccacccggacaatgtggccccggctgtgttcggtggcctgaccgtctcttgggacttcgaaaccgcggaaggcgtcggctcggtcgccgttcctggtggtgaaccgctgcacggcggattccacgccgtcaactacccggtggacccgtccatcaccgccgccgtgttcgtgcccgactatgagctgtccactgagaaggcccgtcaggcgctgcctagggaactgccatacaaggacgccgtctacaacgtgtctcgcgtgggtctgctgcccgctgcgatgaatcccatggtgctggcccaggccgcccagcagggcaagtccggcgtcgccgctgccccggctcaggatgccgatacgtgcgcttgcgctggcggaacccgtgaatcgccgttcgctgacgagcttgcggccgctcaggcccagtccaacgcgctactgttcaccgccacgcaggacaagttgcaccagccgtatcgcggtaccctgatgccgccgtccaccgagctcattgcgctcttccgctccaagggctatgccgccgccgtctccggtgccggcccctgcgtgctcgtgctgcactacggcaacgcccgcgaagccatcgaccagatcgcatcggagcagcttgcttccggccactggcgtgtgcttcacctgcccatcaacaccgccggcgtcgaaatcgagcgtcgctaagtcgaggagaaggctcccgctggcgggagctggccgccgcaggcggtctgagagtggtccgccataccggcagagaccaccctcagtctcacttcgttcgacagctcccgccagcgggagcataaggacttaagtcatgtccattccgctaattcttgcttccaagtccaagcctcgccgtgacgtgctgtattcggcgggtatctgccccacaattcgcgtctcgcacgtggatgagcctgctgcgctggaagcggccgcccgtgaggaaggcgtcaccgtcgatgatctgagcatcaagcagcgcgtgatgattctggccgtggccaaggccgaggccgttcaccgtgcgtatcgtgatgtggccgatactgccgccgccgcgaccggtgaccgcgtgatcgcctacccgctcaaggccaaggagatcaaggattcggaacgcgaagctgccgtcgaagacctgcgcaaagccgccgccggcaagcctattgactattccaaggcggaaatcgccaccacgcgcgacttctccggcatcgatatgccgaccgtcaccgaacccatcgccaccgctattgccggacagccgggactgaccgaggcgacggtcggcccgctgattctcggctgtgattcgatgttcctcctggacggcgaatgctacggcaagccgcacagcgaagccgtggcccgcgaacgactgaagcgcatgagcggcgcgaccggcgaactgtggaccggccactgcctgatcgatttcgcgaccggacgtaccgtgcgcggcgcaagccatgccaaagtccatttcggcgaattcaccgatgacgacatcgaacggtacatcgtcaccggcgagccgctggaagtcgctggatcgttcacgctggaaggcttcggcggcgcgttcatcgacagcatcgagggcgatccgcacggtatcatcggcctcagcctgccgctggcccggcatctggccggcgaactgggcatcacgtggaccgacctgtggaatgtcggccgtggcgaactggagccggaaagcaaggcctcgggcaaccagcacgctggcattctgccgccggtcgaaaacgtgcatcagcccggcgatggctgggtggactgcgcctgcggccgcaagcattggggcaccaacggtgcgtccggcattctgctggctcgccgcgacccggcgagcggcaaggtgactcacgtggtcatgcagcaccgtgccgcgtggagcgccgaaggtggcacgtggggtatccccggcggtgccactgcggacggcgaatcgcccatcgaaggcgcgttgcgcgaaagctacgaggaagccaacatcacccccgaagacatcgaggtggtcggctcctaccgcgaggaccatggcccgtgggcctacaccaccgtgtttgcctttgaaaagcccggccacaccgtcgagcccaaggcaaacgacgacgaaagcatggaaatctgctgggtcccgattgacgacgtgcccaaccgcaagctcctcaccgctatgaagaccgactggccccgcttcgccgcccgcctggacgagctggcctgtgctggacatcggtagtggtgttggctgggccaatgttttgccgatgagtttacttgggtaatgccgtgtgaaccgcgtgtggaccgggacggattctgctgtcccggttcgtcatttcgtctcttttgggacaaacgggacagatttcgctgtcccggttcgtcattttgcctctttttgggcaaccgggacagaatctcattcacctgacgccctatcgtgcgatggtcgccgtcggggaatggcggaattccggggttttggatttgcatatatcgggtgttcatggaagggcctgtcccggttcgccaaaagaggccgaaatcccgaaccgggacagccgaatctgtcccggttcgtatgtcgatcgattgaccccgccaccgggacatcaaccgcgcatagacaggacgcttcaatgcctggcgggcatgaccatatcggatgacacacgttccctcgtgcgtttcgccacgacctccgccccaagtcagtgcgaaaatggcatttttagcggtgtggtcagctgtcgcatgcggaaaatcctaaatcaaccgccgaagagacacatcgccgactcggcggaactcgctggtctgcgcgcaatgaggagtgttgtgtctgaatgcgattcagacaatggtcggcgtcaaatagcggtctccagccattaatcattggtgattgtggacattgagcggagtaaacattctagatgattcagggatatgccgaaaatcatatcgttcagagaatgaaataccgcatctcggagtaactgactgtcgacgtgcatggtttgaaatctgatatccacgcccatcatgcctagcaaaattacgggaatggggttcggactatttcgcctcagccaaccgggagcttccgaatgctcaatgctgtatgcacttagtgtgtggaaaccagccaatcattgaccaatggcaggccgcagtcgaaaccagaaatatcctcgctcgcagtcaggtgccgaggctcagtgaagttggtcacgtccatatgggatcacgctccaataattcattcagacgtaggcccataggttcgtttaatgctgcggtgaaatcattccacgctttactgttgggccgaatgatatgagcttcatggatgtcccgatctgcggcggcgagcagattcgataatgcccattgcaacgaagtcatgcctttggactcggccgcttggtcgattctggaacgttgctcttaggtgagtctcatttcaaaacgactgttcttgttattctctgtagtcatactcctgttgtacgacttttgtacggacacgattggtgtgtgcgggatgtcgattgcgatggccatgtgggctcctttgcttggtctgttgtggttccagcttccgaaccggtcttccactgttcctcgtcttctcgagcaatgaacatctgatatatggattgtcgcgtcgactgcgtatctctaatccttgcggatgaggagcgggccggtgatccagaaaggttcataccgcagcccgatggtcggctgggcgttcgctccgtacgctcgggagtatgaacacagcagcatcgcaattgcagcagcctcagccggcgtcgggaccggcggctcagcctcagcagtctcagcaaccccaacagttccagcagccggcatcgcacacccagcagtgggccccggtcatcgaggcgcacgacctggtcatggactacaccgccagcatggcccgcgcacaggcagggcacggcgtcaccggcgtgatgccagccggcacgggagccggttatgcgtcggcgaatcccgctgcggccagaccgggtgccattcaggccggccagccatcccagccagcccagcccggcttcgccatgccgaccatgcacacgctcgccctgaaccacgtgaacttcacgctccgggagggtgagacagtagccgtgatgggcccgtccggctccggcaaatccactttgcttcacgcgttggccggcattatcaagccgactgccggcacggtcgtcttccgtggcactgacctgagccatatgagcgacgccgaccgcaccaaactgcgtcgtaatgtcttcggattcgtcttccaatccggccaactgctgcccgaacttccggccgtcgaaaacatcgccctgccaatgatgctcgacggcgtgccctaccgcaccgccacggacacggcgattctgtggctggaacgtatgggtttgcgcgcactcgccatgcaccgaccgggggagatgagcggcggccagatgcagcgcatcgccatcgcccgcgcccttgccgtcaaacctgccgtggtcttcgccgacgagccgaccggcgcacttgaccaagccaccggacgcgaggtcatgggcattctcatggccgccgcgcgggacaacggttccgccgtggtcgtcgtcacccacgaccccaacgtcgcttcgttctgctcgcgcaccgtgaccatgcaggacggccagctgggaggcgtacgatgagcgctttcgcattgtggcgattgttccatcgccccggctcgcgtggcagtgcgggtcatacttcggtgttggccatcattgcttttgccgcagccaccactatctttctcaccgttttgggtggcgtgcatgggttcatgtggcgcgcctccgccgaccacaccattggatgcgcaatcaatctcgacgcttgcaaacccggaacagcggaaatctggaagcagcgtatcgccaatccccacagcctggatcaatacgccacggcatacgtcgtgctggcgttctttgcctgcctgctgctgattgtgccgttcgtggcgcttgccggttccgccgcgcgattggctgcgtcccgtcgtgacgctcggctcgcatccctgcgcttggcaggcgcgaccacggggcaagttattcgccttacggcgcttgatgcggctgggcaggccttggtgggggcgctgattggcatcgcggggtactgcgtgttgatccccctaatcatgttgctgcatttccagaatcagacgtttacgttcgagcaactgtgggtggggccgattgccttgatcattacgcttgttggcgtgaccgtgttggcgctgatctcttcgctggtcacgcttcggcgcgtggccatcacgccactcggcgtcacttcacgcgttgcgactacgctgccgtccggctggcgtgtggtggtgttcgccgtcatcatggtgattgccgttcttctgttcaagaatccgatggtgctggctcaggccggtggagtagtgatgtacggcgtgatcatcggtttcatgctgctgtgcttcgcgctggtgaacctcgtgggctcctgggtggtcaccgcccgcgccaaagccaaggccaagcgccccaaggatgcggccacgatgattgccatgcgccgtattctcgacaatccgaagcgtgcctggcgcaatgtgtccggcattgcactggccgtgttcatcgccggcatcacctcgatctgcggattctttggctcggccgccgtggtcggtgacgccaacgacccgtccaccgtgttcattcgcgacatcggcaccggcggcatcctgacgctagtgttcgccgctgtgcttgccgcggtcagctccggtgtgatgcaggccggcagcgtgtacgatcaggccggcgaatatcgcatgctggtgttggagggcactgatgtcaagaccttgaaccgtgcgcgattcatcgaggtactcaccccgctcaacatcgtggtgatcgtggccggcggctgttccatgctgcttatggcccctctgttcgccgcttcgatgaccgaaccggccacgctggccagcttcttcggcgggcttgcgctgtgctatgcgctggtttcggtgggtgcgttcgcgtccaatcgggtggccgccagcttgaatctggccgattatcgggcc

SEQ ID NO: 129 - DNA, 3731 bp, Unknown
  R206_24m  MAG No. k141_37262
tcggctggggcgtgctgccgctgtactggcgcgcactgtccagtatgaatgccatcagcgtgctcgcgtatcgtttggtcgccacgttggcggccatggtcgcgctgttagtggcgttctccgtcctggccaccgcgattctgctggccatgttctcctacggcgtgcagcacagccattacctgaccgtgagtttcatccaatatctcaacccgctgatccagttctgtgtggctgtgctcctgttgcacgaaccgatgcgcgcgcagggctacgcggcgttcatggtgatttgggtcgcgatcgcggtgtattcgttcggcgcgattcgggcgtattgggagcggctgaagccccacgcacgttaagcgcttccttaactcccctccccgaggggagctgtcgccgtaggcgactgaggggaggtcaacacggcaaacagcagaaacctcgctcccgaccaaggccacaaacaccactcacgaagcaagcttgtacaagttctccttaaattcccgctcactccacttaatgggatacgcattgtacttttccaaagcggttattagctgattgtcaatgcgccgatccgaatcattgaggaaaacaacaaccagttcacttggtgtctttcgtgccgcctgcgtatcctcccatgaaaataaggtactggaaatgagtcgctgggaaggccgcgtaatagatgtgcagaatcgttccggctgtttactcgtgaacggcaacacaaagtcatacgggcacagcaaaccagacttgccacggaattgaacgtcttccacataccgtatgttgttcgcattaaagaacatacgaatgtcatctgcaaaatacgtctgcacatgggattggccagcatagacatatcaccaactttgatgatagcttgcaggaaccgattcttggcatcagcaaaatcagcagtatcgctcgtcagagtaagctcgtcgccgttacgttcaataccaaactgattcagaatatctttgagcactgccaaacgtgattccgtcacagtcatcccatgcgacttgtggcacagtcatcagagaacgttacgctgttcttcccgggcttcacatagaactgcgtatagtcgttgtcttcatccagaagcggaacattaacttcataccactcatccagttgcgtataagtcgtgttatcagacagccattttccgtagcttcgaattaatgagtcaaaatcagaactcgtcatactttcttctcgtcgtaaacaccacgattcatttgactacaaacttatctgatgcaattggaattgcttctcgcctttattcagggtgatggacttcggagacaaagcttccttcagcagttccagcatacgacgagcttcagcatctgtcagtacagccattgacgcctcttccccgaatgcgattgcccagtgggaacagcctacatcaggtcagcgggtgccgccaattcccgggatcgttcgatgcgtcttgctgtagaatcgtcgcaacggttctaacagtcggatgccgaagaggcggggaagatcaatgagttgggcgggtagacgacggctggcggcatgcgccgcggcattggcggcgctcgtcgccatcgccgcgggactcaccggatgcgctcctcccgtatggctcacgcatcacgccgatgcggatgcgaacggggcgggcgccggcggtaccggaaatgggacgttttcggactggccgccatacgcgaagaaaggatacgacatggatgccacacccacagcgaggcagatctcgatagcggaggcgctgctgaacgatcgacaggagcgggacgcgaacgtcgccggcatgaaggacggttggcccgactcgcaactgttccgtctggtcacgctggcggagacgctgcttgaccggatgtcggaacggtatggcgtggaattccgtgcatcagaaggatttcaccgtccggaactgcttgacccgacatggtggatcaacgtgacgcccgcatcggggccgttgcaaggcgacgtgttcgaagtggattatgtggaaggcaatggtgccgacgggaacgatctcggtccgtatgtcgcggacacgtatttcacggcgctgcgccgagacgactacaacggtcatcttacggaacggatcgaccggttcctcgcggcgcatcccgatctcgactgcgtctaccggatcagcgaccccaccggtccgaagaacgagacccaatggcggttgtcgccgtccgccgccgtcgacgatctcgcctcgtatttcgttggcagcatggagatctacatctccccggaaaccgtgacggaccgtgagcggttcgccacattcgcatcggcgttcatcaccgccatgcggaaagacgggctggacgtccactacgagatcgcgcagatcacacgcatcgacggcgacggattcaccatcggggccgcacgggacgctatgcgccattcgacggagacgcccgcgtgggactcctggtatacgggaggattcaccgccagcgcggacgcctccgcccccgagatcatcaaggatggtgaatgatcatggccgtggacgcgccgtcatcgcaaccgcatatgtgctcccccaacagagcgaaaacgacgattacgggcgtgtctcatcatcgacgatgttggccttcgcctgtgcgatgaggcggaaccaggcgacgggccgtcccaccatcatcgtgaccatgcatatcatcgtcatcagaatgaggcagaacagaaaggcgaaatccttgaaatacaggtacgccgcaaggagtaccacatccgacagccagaatcctatgatgaacctcatcgccagccaggcgttcctgaccgtcgaacgatagacggctcgtagcgggcgccgaccacccccgctatgcgcttcaccgtcttcgccggccattcgtaggtgacgccgacgctcaccttgccggcggcgcggccctgcgccttcgcgcgtcccatgcgccgtaccagcaggatgatgacggcgaacacgccgcccacgatcgcgaacggaatccacagatcccgctcggccatcggcctgcactcaccgttcacgcacacctcgccgtcgatcgccatatcgagcgcctgcgcgaataccggagtcaccgcggcaccaatcattgcaatcatcgtctattcccttccctgttcaatgcaccgtgacgctctcgatgatcgcatggatccgcttgagaccatccatcgcggtcggcccggtcgccgtccaacgatgagccgatgtcgtgggtctggcggcgagtcgacggcccgcacatgctcccggtgttgctgttcattcggaggaagacgcgaagcagaaaatcatcatgccgtatttgcggtcattgggatactccgaaaacgaaatgcgattcgagaatcccattaccgctcaagctggtagtcgaaaagtcactttattcagtgacatcgaaattcttgtggatgaccgacccgaagtcattatcgatgcaaagaagcccagtcatacgctgaacgacaccgacgtgcttcaagtcacatcctatgccaagctggtcgatacgcaacccggattcaatttgtaagtgcaacacccgtctttgggtggcttgtcttcgagagtaccttgccgagctctcgataccaaacctcgttgggcgtttcccggtccaggaccttcatgggggtgtcgttgatctcgtccacga

SEQ ID NO: 130 - DNA, 25997 bp, Unknown
  R206_24m  MAG No. k141_37564
agctgggagaccatcgccgacaagaccgtggaagtctaccagtccgtgctcgacgagcagaagaagtaagtagcgctgcaacgagtgctcccctcagtccggctgcgccggccagctcccctcagggaggggagctgtcaccgtaggtgactgaggggagtcatatatcgtgtttcttggctcccctcaaagaagggagtcgtccgcgaagcggactgaggggagtcctcagacctcgaatcatagttagtatttcactcatgacaaacaccgtcctccaactcgacaacgtcgaattccggcgcaaccgtcgcgtcattatcaccgacgtgaacctcaccatcaacgcgggggagcgttgggtgctgttcggtccgaacggcatcggcaaatccaccgcggtcggcatgctggctacccgcaccttcccctcagagggccgcgtattcatcctcggtcatcaactcggcaaatacgacgtattcaaactgcgcacccgcatcggtctcgcctctgccgacctgggccggcagttccccgagttcgaggacccgctggacgccgtggtcaccggcctgtccgccgtgaccgggcgctggcgcgacacctacacgcaagaggaatacgcccgcgcccgccagctgctgcgcgattttcgcgtctcctatctggaaggcaaggaaatgtggcgactgtccgaaggcgaacgcacccgcgtattgatcgcccgtgcgctgatgggagatcccgagctgctcatcatggatgagccgaccaccggccttgacctgggcggccgcgagcaggtgatgcgcacattgagccgaatcggcgaagagaactccgagcgtgccgtggtgctggtcacccatcgcttggaggagattccggccggtttcgaccacatcgccattatgggacgcaagccgattcccgctgaggacgccaccgaagcgggcgtggactcaatgggtaatcccggtgctggcaccatcgtctacaccggttcgttggagaatggcctgaccgacgaacgcttgtcggaattgttcggtatgcccatcgaagtccagcacacccacggccgctgggccgcctacgccgtgtgatgcttgtaggttttttaggcgggatttttttgtcccctctggaggggctgtcagcgtaagctgactgggggaggtccaaccagttacgaaggcaaccatgacaaccaataacaaactcgtattcatcgatatcgacggcaccctagccgacgaaaaccacgtcgtacccgaatctgccagaatcgcttgcaaacaagcccaggccaacggccacaagctcttcatctgcaccgggcgttccgtgccgaaaatcgaacgcagcatcctcgacctcggtttcgatggcgtggtttccgtggcgggtgctcaggcgaatatcggagacaggctgctgttccagcatctcgtccctcctgaagcggtcgatgcggcgatggcgtattttgccaagcatcatatcgagagctaccaatggcaaggtgcggatggcatgtacatctcggaaggctaccgtcaacatctggaatcgaaaggcaagacctggaattgtggcgaattcgcgcgattctggcacctgttggatgaggtggaggtgccgactggctcgactttgggacagacgattcgtgtgagcaaggggtcatacttcacctcgccgaatcctgacgtgactttcgaggagactcaacgtgatttgagcccatggtttgagctcgtgcatggttcgtatgacaagatctccccgaacaatggcgagttgctgattaatggcatcgacaaaggtaccgctgtgcgcgacgtggcttctttgctgggctatgccattgccgacaccatcaccatcggcgactccgacaacgacaccgccatgctcaaagccgccggcacatccgtagccatgggcaacgccattcacggcatccaagccttctgtgacttcaccaccaccgacattcaccagaacggcctggccaacgccttcaagacgttggaactggtgtgaggctatgtcgtttgctctcagacgaaggatcctttcgtgctgtagtagtgagaaataagttgaatatatactgaacggggaaggagggaacgatcttatgccgacgataatgaaagaacagatggaagtcagcattcgtgtcactcctcagcaggtttttgatttcatcaagcagcaggtagacaccaatggaggctttgatgaggatactcgaccagtgcgggtgcatgattcagcttatttgaagcaacttctggagagctgatgagctccgccgtatgtgtcattttcgattgcaatatttatatcgatgtggcacaacgtatgctgtgccgagcatagagaattgtgaattcaaaatggtttgttcatcatgcgaagatagtggtcatctgtccgtcgcggttgcgcaatttacggtggcggaggagccggaacggaatctggagattattgacggatttgcgcgtgatgctgcgattgacggatttgcgcgtgatgctgcggcgggcgatagggaagctgatctcattactgctgagctgagtcgtgagtgtcttgattccgcgcgtcgaacattgccggtgttgcagaatcgccgttttgccgatccgcagttgtgtgactgacctctgaataactttactggcgctgttgataagggttctatgatgggaatcatgaccactactgttgatagctctgattcaatgccggaacttctgcaagaggggagcgcggcgcccgatttcactctgccggcggttatacctgggtttacagagagcggatcaatcaacctgtctgatgtgcttgatgccggccgcaaggtagtgctgtatttctacccggccgcgatgacgcccggttgcaccaccgaggcttgcgatttccgcgacaatctcgcccgattggcgtcgaaaaacgttacggtgcttggcgtctccaaggactcgcttgacaagctgcgcaagtttgcacagcgtgatcatctcacgttcccgctgctgtctgatcccgacctgaccgtgcacaagctgtacggcgcatacggcgaaaagaagctctacggcaaggtgcacgtaggcgtgatccgctcgacgctcgtcatcaatcccgatggctccgtggcgattgcgcgctacaacgtgcgtgccaaagggcatgtcgaatcgctgctgaaggcgctggacaagctggagaagccggagaagtagtgcgttctcgttgttcggacacggtggttcgtgcatagcagctccgcgcggtatgtgccgtatgaaccactgccgtatgaaccaccgccgtatgaaccaccggttgacttctcggactcaccggcaaatagtgagaccgtgggcgcgcagtacgtctatggctggcatgtaatcgagcgatgttgcggtgggattgagcatcagttcgcggagggcggcggatgctgaggactcgcttgtctgcgaggattctgcggccgggaagagagcgtcggcgattagggagatgatacgggaacgtgcatcgccggcattggcattgttgctgctgttgccggcgtcggtagtggcggagttgccaatagtagcggagctgttttgtagagtcgtatccaacgctgtggcaagcggctccaggttgttctttgtcgcctcggcaatgtcatcgagctgatcgaataaggcgaacagccatgcacgactttgctcctcatcgttgccggtcgcaagcctttcatcggtgacgcgcacgagttcgtcaatcggtactgctggcgtctttgctggatcgcgatgctcacggttgtcttcgatatcgcccataagatgctggatttcgcactcgtcctgcaatacggtggtttcggcaaatgcggtggcgatggcgtccgcatcgatgaacttgccaccttcggactggaagcgcacgcgcttgggcccactgtaataatgcgacatgccgaatgtgatgtactgaggcatctcatcctgcaattgcttgactgcatccgctaccttgcgcatgtccgcaagctgctgatgcaccacaataaaggcaagtattgctttggcatcggcgagagtgagcggctggccaatgcgggtgccatgatgctcgtgatgcgcgaacacgttcttcagcgaatcaaacaatcccatgatgtcctccttcggactgggcgtaaccggctacatctgccgtttactgtagtccggaagacttgagattgttcacggaacgccgagagcgaataccgaggtcgcgcagcaatgtacaggaaagctcctgatagcgaggagactgagcgcaccgctaatttgttggggcatcatatcggaattatgtctagacagaaacatagatgtcggagcagatgatttgcgcggtaacagtgagtatgctggtgatgttcaattcaaaatggtttcagagaggagccgcctatgcatcaaatcaacaaaacagaaaagaagtgcgcgcgaaggccaaagcatgttttgcgaagactaggcaaaacagtatggaacatgactgattcggtagacaccgttgccaagccgattactgtccagtatcagcgaatcaaaaaggaaatattgcgtattcggcaattagaaacccgtggattcacggacatggatgtctggtatctgggaagtagggaaatcataagaatgtcccagttgctgaccgcaatggagaaacactgtatgagtagcccatcaggatatgacgacagctctcgctggttgaagcaacgcactgatgacgagttatcgcgttggctcgaatccacgcctttttggacattcctagacgcgttggagcataatgacagaggcagcacgaggaagacagtacgtgaactcggtattggatactgtgcatggcgagaggatcttaagtatgcggctgccgtgctcgtgctgaccgataaatggcgacctaattcatcggattcccattaccgtccttaccgtaatgttttcgggacagatgcagcatgtgcggtaactaagaaaactgaggccgagttccgtcgcgtatggcggtggattggcgacaatatctacgatttgtgggactgagcgggaaggtgactgaccatggcggagtagccgcgcaagtgctgattattgcacggcgcttggcaagacttttaccgtcaccattgctgacgccagtgacgatactgctgatgaatagtgttgttcgataatgagtttgccggttggatattgcgttttgatgcaatatccaaccggcaaactatcacgaagcgtcaatccaacgtcggcgacgctgctaagacacagggttatcccagtcgctcatgtcatgatcggagttagctcgatttgcggagtgatttcatcgtcacattgaaaggggtgagacggcgctttgtgtcaatgtgcatgagacggtcgctgcgctctttcatgcatttgtcgcagatgagtgcggcgacttgtgtaccgtcgtcgcatggatcgaaaaaggtggttccgtaatgaccgtaggaagtcatttcgatggcatcaaggggcaggaatccgctgtcgttggcgctttcgacgagttgttccatcgtgcgttggtggttttcatcgacgatttcggcagttatcattttgccgcatatcaagcacacaagattaaacggtgattcatcgacgttgctcatgtcattctcccggttcaagaacctacatatctggctcgctcaggtttggccatatgagagaaccgcaccagattacaacgtggatgatttagacacgtcgcggttgctgaggctaccgggaacatcagcaaagagttgcatcttaagaaagtcccgggaactataacgttattggtgcttcaggaaaggctccggtgaagtagcaagggctgtcttttgatgattggacctctatggtgccaatgcgtccgcagatgtggttggtggtgtactgctgagagactgattcggtgcggttggaagtgtcgcttcccgcaggtgtggattctaatggaaaaatcattggctgggataaccgacttgtgctggatgaagttaatttgaccgatcagtttgtggaggcacgtaacgatgagcggggtgaagatggagttgccgtcgccatttccgcgcgatgagcagaaggcttcgctgaatccagaacgtatccgctgtgcccgtgaaacggcaggactgagcaaggtgcaattggccgaatctctcggtgtgacttcgcggacggttgccaattatgaagaagttggagcgccggtgtctcaagcagcggtactggctgatgcgttgcaggttatgccgtcgttcttttccgtgtcctctcatgctccgctaatcgaggatttatcggaaggacaggtatggtttaggtcgttgagaaaatcgacggtaaggcagcgtcgttcggcagtgggcatggtcggaatgcattgctgttcttcaaatggattgaggatcacttccggctgcctgaatgcgatttgccctttgccgatagcgccggaatgcgtccggacttggcagcgactatgctgcgcgcgattttgggatatggcgagaatccgttgcctgagatgacgagtcttgcagaagctcatggcattcgactgtttagtctaccgactgttgggcgagaggtcgatgctttcagttttatgttcgatggtgtgccgtatgtggcggtagacaccagcaagaccgcagaacgtgtccgtttcgatattgcgcatgaaattggacatctgatgatgcatgaaatggtgtctgaggatgtagcagctgccggaacgcgcgatatcgaaagtgaagctcattcgtttgccgcagatcttttgatgccgaagcgccgtgttctgggcatggtgccgactcacgcttcagtgtcgcagattttggctgcgaaacattatttcaaggtttccgcaatggctatggctcgctgggcctatgagctgggccgattgtctgaatgggaatatcggcaggcttgctcggaactgacggttcagggctacaaaaatggggagcctcgtggcctgcgtcccgaacggtcaaaggtattccacttcgtggccgatacgaatagacagaaaggcatatcggtttccacggtgagtgaggagaccgggctggttcctaaggaattgcatggattgtcgtttggaaatatttgggcggttactggtggaagtagcctgagtcagagagccgtcttgggtcgaaatgaatctgtttgagttgacatcgcaatctgggttgtgcaatgactgagtaaccccttgttctctcagagagttggttcgtccgtcattctatatttcattagttgtgttttcgttgcaatcataccattttagtgacaatccgcaatattcgttgattgccgatgatttcactgttctcgtcggtcattgtgtcccagttgtgtccagaccagcgcagatgttccccagccgaatgggaaggaacgactgaggtacatggctgttttcttaatacacacgcttaatcgacaagcggttctccagaatgagtttatgcagaagattcttgccgtgatccttgttgtcgagcgtatcgccatatctgttaatcagctttgtgaccttgagatataagtcggatccgtcataccgtgcatcagggcggtataggaacatgagcgcagttgttcccccatatagacccacatggtcgaatatggattggaagtacgaatagtcagcttcggatagagagtgcccaaagaacttgatgcaatccggtggctcgtcattgaatacatcgctgaacgcgtcgtagtgggacgtggattccaaggtgcggaatgtcttggtgaagggaattacatcctcgtcatcaattagtgcatgctgtccccgcggtccttgctccaatgcgtcgatgccgatgatgatgtcgccctgggcaagggatccgtgaatgaatcggacggaatcgagaccgggaaaatatccttcatcccgcctttggaacggtgacgtgtagttgaaggtcagaatggtgttgtgatgcttctccaagacactcgcatcactgaatgccggcattccggcgatgctctcatacaggccatcggaggaaaccgtgtactgccacggatcgtcattctgggactgctcaactattttcttcagataggagtgcagagaatgctcgaacaatgtcaattctttgcgcatgaaccgcaaataaaccgtgttcttgtgattgattgaagattgcagaaaaccgaccgtctgaacctcatcaatcatcgaagccatacgcttggcgatataggttcccagcagattgctggtatccagaacattggggttgtccagccccttcctgacccgagctaacgcctcgcgctctgtgacttgttcccggatggcatgttccacgttcgcccactcgctgtggttatgcagctttcggtcaaacagcaccatgtcccaagcgttatccatcgaatccatggacgggctgtcaccatacttgtccctgaaataatccgcatacccagttcttaagccttgcgcaaggtcgaagccattgccaagtacgatgagctggtgtttgtatctctctaaagatttctccatgctcgtctcttatcagtaggattcgggatcgcgcatatcgacttcgcgtacttctccatagatggcagcgacgtcattgaggttgatgcggaactggctacgggcatgtggcgtccatttgccattagtgagtgtggctttgtcaccggggtcgtagacggccttgccttctttgaaggcttggaggaataggccgaagctggtggagatgccgagggtgatgagcgggccgaactccacagaggtgttgccgtcctcgccctcgcgcaagtagggcacgtatgcggcgcggttgtgcttgcgctgccagtggccaagcagtttcagatatgaccatcctgcggcgaggttcctcgtgcccttctcgtagagggcgatcatgccgtttgggtcgaagtgtttcgcgtcggtgaatccttccagaaccagttcgagtttcgcgcttggtttgtcgtcttcgttctcgcgttggatgtcgccggaggtgaagtagtagctggtcgggttgccgccctcgtcggtggtgtgtatgtgcccgtatttgagtacgaagtccaccgtggacagacgacccgtttcagggagatcgggttgcggggtgaaaagcgtgaccttgtggttgtatcggcgttccaaggacttttgcttgatggccttgagctcccagacgtcgaagtctggtccggggatggcgttctcgcccacgcccagttccgcctctaaggtgagacctggtgcgttgggggcgatgtatggtttgacgatggcgccgtcgttgttgagccgccaaggggtgatcttgcggccgacgatgttcgcgagggcctgttcgagtacggagaactcatcgcgttgccgttgtgactggtagacgatcgggcacaaatgcccggcctcgaaggtttccatgctgagcacgtaccgtgccgccggggattcggcgccgactacgagtgccaccacgcggatgacctcgccagaaccgttctttacggggccgaggaacagacaacggttgacttcgtggccgcgcttcgtctcgttcaacagttccgaaggtgcttccctgcaaccgtgtaggaacccggagaagcgtacctcggggtattgcgggtagtagcagagtttcgcgtccggggcgtcgaaccggccgttcggtgtgacccattgccatgtcacgggaatctggatgaccggattgccggctttcctcttctgcgatttcgtcggcgtatatgatggcgcgcccaatggcaggaacgacaggtccgacggatcgttggcaagccatatctgctgcttggagttgttgttcgcgacgagtcgtttgacccagatgctgctcgcgccagcgttggcgagtagttcgttgacttggttgatgtcggccgtgtcgtaccactggcgggcttcattgacgtgggtatcgcacatgcaaccacgatacccacgaacaacggacattggccggcgcgacacgggccattgtcggcatcagtcttcgccggctccggcgatggccatttcgcgggccttctggatctcgtccacggacttctccgagtcatcaaggataaggtcttgatcgccttcggccatgaccttgaggatatgtgggcgcatgatgcgcgcgacctcggcgatggccggcacgaccacgctgttgccgaactggcggtaagcctgcgtgtccgacaccgggatgcgcagctcgtccgggtagcccataagccgggcgcattcacgcggcgtcagacggcggggccgttcatcgccttgggcgacgaggatttcgctgccgtccttgtgataacgggcggataaagtgcgtgacaccatgtcgggggtgacgagcccgtaaccgaacccgtgtcccaaggcttcgtgcttcttcttgtaatcctgaaggtactgccacaggcgtggggtgagcgtgtatttgtcctgtaccttgttgtgctcgaagtcgaagtatttttcaccgtcccagggcaggtagggctcggtgccgtcggtcttgtggaggatgtcggcaagtacgggctgatggtcggggtatttcagatcatcccaagtgaagtcggtcttggagcggaagccgacaatgtagatgcgctcacggtgctgcggtacgaagtgctggccgtccacgaccttccaatgcacctcgtagccaagctcgttctgcaatgcgtcaaggatgaccttgaacgtgcggccccggtcgtggctggtaaggtttttcacgttctccaacaggaacgcggcgggacgcttggcggcgatgatacgggccacgtcaaagaacagggtgccctgcgtcttatcgcggaatccggtttcacggccgagactgcgcttcttggacacgccggccagactgaacggctggcacgggaaaccggcgagcaccacgtcacagtccgggatgtcgttcgcgtccacctgtgtgatgtcgccggccatggtctccgcgaacccgtaattcgtgcgataggtgcgcgcagagaactcgttccactcgctggagaacacggcatgaccgccggccgacgcgaagccgcggcggatgccgccgatgccggcgaacaggtcgatggtgcggaagtccgtgccgtcctcgtgcgtggtaccgtaatacagctccttcagcgccggcacggatacgggcttgggctggaccttgccggtctcccaccgctccacggtcgaggtggacagccccaatgattcggccagctgccgtctggtcatgctttcacgcaacttggcgatcaatgcgttggcgtcgtcgatttcctgcggttccgaattactcatagggacaagtatatatcattctgatatgtaaaactccctttttgtacatccacgagatcgactcgctagattttggctaattgacggatatatatccgaaatgtagaatcaagacatggtcgaaacgaagagcgaacgctttcgacggcttgccgaaagccgtgggaaccggctgatcagggagatccagattctggggaacctgtccaaccggaagaactacgaatacacgcccgaggaggtctcggcgctgttcggccccatcgaggacgagctggccaaggcgcgggatcttttcgacaaggataggcccgcgggcggaaaggtaaggctgtcatgaacggcatcggatatggcttcctattcaaaccgaacggaaacgaggagcaggggccgtcgaactccggtgaggagatcttcagcgacgataccgtggcccaggccctcgcccgggaactgggacagaactccctagacgcgatcgccaaggacggcgcttggccggtgatcatggtcttcgagctccgccgcatgaaggtggcggacatccccgacgcggacaatctcaggaggcacgtgagggccgcgctcgatcggtatcctgacagcccgagactgcggaaagccgtcgccacgctcgaaggcgaatccatcgacgtgctgcgcgtgagcgattacaacacgaagggccttgccggcagcgagtctatcgccgacagcggttccgtgctcaccgccctgacccgagggtccggtgtgagcgtcggcaagaccgacgccggtggctcgttcggcatcggcaagtcggtcggtatcctctcctccctcgtgcgcaccgagttctggaccacacgcacgccgggatccgatgagaccgtgttcgccggatgcacgcagctgacgacccaccggacaccgggctcccgcgatccgcgccagctgctgggttttatgggaacgtatacgatgatctccgacacgcaggactaccactacctacgcgaccccgagccattgggacctttcacgcaaagaaccgaaccgggcacggacgtgtacatcgtcggatactcggccgcgccggacgacccgggactcgaacaggtcagggacgcgatgatcgacaacttcatggcggccatcatgcgcggtcatctcgtcgtcgaaggcatgaccgacaaaggccggtggcgcctcgcgtcggacaatctcaagcacgccatcgactcgataccggacccggagcgcaggaccgtcatgcaggcgttccacaacgcccttctccagacgcccatcgtcaggaaggattcacggctcggggagatgaagctgtacatcaacgtcgacgacgccctgccgcgcaaactgaacacggtcgtcatgcgcaaacccctgatgaaggtgcacacctacaccaacacatccatcgccgccaaatacgcggccgtactggaatgctcctcacccgagggtaaccgcatcctcaggggaatggaaccggtgcggcacgacgactggcaggcggcacgcgacaaggagaacggcaaggccgtactgcgttctattaagaaattcatcctcgaggaactgcgcagcagggtccgacgcgagctcggcgacgaaatcaccatcaaggggctcaacacccttctaccggccgaactgcagattgacggcaaccccgaccgccacggggtccgtcccaccaacggtccgggaagcgaacgcgaatccgcctccctgcagggacgcgagaccgatcccgaaccggtctccaacaccggcggcaaatccgtgagcatcgccctgacgaaacccgcggtcgcggacgacagtggcgagagcgtgtcgaccggacggcaacgcggcggggagacaaaacgcggcaagcacgccgccggcatttccgcgttgggccgttccggcgacggggattccgtcatcgacggcggcagcctgtccatgcgctactggttcgacgcgagaagcggtgactacatcctcgtgctgcgttccaggaccggagggacggaaaagggcgccctgcatctcacggcggcgctcgacggcgcgttcggcaactacacgccgcccgtcgaggaggccgcggacatcagcggcaccgccccgcgccggctcaacgtcaaggaaggagccatatccaacgtgaaggtcacaggcaaacatcccacccgtctccgggtgcgcatcaagggcggcatcaggctccagttgggggtgaagtgacatggccacggcatcgttcccgatccccgttctcggcaatggccagggcgacgaacgcgacgtcgcctccgaatggcgggtcggcaacttcaccttcgcatcgggcaccgaggacgtcgtcatccgcttccgggtgttccacgacgaccccgacctgaagcggctcctcgacgaaggatccgtacgggtcatggccaggtggaagtgctcgtccacgatcttctccggctatctggatctggtgaaggacaccccgcacgcggacggcgccacctaccgttcctcgctcgaccaacgggacgtgctcggacccgtcacggtcagcgtgttcgcggtcgcgggccgccccatctcggatttccggtggtctcggcaacacgaggactacggcgatgagacgttcgacgtacgcacgggagacctgctgagcgtccccacggacttcacgttcgacccggccaagctctacgacccgcagaacccgcccctcaactcgatcttcaagatcgtcaaggacgaccgggccaaggccaagggagtcaaggtcagctacatcgaggacgagcagatcatcatcaccctgcccaagaccctgttcgaccgcatgcagctgatcgactccgcgaacctcaagctcacggccctcgtcctgcccgtgctggtcgacgccatcgccttcatccgcgcgaacgaaagccaaggcgacggcgaggacctcacggaccgccaatggtgcaggaccatcaaacgactcatggacgcgaacgacctgaacgacgacgaccgtcccctcgccatcgcccaacgactgctcgccaaccccatcgacggatacgcggccgacgtgtacgcccagcaggacaacgaggaggtgcaggcatgaacgacctgacatgcgcgaaacagttcaagcgggacagcgtgagcctgatcctgaccaaactggactccgccaagaccccggacgacttcctcgcccagatcgacgagttgtcgaccgaccccgacctcctgctcgacagggatccgatcgatctcgaggagccgctgtccgtcgaaagttcggactcggacaacgcgagaatcctcttcgaggcggtcggccagatcgaccgcgtcaacgccgcactgccgggactgtggacttacatggcgttcaacacctgccgccggtacatgaccgaccgctggcccctggacggcgtacgcaactggaagaacagagcgaagcaacgctggatcctgccgaccacacccagccgtggccgtctgatccggcacggcatcgcacgcctgtggtgggccgccgaactcacctacgacggttcgctcgaccatgcgttgagcaaggcgaacgatgaccggtacgcgtacacgaagtgggtgttcggcgtcgagaaccgcctgctgcagctgttcgatcggtccgtaggcgagaacccggacgtcatgtgggccgtcatggactccatgcaacgcggaaacagcaacacgtccgacgccatagccgacgtcagccgcgacgtgctactggagatgtccaccagacaactcggtcttctaccaccggacgagctggcaaaggccatcgactcaatacgcgacagctcggatgacggacaaccgaaacagtaaacgaaaatgccggtgcacgtcatccttcaggatggtgtacaccggcacaaacgaatcatgcctgagtctcgtcttttctgagcttgccgctgaacgcttggttgacgagcgtgtacacggcctgtgcgacgccgatgacaccggtgaggacgatgccccatccgtagccgtggaagccgttggtggcggcgatggcgatgacgccgagcaggacactcacgccgagggacgtcaggcccacgtagtcggcggggatgtacttcttgaacgtctgaatcagcgcaggcgcgacgagggcgacgatgccggtggcaagggtggttgctgcggaaatatccatgagtgttccttccagataggtggattgacgaaaggccccgacacgatgccgggaccatagttgggtgatggtcagtagcggagctgctgaccgggatagatcaggttcgggttggtaagaccgttgagctgagcgacacgctgccaaccggaagcgccgaagatcccgctcagcgtctccccgctcctgacgatatgcatgtggacggccgtggtggatccgttgccggagccggcgcctcggtaggtgacgacgttgcccggatagatcagattcacgttgccggaaggcacgctccacgcggacaccggccacagtcccgtgcgggcggcgatgccggatatcgtgtcgccgctacggacggttgcggtgttggagttggagtggaagatccgccgttggggttggcgtacttgttccactgcgcggtggtaccgcggaagtagttcagatccaatgggccggcgtatccggggatgcggccgttgctggtgtactggcgcatggcctcgccgtatcgcccgtagttccacggtctcgtctggtatccggtggcgttgttgttggcgtactgcgcgacccataggccgcagtggctgcgcacgtcggctgggatctggtacaggtaggcggcggacgtgtagacgagcggccatacgccggtcctcgcgtggacacggttgacgaagacgcgcacccagttggagttgccccatgcggcgttctgatagccctcccaatcgagcacgaggaccgctgtgccgatgtaggggcggacggtgttgacgaagtagtcggcttcggcggtcgcgttgccgccgcccggtaatggtagaagccgaggctcttgccccgctgccgcacgcagttggcctggctggtcatgtacccgttggtgaagccggtgccctgcgtggccttgacgacggcgaagtcgtagtcggcggtgcacgtgacgctcggagactgcacggccggatacgttgatgccgcgcatgtcggccatcgcgctgggcatgacggtgagcatggcgagcagcagcgccattatggcgagtagtcggtgtctggtcttggacatgcctttgtcctctctttatgaggaaagccccaatgcgatggcgttgcatggggcttcctggtttgctgactaatcagtctgttctgttgttcttcagttatgcggtgcgtggtgtggtcggtagttccagtcgtcggtgtcgagccggtgccggtaatcgtcttcgagctgctggcagcgcacgtggccgggcccgttaccgccacgctccgtgtatgccttgccggcgtcgagctggtgttcgtgccgcatccgactcgtggtcggcaggaacagggattgccggtagatctccagttccagtcggcggatggccgcggactcggctatcgcctgttcaagattccgacgctggccgatacggcgaagcaaccatgagacgagcgaggtgacggcgccgctaccgatgaccgcgcacaggacgagaatcagcggatgcgtagtggtaaggctcgtggtcatcccatcgcatgaacgatataggttccgattggaatggttacgctttccttcgcggtccaggtgatttcggtggctccggctgctattgcggcgcgtgtggcgctgatttgaatttccttctggtagtcggcagctgcgatgggtatgtaggtaatgctgcagaagccatgctcattcgcggatatcgcgggcacatccccttccaccgtgattgagaacgtctccccggcaggaatcgtgtagttgctgcggacctgcgcgagtccgagttcaagcgcagtgttcttgatatcagagaccatcatatttaccgcttttcgggagatgcttccgcatagcacgaagtatgagcggaatcctgtcgtccatgggatgtttaattgtccgctaaaaagtcgtggctgttggacggggtgctggatacggtcgagaactgtgccggatgtatgccggaacgcatacccccgtctccctacaacgcaaacgccagctcttcccgcaacgcagtacgattcggataacgctcaacaatctcgtgtgccagcacacgggtctcctcatcgccgaacactgcggcgaaacgacgtagctgtttggcgatctgctggtatgtggtgcggcgcgccgtcaatgtattgtcgacgccacgttccaccgtaaaccggaacacgggcgcgcccatggtgccgtatggcatcgcttcgaggattatcgattttgccgattcggggtgttcgatggcgatggtgcgtagcaatggcagcggcgggtaatctacgatgggacaataggtcagggccgcgtccgaaagccgctcatccacgatgagcttctcgtaagcgggattgcgccagctgttgtggcgctgtgtgccgcctttggtggtcatttccggctgatacttgatgcggtcgatgatgtttcgtacgcaatctttggccagttcaatagccacgtcgtgccattcttccgcgctgagaccgccgtatatgcgcaacagattgcgcagcttacccacgtaatgggtgtcggatttgtcgttgcagaaaagaagtcggtctcgccatcgacctcgttcgtatcctcgtcgtcctcgtcgctttcttcgctctcttcgttgaacgagtattccagattacgcgttatcgcgttctcgattacgtcataggcccacatgcgtttgtcgtcatattgggcgaaggcgagcgcgctggaaatcagcaacatgttgttcaatggttcgcattgccgcatgttcttgtcattcgctgcctgtgcaatggtgttcaatgctttgccggcggtaggggagtcggcgaattccgccacattctccatatagcatcgcacgcgcatcgccagaccgtccataagcgtgagcaaaggctcggaatcatcatcgttttcggacgagagcagaagcgcgtggacttcgtgtatgcacaatcgtaagttttcgcatgcgcttgcgtaatcactggattgcagggcattgcccgcgatagcctgcacggttttgatgaattcagtgtaatcgaaggatttgctatatgcatttcctggcttattgacatgaataatgaagcgttcatggcatcggtggattgcgtcggagagcatggcttgcgcgtcggtgcgcgaaatcagcggtcgttcttcgcttggttgggcgcggaaagtatctgcggcttcgcgcagttgggtggactacaggaacagcagatgaccgttgccttgctctgcacgagcgttgcacttacaaattgaatccgggcgtatctataccgagacaagagacaaagatgcaacactgggtaatgcatgacgatttgtgaggggcgactcctggaattccacatccgataggagagcaaatcgttttaaagagcatacagtgctggggctgtcctggaagggagtccctcaccatcagctagtaatccgcgttggagcaatgcaccaatatatggtagccatgccatagggaacggtggttttgtcccgagccatcaggtttgggacaaaaccaccgtttattcggaggaagaggaaggaaacgtttagatcaatccggaaaggccatggtctgcaccattcctcgcaaagaccggaagcacatcacgaggagcttctactcgtacacgcctgcctccgtcatagatggtaccggtatgcagctcagtccatttgacgttgccatcatcgggcaaatacacctctctgctgacggcgttctgttgggttacgggtgcaatcagcaggtcaggaccgaacatgtactcatcggtaattgaatgcgcggcttcgtccttggggaattcgaagaacagtcctcgcacgagcggctggccatctacgtgtgcctgttcgaagagttcccggacatatggccggatatgctctcggatgttgatgtacttgatcatgatgcgttcgatctcgtcgccatatgaccatggttcattatccgcaccggattgaagtcttggtgagccatccgccgcgtaaatatgctctttaccggttttcgtatgcaggctacggtcaccatgattgcgcatgaccggaaggaagcatgagaactggcaccaacgtgcaagcaagtctcggaattctgggctatcgatgacgccactgtggaatcctcccatatccgtcgtgaaccagggtatgccagccatacccatgttgatagcacaggtaatctgggcacgcaggtcctggaatgtggagccgacatcaccggaccatacaagtgctccataacgttgggtgccggcccatgcgcagcgtgtgaggttgacgatgtcgccatcgcgtccgattctctgctgtccctcatagaagccgcggttgtattcgctagggtataggttgccgattttttcgacatcgcctcgataatatgagtagttttcataggagtacgtggaccattcgggttctgcctcatcgagccagaaggcatcaatgccgttggctacatagttctggctgcatttgttccacacgtagtcacgtgcccgtggattcgtggcatcgtagaactggcatggctctacaaacatcatgcccacgtccactccgtggcgcgctttggccagcaggttcctctgcttcatgtcgctgtagttttcggatttgagactgacctgaggccagacagacaccatgaccttgatgcccatgtcatggagttcctcgcacatggacttcggatcgggccagaattccgtttcgaaccgaaagtcgcccatgtgaggccagtggaagaaatctatgacgatcagatctagagggatgttcctctccttgaatcctcgggcgacgtccagcacctgctgctggttccaataacggagtttgcattgccagaatcccaaaccccattcaggcatggacggggcatgccccgtcgcgatagcatactgggattcaatctgtttgtagtccgcgcctgctgtgacccaataatccagtccatcggtcgtgtttgctgtccatgtcatcgtatccttggcgaaggaagccgatcctattgccggattgttccataggaatccgtatcccttggatgatacgacgaatggtacagaggcttgtgagttgcggtgggcaagttcgaagtcatgtcctttaagatccacgatagcctgctggtactcgcccatgccatatagatgttcgctttcggatacggtgaatgaagccttcaccctataagatccacctggccggctgaggaaggaacgggattgcaatagcagtgatccgcctcgctcggtttcggcgaatagcgttgcgccttcttggttcttaaaggtaaggcggcagtcgcaccgaccctcttccggttgattgaaggctttcgcaatcacggtaatctggccattggtcagctccgccgtgtcctcatccttccgtataaccgctttggaggattcagcaggaggcaacagcacccaatcttcatccaatcgctctctcatcactgatgaccggactcggacactgttttctccccaagcttcgatgcgaagatactccccatcgccggtccacataattgcgttctcagtgatggagaaacctgaatatttagcgtcattgcacatgttgtactccaatttgtttggtgaaaaaccgaattatttgccgctgccagcagcaagaccttcgatgaaacgcttctggaagaagatgtacaccacgagcactggcacgattgccactgtcgtcgcggcgaacaggccgccatagtcggtgccgtactgtccgttgaagagcttcagcccgactgcaaggacctgcttctcctgggtgttgatcatgaggaatggccacagatagtcttcccaattccacaggaatacgaagatgccgattgcggatagtgcattccggctcaatgggagcactatctggtggaagattcggaagtcaccagcaccgtcaactttggcggcttcgatgatttcgtcgggaatgtcgtccatggactgtttcaacatgaatacgccgaatccgtttaccaagccgggcagaataagagcccagtaggagtccagcaggccgaagttcaccatcatttcgtattgagggatgatggtcacggcccagggaatcatcatggtgctcagaatcatgccgaacaggaacttgcgccccctgtatcgcagcttggaaaagatgtatccgccgacggcgctcgtataaagcacgatgcctgttttcacgacggatatgaacagggagttcgagaagaacctcatgaagttgaacgtggtctggatgttcctgtagttgtccaacgtagagggtttcgggaacagattgtcgctgatacttacgatgtcgccattggtcgcaaacgaggaaatgaacatccaaacgaatgggatgaccgtcaccaaggcgaacaggataaggatgatgttgaatgcgattttcgccactgtgtttttcatcgtcaatccttttccgaggagacgcgcaggctgaggaaggacagtatgcctgttatcaggaacaagatgacggacattgcgcttgcggtgccgaagtcgtagttgacgaatgcccggctatagattagatagctgattgtgtatgttttcgtgccgggaccaccgtccgtcatcatgaggatttgcacgtaagcctggaaatacgtaatcaatgatgtgatgaacacgaacacggtcgtcggacggataagcggaagcgttatgttccagaatttctgccaactatctgcgccgtcgatctgggcggcttccaagatgtccttgggaatgttgatcagtgccgccatgtaaagcactgtcgcatatccgaaatccttccatgcggtcatgatgatgatcgcgggcattgcccatttcggatcctgcagccaattgacgtggatgccgaagaacttgtcgatgagaccaaattgcggatcgtacatccagacccataccagcgagaccgctacgagcggagtgatggtcggcatgtagaacagggcacggaagaatgtctttgccttggccaattgggataccagcatcagggcgatgcccaatccgagaacgatacgtaggatgaccgcaaagaacgagaagtagaaggtgttccagatcgactgccagaataatggatccgacaaaatcgtcttgaagttctccaatccgttccactcatacactcccgtcatcggattccagtcgtgcatgcttccggcaaacgctttgaaaatcggataggcgaggaacaccatgaaattggcgacgaagaagaagatcgcgatattgcggaacgatagagctcgctgtaattcggctcgaactttcatgtgaatgctcttttctgcccggtgaagatgattgcggcgcccagatataaaagtccgaacgccgcaatcatcgaccgatggagttactacttgagttcgtcgtagtacttgtattgggattccgcggattcgaagctgctcttctccagatcgctttgcatggtcttctggccttccgcaacggcgtccttgacggacatgccattgttgaacacgttctggaacaccttcttcgcggtgttctcgacagtggccggcatggcgccgggccagatcagacggtccacacggggcttaatcaaatcgaagatagccatcttcgcaaggtcattgtcgtcggcaaggctgttcttcgcggggaacgagttcatgttttcgctgacggtctttacatacgtatcgtccgcaagcaggaacttgacgatatcctgcgcgactgccttctgatcatcgctggcgttcttgttgatgccgatggtggattctccgttgtatcggtcataggcgaatggggtgtcctccgaccatgtcggcgtcgcgaacatgccatagtccacgttcttgtacttggtcttcaaatcgccctcgaagtatccccaacggtacagcatagccgtctggccattgccgaagctcttgtcgccatccgtaccgaaatcggtagagcagaccttgtccttctgatagagatccaccatccactggaggttctcctcggtggtcttgttgtcgtagttggcgctcttgccatccttagcgaacaggagttcgcccttttgataattcatgccttcgaaggccgagctgtagaatgcgtcgccattcatattgaagccacattgcgttatcgtgtccccgtccttcttggtgagtttgatggcgacatcgcggaattcatcccatgtggtgggaatatcatcctcggtgagaccggcttccttccatagagtcttgttgtagtagatgtttccggtattgattgccgcgtcgatgtatccgaccttgccatctaccacgtgggcctcgacgccgacgtaatccttttcaaggtcagcgacgggaatgtcgtatggttcgaaatacggacgcaggacttcatcgtaggaattgtgcacaccgaagatggctggtccgttcttgcccttcatcagcatcgggagtttcgtgaaatagtcctcccatgcaacgtttacgattttgatggtgacatttggatggatcttcttgtattcctcaaaggcggcgaccgcgccgtcggtgtccggataccacgtgtagtactggagcgtgatgggcttgccctcgttcacaagatgattgggatcgtatgtgacattgtcgccgaccacggcaagccccttatcggccttggtgtcggtaacacctccgctgttcgtggacccgcaagcgccaagcaacgccatcgatgcgaccaacattccagcccatgcagtacgaatatatgacctcttcatggtttcctcaattcctttgcaacctcatcgttgaattgtgaaccgaatgccgatacagccgttgtatcgttagttaaccggttcaacaaaatgatatcaattgcactgagagttggcaatacggtgtgttgtaccggttcacctacttcgctcaaaccactacgtcttgaatggcgtcctactcggatacgggaggcggttatcctgcaaagggcaccgcaagagggaacgtcatcagctgatcgctcaggcgctgctcgggcgtctctatcttggtgacgagggcatgaatgaccgtttcggccagcatattcacgtaagtgtcgattgatacaaacggaaggtggaattcatccgaaatgtattttgcgatgactcccaccacgtaataatcatcggggaccttcaggcccatagacggcagtattcctgcagcggcgatattggccgcctcgttatggaatacgatcgacccggcttcaggatgggtgaggatgctgtcccgtatcagtgcggacgagtcggaatcgtcgtcatcgggcatgacgatgtcgactttcatgccgacgctggcggcttccagcagaaaggcgtcacggaatcgtatcgcgaaacccagcctgttcctgaacaccttctttgactggaggaagagaatcgtttcccttatgccacgctccgccagatgggagacgatatgagccgcctcgctttcatagtcggagtcaatcatcgtcagaccatgtgggtaatcggtgtagccgaacaggacggccggtatccctgcgtcgaccgccgcttcgatgcgtttgtcgtcctctctgacgtccatgatgatcacgccgtccacacgcttggactcggctatatcccgtaaagtgagcagcccatcagaatcattgatgaacattagcgagtagccgtatttcgcagcgtaatgggacaaagcgaacatgtgaaggccggacgaaagcgccagatatggtccctgctgcggccatgagctgacagccaacgtcatggttcttgccgtcgacagggccctcgcggcatgattaaccttgtaccccagacgatcgatagtcttccggactttctcaaccgtgcccttcgaaatcctaggattgccggagaggacatacgacaccgtagccttggacacccctgcggctttagccacatcgtttatagtcaccatgatcggaacctttgctacgggtgaagtctgcactgacatatcccatattaggggatatgtcagttcacgacaggatgcccggattcaatttgtaagtgcaacacccgtctttgggtggcttgtcttcgagagtaccttgccgagctctcgataccaaacctcgttgggcgtttcccggtccaggaccttcatgggggtgtcgttgatctcgtccacga

SEQ ID NO: 131 - DNA, 6754 bp, Unknown
  R206_24m  MAG No. k141_37766
taattgagcagttgcatggctttgcgcacacgttcgcgcatgtcatcagacacgtacccgttgccgttcaccaccagcgagacggtgctcagagacaccccggccttcttcgccacatcgcgcatgccgaccatgatcgcaccttccccgtcatcactgttctatcgttgtatgctcacgtgcttaccacgaaatattacattcatttacattctctcgaacctgttcgacagtccggtgtgtatatcgcttgacggggacacccctaactttatttccatcatgtgattttcatgatgcccccttgaaatcacattcatgggccacttttgcgctgcattcgatactgcatcgatggaagatacatcatgcacaacatcttgcaaaacatcacaattacgtacaacgaaagaaacggcgcaaagcttgcgatatccacgctcactttgcgccgtcttcttgtattgataatggcctacattgcgatcatcgcgatcagtcagtcggaacgtcaccagactgtgtgtggtcaaagaccggcttgttgtctttgtcaaaggtgtagacgccgatattcgcagaactcggatcattgttcttgttgaacggtccaatgccggtctggccctgatactggatatccttgccatccttcagcagggcgaggcaggccttgtaggaatcgcacttctcgccgccgtcagcaccggagacggccgccatgttggcttgaatggtcttgccgtcagcgctgccgcccttctgcgcggcgagggctgcgaggatgatgccgtcgtatgtttcagcgccataggtggtggtgtttttcagatccacaccggtggattcaagacgcttgacgaagtcgtcggacgggttgacgccaggaatggtgcctttcgagccttccagcaggcctgcgtcgagttcgctcgaatagtcggaggtgttgccatccacgaagtacagtttcttggtgtcaaccccggcggaagcgagcgctttgagcaacggcttggtctggtcgaaggcgatgacgagcgtcgcgtcggggttggacgccttgatggcggtggcgattgaggagaagttcgtctcggtcggatcgaaggtgtccttttcgccgtagacgatgtcgacgcccgccgcggaagcggttttgacgactgtgtcgcgcagaccggtgccgtattcgtcgttgaagaccgcgatggcaagcttctgcacgccatcctgggcgatcagattacccataaccgcaccctgcacagtatcaggagcgaccgtgcggaagaagtagtcggacagaccggagaagccggccgaagtggcacccatcgacagcatcggaatgttctgcgaagtaatggacttgtatgtgttcttcaccacggagctggaagcggggccaataatgaacgacggattcttgctcaacaccgactgagccgcggacgtgttctggtcggcatggtcggcgtcggacgtatcggcgtccacggtggtgaccttgctgtcaagtacgccaccggcgtcattgatgtctttgactgccagcttttcggcggccagttcaggcggtgccagataggccagggatcctgtttccggccacagaccgccaagcacgaacttggtggttttggcaccggaatcggatgcgtcggagctggagcttccggaaccggagccagaaccacagccggcgagcgccatgaccgcggcggccactactgcggtggcggtgatggacagctttttcatgcccttcatgtttgtcttcttcatatgaatcaccatttcctctcttggctccgctgattgccgaacccttggtgacgattgccgagataggttgctcgaacatcttgaggtgcactataggctgtgaggaaaccgaacgtgtatgcgtgaagttaaccggagatgaagtatgaaaactgttggaaacacaaggatttgtgtcatttttcaggcatggcgaaaccgccggcgggggtattccgccccaccggcggaaacttgattcagagccagaaattccggctcgtagggggtcgcgtaacgtgtacggagaccgacatccgagttctaaggcactctaaagcacacgaaggcgcttcgagcggagaggatgacgggccttatacgctccgctctgcgatttaccggggctacctgccctcttcctggacctcctcttccagattgcccaagtacaaggagacaaccttcggatcattcatcaaatcacggcccttgccggagtaggcgttgcgaccttggtcgagcacatagccacggtcgcagatctgcaggcaacggcgggcgttctgttcgacaataaccacggagacgccggccttgttgacctggcgcacgcggatgaaggtttcgtcctgaagcattggcgacaggcccgcggaaggctcgtccagcaggaggactgacggcttcatcatcagggcccgggccatggccaccatctggcgttcgcctccggaaagctggccggcaagctggttcttgcgctgaccgagcttggggaagatggagcatacgtagtcgaaccgctcctcgaacagcttcggcgcctggaaagcgcccatatgcatgttttccgcgatggtcaggctggggaagacgttttcagtctgcggcacgaagccaacgcctcgggacacgagcttgtcggcacgcagattggtgatgtcctcgcccttgagcagaagcttgccggaatgaatatgcaccaggccgaacagcgacttcagcagcgtggactttccggcaccattcgggccgatgatgccgacgatctcaccttcatggagggtcagggaagcgccattgaggatgttcacgccgggaatgtatccggccacaaggtccaccgcgtcaagcagtggctcaccttccggctcacccacatgaatctgcgcgcgggtcagcggcttgtctccgccaccttggatgtccgattcaccagaatcggacacatggggtaccgagaccgcaccagacactccagccgcacttgccacacttgcgttgtcgctcatttcaggcctccttcaaatcttccagcacggagtcgtcacccaagtcgatattcgcatgggctcccagatacgcgtcgatcacggccggatcgttcatcacgctcttcggctgaccttcggccacgatcttgccttcagccataacagtcacccaatcggcgatatgacgcaccatgttgatgtcatgctccacaaacagcaccgtggtgccctcttcacgcaacgccataatgtggtcgagcaatgactgcttcagcgcaggattcacacccgccatcggctcatccagcatgaccaactgcgggtcggacatcaacgcacgcgccatttccaataacttgcgctgaccaccagaaagcgcacccgcataatcatccttctttttgatcagcagaaaacgttccagcaatgcttccgccttctcaatattcgctttctcctgcttcttccacatgccggggaacagcgcgcggaacataccttcaccaggctgcacgggagcgccgagcagcatgttgtcaagcacggtcaaccggctcatcaccttggtcaactggaaggtgcggaccatgcccatgcgcgccaccttttcaggctgcacgtgggccatgtccttgccgtcgaactgccaagtgccggtgttcggcatatcgaaaccagtcatcagattgaagaacgtggttttgccggcgccgttcggtccgatcaacgcagtgatgccatgcctttcgatttcgaaatggctcacgtccacggcggtcatgccgccgaacttgcgggtcacgtcatcggcgatcagaatcggatcgggcttgtgcacacccggcttgttctccacaaatttcaaatcctcggtgactttgtcacggtaggccgtggaaatgagggtctcgccttccggcgctttggtggcccatttggtcaggtcatggaacggcactcccggctgcacgccagatggctgctgcgcgccggtggtcggggtattcgttgtatcaggcatggaaagccaactcctttcggtcgcccaacaggccttggggtctgaatatcaccagacacatcagcgccacgccgacgatcacccagccgagggcttcgatctgattggaggagatcagggtttcgggaacggtgttgcgcataacctccttgacgaaggtgagcagcacccacagcacgcaggagccgagcacaggaccgagaatcgtggccgcgccgcccagcagcagaatcgtccacacgtagaaggtgacggtacggccgagcgaatcgggctgtacggagcgcggcaggacgaagatgatgccggccatcgcaccgaacaatccgcccaaaatcaacgattccattttgtatttcgtaaccggcttgccaagcgaacgaatcgcattctcatcctcacgaatgcccttaagcatacggccccacggcgagtggaaccatcgccagcacaggaacgcagcgatcgcaaccaaaatccaagccacgatacgcagccaccaggaattcgcgatgttgttgctgtacgtccacagcaggaacgtggtcgagccgtcgggcagtggggaaagcgcttcgaacttttcagtgaaatcctgcggcgagatgcccgcggaaccgccggtgaagttcgtcatggctgtggaacggccgacgatgcggatgatttccgcggccgccaacgtgaccatggccagatagtcgggcccaagcttcagcgtcggaatgccgagcagcagcgcgtagatgacggcgagcgcgagcgccgcacagaccgaggcgaacaggttgcagcccatcgactgcgtgatggcgaatccgtaggcgccgaggagcatgaagcccgcctggcccatgttcatcaggccggtcatgccgaagtgaatgttcaaaccgatggcggcgagaacgtatgccgccgtggtgggggcgatcagctcgcccgccgcgttggagatgattgtcatgaagtccatgaatcagcccaccctttgctgcttgccgaagatgccctgcgggcgcaccagcagaacgatgatgaggattgccagcgcgctggcgtaacgcatgtcgttggggatgacgagcgagctcatatccgccacgatgccgatgaccaacgagccgataagagcgccgttggcggtgccgaggccgccaagcgtcaccgcggcgaacatcagcaggatcagggtcgcaccggtgttccaagagatgccgttgaggtatacgccgaggagcacgccggatagggcggccatggcgcacgagagaatccataccacgcggaccacctgatccacgttgatgccggacgctgcggccagtgccgcgttgtcggaaacggctcgcgtggcgcggccgagccgcgtcttgtagaggaacagtgtgacgcccacgatcacgcagatggcgatgagcgcggacagcagcgtcggcatgtccgtggtgatcgggccgatttggaagctgttcggcacggatttgacgatacccttaatgtcaccgccgaagaagaactggaacgtgtactgcaacgccatggacaggccgatggtcacgatcatctgttgcatggtgccgacgtggcggcggcgcagcggaccccatacgatctcgttttggatgaagccggtcagcgcgccgatgatcacggcgaagatggcggaagccacgagcggcatgtgcagcatctgcgtgcccacgaaggccatcaggccgccgagcgtgacctgttctccatgggagaaggactgcagtccggtagtgccatacacgaggttcatacccacggacatcaggcccagcatcagaccgaagataatgccggaatacagttgctgccagatacgtttgccgatattggagccaccttttttggctgacgatgctgcggcgtccgccgatccggctgcatccgccgtcccctgcttgctgtccgccgattcggccgcgccgttgccagcggtatcgtcggcctgatcgaagcggatgacgccgcgctgcttgtcgaagctggctttcttgatggtgaccgtcgcactgctcgacttcaggccatgctctttcgcaacggcatcgtcaatcgtgacggtgtagtcgtcatcatcggcaacggaaaacgcccacttgccatcggctgcggttgtggtctccgccgtagccttgccggacaacttgacggtggcgccggcgatcggctgtttgccggcatcctgcagaatgccgttgacgcaaccgttgtcggatgtcggattgcattcatccacggcttgagcggtgccggctgcggacgcaatggcgggagggagtacgaaaagcatcgagagaacggcaaaaatcgaacatagcattgcgattcccggtcgacgatgccgtgtgaaatacgttacggctgtcattggtttttcctctcttattgttttcacaacgtaggagaggaaacagcttgcgcggttgcgctcagatttctttcacgttactcagcgaccgtccgtgtaacgtgaaaattacgccggattggcaagcagcgcaatgccgaaaccggcggccacgcaaatgagaggcaccgcgacggttgctattccatagcccagagccagcgtaaaacgacgctggcgaatcaatgaaaccacttcgttgagcgccgtggagaatgttgagaaaccaccgagaaatccgacaacgaa

SEQ ID NO: 132 - DNA, 24685 bp, Unknown
  R206_24m  MAG No. k141_39227
agaactcgatgaacatggcgacttcaccgtctatatcgaagccgccgccaacccattcgtcgaaggccccaccccgttctcacccaccgaactcggcgaagaggccaccggcacctgtgacttcccatacacactgagtcgtatggacgtcaccatcttcaacgaagacgtgttcgcctactacatggatctggaaaccgtctcctcgctgattcgtgagctcaaggacgacgacccacgctactggcagctcgccaaagcactgcaacgctccctgaacatctacgatgaacgcgacttggaaaccgtgtcggcagcccgtgcggcgctcgccggcgtactcgccgaaccggccgcctccagcgcaatcaaacacatcgccatcggccacgcgcatatcgactccgcatggctgtggccggtgcgcgagacccgccgcaaggtggcccgtaccgtatccaacgtgctggctttgatggacgaagacccggacttcacgtatgcgatgagttccgcccaacagtacgcatggctggaagaggagcatcccgacctgttcgcacgaatgaagcggcgcatcgaagagggccgcttcatcccggtcggcggcatgtgggtggaatccgacaacatgattccttccggcgaatcattggtgcggcagatcacgttcggccgccgatatttcaaggagcatctcggcgtcgcgccgcgcggcatctggctaccggacagtttcggctacaccggctcttggccgcagatcgcccgccgtgcaggattcgactggttcctcacgcagaagatctcgtggaacgacaccaccaagttcccgcaccactcgttcatgtgggagggcatcgatggcacgcgtattctcacgcacttcccgccctcggatacctactgctcgtggatgagcatgcacgagctgatgtattcgcagcgcaacttcctggacaaggacctctcccgtaacgcgattctgctgtacggcttcggcgatggcggtggcggccccacccgtgagatgaccgcgcgcatccgccgcgaccatgatctcgccggcgcgccgaagatcgaattcggtactcccgaccaactgttcgaccgcgtgcgtaaggatatcgtcgacgatgcgcaaggggagaccccggtgttcaagggcgaactgtaccttgaactgcaccgtgccaccctcaccgcccagcaggacatgaagcgcggctgccgccaggaggagtcgatgctgcgcgtcaccgaatacctgtgcgccgcggcccgcatcaagaacccggactatgtctatccgcgcgaagagctggaccgtatttggaaaacgctgctcctgaaccagttccacgacattctgcccggttcggccatcgcatgggtacaccgtcaggcgcggaccgaatacgcgcgtgacatcgctcggctgaacgagatcgcccttgaagccgggcgcgcgatcgcagccgtggaacccgatgacgcaaccataaccgacgccgtaatcgccccatattcccgccaagcctgtgagacgtgggtggtacgcccggcttcgagccgagccgaagcgggaaccgcatccatggctcgggtcgccgttacccatgacggcgatacgattgtgctcgacaacggccaactgcacgtgcgcattgaagccgacggcaccgtttcgtcaatcgtcgatcagcgaaccaatcgtgaactggtgcccgccggcacccgactgggccgctacgaaatgctcaaagacgaacccttccactgggacgcctgggatattcaacgcgatgcgttcctcaccgccaacgcgctcagcgaggcatcgattgcaagcgtggacgaaaccgccaacggtggggccgtcgtgcatgctgtcactcgcgcgaagggcgttgaaattcgtacgggcattgccttaaggccgggctccgccacactggacttcaccgccgatgtggactggcatgccgtcgaacagttcctcaaagtggatatgccggtcaccgtgcaagcgctgaacgcgcaatacgaatgccaatacggtctggtcgaacgccccatcaacaagaacacgcgcagcgatgatgccaaattcgaaagctgcacgcaccgcttcgtgcggatcgccgacgccgactatgccgccgctgtggtcaacgcctccacctacggctccgacgtcagccccatccacgccgatgcggcacatggcaccggccgcggcaccatggtgcggctctcgctgctgtccgcaccgctgtaccccgacccacgcaccgaccaaggcgcacactccttcgcgtggtctctggtcgctgacgccgatatgaatgcggtgctggacgaagcggcgcgacttaacagccccgtaataggggagttgcctgatatggcgccgctggtctcgctcgccgacgccaccggcgtcatcgtattggactggatcaagctcgccgatgacggttccagcgatctgatcgtgcgcctgtacgaggccgccggcggcaatgccacggccacactgcgccttgacgccgctctctccgatgccaaggccagcgtgcaggaggtgaatctcatggaggagccggagctggatgccgaactgccgcgcgcgctcgccggtgacgaaccaatgcctgccgacggtgcgatcgtttcgttggcgccattccagctcgccacgctgcgtattcgccgataagggatattgggcctaggctcgatattttgggtcgcgcccaaccgtaacggaaccggaacagaccggctctgccatacggttgggcgcggcccattattgtatgagaagagggagagcgatcccgttgggcaaatatcaatgcgacacgcgacgatgaattcgttgcgtgcatgtttcgattgtgttatgtttttactaaaccgatttagttaacaggttcgcgactggccggaagctaaaacggtttagtctcagcgatgagaactgaataaaggttgtgataccacgtcaatcaccgcgacgggtgactgtgctggagcacaacgattaggtttctccgtccacagcagggcgggatgaaaaaggaatcaaaaggaaaggaaaacatcatgttttctatgaagaagatcctcgccatcgccggtgccggtgcgatgctcgtatcggtggctgcctgtggtagcggaactgcgggggatgacggcggcaagaaggagatctccttccagacctggaacctcaagaacgacaagtacaccccgtatttcgaggcgctgatcaaggcctatgagaaggaccacccggacgtcaccgtcaagtggcttgacgccccgtccgatggttacgaagacaagctgtccagccaggctgcggccggcgaactgccggacatcgtcgacggcggcaactccatcctgtacggtcttgccaaggccggcgcgctgctcgatgtctccaagcaggctccggatgcggaaaaggactactacgaaggcgcatggaagtccgtgaccatgcagggcaatggcatcgagaagggtgcctacggcctgccgtggtatgtcaacgatggcccgacctactggaacaccgagctgatgcagaagtgcggccttgatccgaacaagattccgaccacatgggatgagtacttcgccgccggcgacaccatcgtgcagaactgcaaggatgtctacctgggcaccacgatgggttacaacaccgaagatctgatgaccgcaggcgtcaagtccttcatgaacgatgaccacagcaagtacaccttcaatgatgaggccggtgtcaagcagatcagccgcttcgttgagctgtacaagaagggcggcatcccgccggaggccctcgactcctcctggagccaggccgccgatctcttccagcgtggcaacctggtctccatggccggctccgcctactccgctgacggcttcaagcagaacgctccggacctttacaagaacctcgcagtcggcccgcgtatcagcaacgacggcaagtccgcttccgtggcctacgagatgctcggcatcagcgccaactcgaagcaccccgacgttgccattgacttcgcccgattcgtgaccaacgagaagaaccagatcgagttcgacaagaaggcctccgtgttcccgtccgccaaggggggtctggatgacgactactacaagagcatcgacgaaagcacccttgagggcaaggctctgaagatcacgctcgaccaggtcaaggacggctacggctctcgtccgtccgagttcaccgacaacaacggctccaagaacttccagcagcagatcgccctcgctatgcagggcaagcagaccgccaaggaagcccttgacaagtccgtcgagttcgcaaacgagaagctcgcacagtgagcaacgcggcactcgccgctgacaggtcggaggcccgcacggcctccgaccggcctgaaccgatgaacctcaaccacggcaagaagcagaatcgtagcttcggcaccatcattgccccctacctgtttgttctgccagcgttcgcgattgtgtttgtattcatcgtccttgcggcactcaacactttcaggcttgctttcaccaactccacactgctccgtccgggaaccttcgtcggactcgaaaacttcatcaaactgttccatgacgagtacttcctcacggcactgctgaactccacactctacgtgatctgcgtagtgccgttcatggtgatcctcccgttgatcctggcctatctggtcaagggcaactcccgcatcatgggcttcttccgcaccgccttctacatgccggtggttatgtccgccgttgtggtgggtatgatctggaccaacctgctggattccgccggtctggtcaactccgtgctcaaggcattgaagatcatctccaagccggttccattcctcaccgatcgatggggcgtgctcttcagctcgatgttcgtgacaatctggctgggcctcggctactacatggtcatctacctgaccgccctcgccaacatcgatgaatccctttacgaagccgcctccctcgacggcgctggccctgtccgccagttcatctacgtgacaatgcccggcgtgcgctccacgatgatgctcatcatgatgctgtccaccatcgccgcattccgagtcttcaacgaaatctacgtgttgaccaacggctccgcaggccccggcggcatggatatgacgatgtcgatgcttatcaagcgcgaaggcaccggtatccaggcccgcactggttacgcgagcgccatctccatcgtcgtgctcgtcatcgtcggcgtcatgctcatcgtgcagcagatcgtacaaaagcgaggtgaggactgatgaataccaacacgcataaggtcaccgtcggcaaagtcgtccagtatctgattctgattctgatgttcctgctgctcgtcggcccgttcgtctgggaactgtccctgtcgttcaagggcaagggcgacaacgtctacgccgtgcctccctacctgatgccgaagaccccgacgctggacaactacatttccgtgttcaagcaggtcccggtattccactacatgctcaacacgctggtggtctgcctgatctccatcttcggcaacgtggtcttctccacgatggccggctacgcactgggacgcctgaagtggcgtggccgcggactggtgttcaccatgttcatgggcaccatggtcatcccgatcgaaggcgtgatgatctcccagttcctgatcattcgctccatccacctgcagaacacactgctggcagtcgcactgcctggcctgtgcggcgccatcaacatcctgctcatgaccaacgccttcaaatccattccaatggaactcgaagaggcggccatggtggacggtgccaacctatggcagcggttcttccacatctgtgtaccgcaggtcaaaggcacgatgaccgttgtcggcatcttcgcattcgtcggtgcctggaacgacttcctgtggccgttgatcgcgatctccgatgaaagcaagtacaccttgaccctcggcatgaaccgactcaagggcatgttcatccaagatccgcgactgatcgccgccggtgcgctcgtctcgcttatcccgatcatcgtcttcttctgctgcttccagcgctacttcttccgtggcctggaacagggtggactcaagggctgagcggactggaaaaaggaggtactccaatgaaattcggagtcaactacacgccgtcgcatggctggttccacgcatggctcgacccggactgggacggcatcgacaatgatctcaagcagatcagcgaactgggtatggaccatgtgcgcatcttcccgatctggccgtatctgcaacctaatcgcacctggatcaacaagaagggcgtggcggatgtgcgccgcatggtgcacatcgccggcgagcacggtttggatgcctatgtggacgtgttccaagggcatctgtccagcttcgacttcctgccttcatggctggtcacctggcatgcgggcaacatgttcaccgatgcggacgccgttgcggccgagcgtgaactggtcaagaccatgaccgatgagctgtccaaggaacccgcgttcaagggtctgaccttgggcaacgaggtcaatcagctgtctgacaggccgcatcccacgaagatgagcgccacggaccggcagatcgacgcatggctggacgcgctgcttccgaccgccgccggtgaagggcacaacgcgctgtacagcgtcaacgatggcacctggttcatcgatgggcacccgttcactccggtgcagtccgccaccaagggtgatatgacagtgattcactcctgggtgttcaacggcatcgcgcaaggatacggcgccaccagtgaggagtgctcgtcgtacgcactgtacctggccgagctggccaaggcgttcggcaaggattccgagcgcccggtgtggctccaggaagtcggtgcgccggagaatgtgctggaaaccggctacacgccggaattctgccgcaagaccgttgaacgtgccatggattgccggaacctgtggggtgtgacgtggtggtgctcgcacgatgtgcccgccagcatggaagacttcccgttcttcgagcactctctgggcttgttcgacgagcaaggccagctgaagccgatcggccgtacgttcggggaactcgccgcacagtaccgttccgcattgccggctcagccgaagaccgtcgccgtggtgattgatgtggatgaggccggaaacccggtgaaccgcagtgcgctcggcccgggaggctcggtgtgcgacctgtggatgaagctgcaggtggcgggccagcgcccgaccatcatcacctcgcaggtggcggccaatcaagaggcgctcgcgcagcgtggcattctggaattgcacgctgacgaacacccctatgccgcccgttactacactgcggtttcggacccatcgttcgaaacggctgattaaaccgatatccggttgtggaatcatctactccttgttccacaaccggatattttcaattgcagtgcgcagggcaaaacataagatccggtactcgccgaagagcgagaagaacgagaagacaatatacgagaagggggagcgctcaatgagcatcaactgcgccgcagtggaccgactcattgattcgatgagcttcacgcagaaagttggccagttgaaccagcgtctgctcggttggaagtccgtggaacgcaatgctgcgggacggctggtggcctcggacgagctcaagcaggagattgaccgatggggtggactcggcaccctgtacggtctattgcgagccgacccatggtctggtcaacattggggtaacggcatacgccctgaggagcggactgaggcgattgccgtggtgcagcaaactgtgctggaacgtggcgcgcacggcatcggcgtattacttagcgaagaggcgcctcacgggcatcaggcgctgggcggcacggtgctgcccaccaatctgggtttgggcgctacgtttgacccgcagggggtgcaggaagcggaagctgcggttgccgcagaactggccgccagcggcattcatatcgcattggtatccggtttggacatcgcccgtgacccacgctggggccgttgcgaggaatgcttcggcgaggatccgctgatggctgcccgcatgtgcgaggccatcgttaccggcatgcagggtgagcatcgcagcaaggtcggccacgggggagtggccgtggtgctcaagcatctggcggcgcaaggcgaggccgtgggcggccgcaacggacagtccgccgtactgggcccgcacgatcttcatgaaattcatctgccgccggtggccgccggtgtgcgcgccggtgccttgggctttatggcagcctacaacgatatcgattctgtaccttgctgcgccaacccgtggctgctcaaggattatctgcgcgaccagctcggtttcgacggcatcgtgatggccgatggcctggccgtggatcggctcgaagacatggccggctccattcccgcggcagggcgtgccgcactgctcgccggcgtggacgtctccctgtgggatgaaggattcacccgcctcgaagaatatgcggatgacgaacaggtagtggccgctgtcgacacggccttgcgccgggtgctggaactcaaagccatgttcggtctcttgcccgaagacggtgccgataccgccgcaattgccatgccgagcgccgacgccatcgcgcaggccactgcggatgggcgtgagcaggccaagcgcatggcccgcgaggcgataacgctgatcaatgatggccagtctgccgtcacgctcgacgatatccgcagcgtcatagctgatgctcaagccggccctgtgattgtcgccggcccgttcgccgacgatttcggctgcttcctgggcgattacaccgcccctctgcccgccgatgaacagtcaagcgtctaccggcaattggtggcacgtctcggggaggaccgggttctcttggccgccaagccgagcgatgcgccggccgatcaatgggcgcgtgcgtcgaccgtggtattcgtatgcggcagcaccagcgaacgcagctatgacagtgaattcgacgacaatggcgcggcgaaggccgtaaccgaatacggtgccacctgcggcgaaggcgtggacttgtctgacatccgcctgccctggcgtcaggatgagatgctaggtgaagtcgcggcattgaccaccgctccaattgtttcggtggcggtgtgcggtcgcgcgcatgtactgaccgatgtgctggaacgctccgccgtgacgatctgggccggatatgccggccaatatgggccgcaggccgtagccgacgtattggttgacggagccgacatgtctggccgccttcctgtgaccttacccgcatatcccgcagccattcccgttcgatacaatgaccgccaaagtgccgcgcatgtctacaaggatgcggcggaaccgatattgcgcggcttcggctatggaaccggttcgctggcggcggtgacgttcagcgagatgcacgccgatacgcaatcgcatccaggtgaagtgctggtgcaggtgacggcacatgctgacgatcacggggccgcgggtgccgtgaatctgttcgcgcatgtcagcggcggccgccgcatcccacgtttggcaatgcttgtcgattcggtatacatggacttgaacgcgggagagcgtcgcgatatcgcgttccacgtgccgtgtgatcgtctgcgggatgtcggtgacgggcaagttcaggtgacctgcacgctggatggagattcgacgcatacggtcacggcgacgctgccgggggaatattagggggcctgtatgaatgtggggtgcgaagcactggaaccgcatcacacccccggatggagcctgaaaccgcaaggcatccatcctcgcaacctgcaagtctgcgggttgtcacccgatagaggaaacaacaaaggagattatatatgtgttgctcacaaggtagtgaagggcgctcgtccatcggacgcagactcgccgccgtcgcggcgggcgtagtcgccacagcactgatgctcggatgttcgctggccatgggaacggttgcgaacgcccaggaaggggattcccccgttgcggcgtcgcaggagggtaacggcaacaagcatttcatggtgtattaccgcgcatggcgtgacgtgaccatgaaaggcgtgaacaccgatttaccggatgacaattggatctccatgtacgacattccatacggcatcgatgtcgtcaatgtgttcagctacgttcccagtggccaggaagcggcggcccagccgttctatgacaagctcaagagcgattacgcgccgtatctgcatgcccgaggcatcaaactcgtacgaggtttggattacagcggtgttatggtcgacggtttcaagacgtggattgctcagcagggcaaaaacgtcgatagcgcgaccgaatcggattatgacgcgtacgccgatcatgtcatcgaaacgtacatgacctcggttggcctcgacggtcttgacatcgatatggaaactttcccggatgccgcgcaggtggcgatttccgatcaggtcatcacagccctcgccaagcgcatcgggccgaagtcggataacccggaaggcacgatgttcctttacgacaccaatggcagctacactgctccgtttaagaacgtttctgattgcttcgactatgttgcctaccagcagtacggttccgattcgaaccggacggccaaggccgctgccacctacgaacagtttatcgactcgaccaagttcgttcccggcctgaccttccccgaagagggtgacatgaataaccggtggaacgacgcgaccgaaccatacctggacagtcatttctatgatgtggcctcatactcgtacgaccacaatctcggaggcatgttcgtctacgcgctcgaccgcgacggacgcacctattccgacgatgatttggcacacatcaaaccgtcgaatctgatttggacgaagacggccatcgcacaaagccaaggcatgagtctggaaaacgccaagcaggctgccaaccacttccttgaccgtatgtcctataccaaggatgttccagccgaaacgcgccaaaccgtggcagcggccaccaacctgtatgaggtgaacaaggcggtgctcggcgcggattggaacgacggatacagcaacacatatgatccgacgctcgaactttccctgacctccatcgacaccacggcacttaccggtgccatagccaaggcggatgcattgctagctgacggcgcaaccgataccgatgtgcggacaacgctgaccacggccagaaacgcggcggtcactggcctgaccagcaagctgtataccggagctgacgttgtctcctggacggcatcgctcaacaccgcaatcgcagatgcaacgggcggcaagcccaagccgcaacagccaggcacaggcgaaacggacaaacctagttccggtgacgcatcacacaacaagccacagtctgcaaccggacgtctggcaagcaccggttccgatggcaccgtcgtgctatcggtcgccgtgattatgacgctcgccggtatcagcgtattcgcagtccgccgccgcggataacaccggttcgaatgaaccgaaaaacagtatttgggatacggcgcgatatgcgaagcgccgtatcccatggcccacatcggtagggacgaagtagtacgcagacggttgatctccggcgtaagccggaagaagtcaaaggagattatagatgagattgtcactaggcgatcccgctgggtgtacttctgcccgggctcaacacaggaaatggctgtgcagcggtctggccgcggtattgtcgatgaccacgctggcggcgttggccgcaccggccagcgccaccggcacaatgccatgggggtgttcctatgtttttgtcaactccttggggagttgacgtgtcgggattccggttggctgtcgtgggcgcgcttcgccctgccggtggcgtccggcgtcctttcccgtgtggcccgattcaggctacgagggctggttcctggtagaggacgccgtttttgagcatgctgtagattacgtcgcagcgtcggcgcgcgaggcagatgacagcggcgttgtggtgcttgccctgttcgcgtttgcgcttgtagtaggcgatggacggcgggtgtttggcggacgcgacgaacaaggactgccacagcgcgttcctgaggcgtttgttgccccgtctggagggtctctcgcccttgatgctggtgccggactggccggtggccggagcgatgccggcgtaggcggccaggtgggccgcgcttttgaagttggcgatgtcgccgacgatgttccagcctaccaggacttcatgaagcagatcgtcgatcagggcatttacatccagtggtacgactcagccacatacccgggtggcggcgtaggctaccaagacatgttcaacggcagcaattcgccgtatgtgcaggatacggacaagggcaagatctctgattccatcttcctgaactactggttcagcggcaacatgcttaaggattcggccgctcacgccgagagtttcggcatcgatccgaaatatgcggtgtttgctggcatcgagtccggacagaagaagttcgacagtatcggcagcaatgcgggctatatgaacgtcaatctcgacgatacaggtaagccgtatgtgagccttgccgcgctcggcgccgacttcgtctcccgcgaactgggcgacgacaagaaggtctatccgaaataccagaaccaggtgttcgaccgcgaacgccgactgtggaccggctcgtccaccggcgagaagggcaccaccgacatcgccgacaattacatcgacgacggcacgagcaatgacggttggaagggcttcgcttcccagatcgccgaatgctccgtggttggcggttccatgttctctacgtcgttcaacaccggtcacggtctcgaatggcgtgatggcggcgaacggaccagcgaccagcagtggggcaacatcaacctgcaggatattctgccgacatggcagtggtggatcgatgccgactccgacccgctgcaggccgacttcgactacggtaaggactcgaggcggtaccacgcttcaagtacaccaaggtcggtggttacgaaggcggcgattcgctggtgctgagcggcaagctctccaacgacaacaccattcgcctgtacaagaccgacctggatgtcgctgccggctccaagattgacctgacctacaacaagctcaacagcgatgattccaagttgcagcttggcctcatccttgccgacgaccccgagaccgtggtgccggtggacgtgacggacggttcggcaggcaacggctggaagaccgcgagcgtggacctgtcccagtacgcgggtaagaagatcgccacgctcaagctctacgccgtgggcgcggacggctcgcgttcgctcgccaccgaagcgccgctgaacgaagcggcggccgtctccgacgtgaaagtcgaaccaggcaaggacggcaacgtcaaggtctcttggaccaatccgcaggtatccggcgagaaaaccgtgaccgtcaaatccgacaccggttcgtggcgttacgccgcgaagccgtattcccagaccgtcaaggtcgccgccgacaagagcaaagtgacgattgccaatgcgccggttgacagctcccgctatgtggtgaacgtcgataatgcaggtggcactaccgctacggcaacaggtgcatttgccgatgccgccattgagccgtatccggcttgctcggtgatctggaatggcgataatgtgacgctggcccgtcctgagactcaagactggcgctacctgtacatgaccgagaagtggatcggcgagaatggcaagcagcagcaggagaaccagctgggtgctagctacacctactcgcagaacactccgccaatcactggtattatccgtggtcgtaccacacctgcctcatacaccaggtccatcccccgccagtcatgaactgcgggtgcaggtcgaggattacagcggcaacaagaccgatccggtgaagattccgaccgccgacgaactggccaagtgcacggtcgccgaccccacccagccggatgccaagaagtccacgctgaccgcggtcgacggttcggccgtggccgacggcaaggccatccgcacggtgcaggcaacggtcaaggattcgttcggcaatccgctggccaatgccgaggtggcgtttgaactgcccgaaggcgtctcggccattggcggaaacaccaccgtcaagaccgatgccgccggcgtggcttcgctgaacgtcgtgtccacgaaggtcggcaagtacacggtgaaggccgtgctgaacggcaatgccatcggcaagggcgtcaccgtcgaattcaccaaggccgcggtgacgccgaacaagcccggcgaccagaacaagcctggcgataccaagccgaacaagcccagccagaacgacaacaagaacaatgacaagaatggcgcttcgttgagtgccacgggttcgtcggtcattgcgattgtggcggccatggtggtgctgcttggcgcgggtgcggtggtacttcgcgctcgtagcaagacggagtagttcgtcgcaatacgggtgttgatactcgtgccataagcgggatttaggggttgcccaatgggtgcccccctaaatcccgtttgttttgtcgcaagacatatgccgagaccagtgactaaaatgctttagttatttgactaaaattattgatatcataagagttagcgcacggttgatgcatatggcccaatgcgggggtgccgtcaaccgtatcgcaatagtcgcaatgcggtcgtaaaaaggagtgttcatgagatctgctcgcgaggcatcgtcatcgtctgacggcacgcagcgtgtgagcctgaaagacatcgcagatgaattaggcatctcgcagaccgcggtatccttcgccatcaatgatcggcccggcgtttccgcggaaaccaaacgtcgggtcaaagaggctgcagccaggctcggctggacgccggtctacgccgcacaagcactgggatcctcgaagaccatgaccataggctttgcccccgcacgatccacgcaggggctcacggatgaaagcttcatgctgcacttcatggcgggtgtgcacgcctcgctcagccccaaaggctatggtttgctgtaccgcccatgccgattcctgaacgaggagatgagcgtatacaaggattgggcgtcgcgcaagcgcgtggatggcgttatcctcgtcgatttgcgagccgatgatccacgcccggaattgttgaagaatctgggtgtgcgcgcagtgcttgccggaggacccgacccgaacaattatgtgccgtcactgtccatcgatgattcacgcacgatgggaaccgtgctcgaacatttgtcgtcattgggacaccgccgaatcgcctatctttccggcgatccgaacctggattattcacaggggcgtgtcgcggcgttccgcgcatttgccaaacggcgaaagctggaatccatcaacatcgaattcaccgattttgttgcggaacaggccgcgatgctcacgttggagatgctgcattcaccgaagccgcctaccgcgttcatctatgaaacggagatcctcgccgcggccagtcttcacgccatggccgaagattattccgctcggcagatggaggcgggggagggccatgcggaagtctatccgaatgggctgcccgccattgtcagttttgaagacagtttcatttgtgaggcggcgtatccgtcaattaccgccgcgcatcgtgatgccagcgaatacggtgccaaagtggccaaactgctgctcaaagtgcttgccggagagcaggtgagcggcaaccggcgaatcctcaccccgaaactggtgattcgggacagcaccgccaagcccatggataccatggcgtagaacggtcattgcatcggcttgcagacaatgacatgcgaccagtacggcgttggcccccgtattccacggggccaacgccgttgagaaagaggaagaaaaaaggatatagaggcttagatgctgtcgattattcagcgttcttcacggccgtcgcaatggacacggccgggtccaagaacggaatcagcgtggactggaaggcgtggtacaggtcggacttgcccggccagaccgtgccgatcacgtggttgttcttgtcaagctgatggaaccaggaaccgccctcgtggtcgatgacatgctcatcgacatactgggcgaatgtggcgtaccagttggcgtacatctcctcgccggtggccgcatacagcgtggcggaagtgttcaacgattcggccagcgtccaatgcatgcgatcggtgaccacgggcttgccgttccagtcggtcgtgtaggcgagtcccacggtgccgtcggcgttccatgcgtcggccacggcacgcgcgaacagatgctcggcggcgtcgacgtacggctgtgcgccgtcaaggttggcgaaggagcttaacgcccactgcgtgatcaagcgggcccattcgatgccgtgacccggcgtggcgccgtacggcttgaactgatcatccttcttgtcgacgttgcattcgaggtccagcgaccaatcggacttgaaatgttcggggatgcgccactcgttgtgcttcgcccagccgatcacatggtcgatgatgcggccggcgcggacgcgataggtgttgttcccggtggcgtcggccacggccaagaacgcctcggtggtatgcatgttggcgttgagaccacggtacgggtcgagctcggtgaattcggtattccaggtatcgacggccaaaccgatttcgtcatcccagaaatgcttgtcatacgtggcaagcgcctcatcaagcagttccttggcacccggacgtccggccagcagggcggaggatgcggcgagtatcacgaaggcatgcgcatagcagaccttgcccggagcatgggtgccgtccgcgaacacctgcgggtaccagccgccgtgctcgtcgtcatgaagaatgccggtcaatcccttgagcgccgcgtcggccagctccccggcgcccggatatccgagcatggcaccaatcgaatacacatgggccatacggctggtgatccacgtttcgacgccgtgggatgggtcgagggtgccgtcggcgttcagccagccggaaccgccgttcggcgctgggaagcctttgccgaacttcagcagctcataggtttcggaagccatgaaaatgcggttggcttcggtgccgagtgcataacgtgggttattggtcataatgattgttcctttccttaacgagaacatgcggtgggtgcgcaatgagcattcagcgggcacgtcttagtgcttcacacgaatgtcgaaatagtccatgaccagttcgcagaacatcatattcgaccagctgaaccattcgcgcgtgtatttggtcggatcatccacgtcgatgccttcgtgcatgagatgtgtaccggcgtcggtggctacaagacggtcgaggatatgcgccttgaagtccttgctgtcactggtcatcgcctcgatagacagcgcgatcggccacacatagcgcggcggggtgtgcggtgagccgatgcccttgagatactcgccctcgtaatagtacgggttttcgtcgctgagcagcgtgcgtcgggtcgccagatacgtcggatcgtccggtgcgcagtaccccaagtaaggggccgccatcaaggagggcacattgctgtcgtccatgatattgacgtgacccaggccgtcggtctcgaacgcgtaaatcgtctcgccattgcggttcgtcgtcttggcgtggttttcgatgccttcggtgatggtgcggcgcagctcgccggcacgggcggcgatatcggcgtcatccagaatctcaccgccgaagatgcgttccagatagcccatcaccacggcggcgaacatgttcgagggcaccagatagtggtaggtgcaggcgtcgtcgctggggcggaagccggaccaggtcatgccggtgtacgccaccggcgaccccttgccgtcattgctcagcgattcggtggggatgtccgtgtcgcggatgaagaaatacggggagcgttcatgatgctgctcggtctcgaagacgtcaagaatcttcttgacgccggcaatgaattcggcatcgaagtgatcggcgttgccggtgttcgcatacagcatccaagccaactggatggggtagcacagcgaatccacctcgtacttgcgctcccaaagccaagggctggagaaatcggaccggtcgtccttgtcccaggaggcgccgttcggttcctcgttgaaggcattcgcatacgggtcgatgatgatgtagcggaactgttgccgtatcagaccggcgatcaggttcgcaatatcgctgtcttcggcggcaagggccagatacgggcgcaattgcgcggtcgaatcacgcagccacatggccgggatatcgccggtaagcaggaatgtggtgccgtcgtcatgccgtttgaccgtggtggtcagggtgtcggcaaagcaggcattgaagttctcggcccaggcggcgtgttcggtgccacacaggtccgtgatgtgctgcatgaaatccgagaccgacttcggtatcgcggtggtcgtcataaattcaacttctttgtttgagggatatacgtatcaagggaacagcattattctaaaccgctttagttcatgacacgcgaaaggatgtgaagagcatgagtgtgagcgcaccatatgaaaaaccggtgagatttcctgttcggagaatctcaccggttgcgatcagtcgattcgtgaagtcgcacgaatggcggataaggggatgggtggattacttgccgatttcagccagatagtcgggcatctcggccgggtactgcggccaggcaccggcctgggtgcagacgtaggcggcggtgttgacggccttgcggtgggcttctgccagcgtgtcgcccagcaggatgcgggcggtgaaggtgccggagaaggagtcacccgcacccacggtgtcgttcacctcgacgtgcggagtgtccagcgtggagacctcgcccttgcgggagatgatggtggagtaggcggagccggcggtcagaatcacgtagtcaaggccgaattcctcgatgaaccagcgggaggcgtcttcgccggaggtgccgcggatgtcgaacatgtcgcgcagcagcaggagttcctcgtcgttgatcttgaagacggtggccgccttgaggagttcctcgatgaggtccttggagtagtggtcgccacgcaggttgatgtcgaagaacttcatcgcgcccggcttggtgtgcttgagcagctccgtgatggtggcgtgcgattcgggggagcgcagggccagggtgccgaagcagacggcgtcagccttggagaccacgtcgatgagctggcgggtgtacaggatgtggtcccaagccacgcccttgacgatggtgtactccgggatgccgttcttcagcgcgacctcgacggtggaggtcggccaggcgttgcgctggatgacggtgttgatgccggcctcgttggccttggcaatcagttcgtcgccgagctcatcctcgccgaccgcgctgatagcccagccttcggtgccgttcttcatcgcgtggtaggcgaagttgacgggggcgccgccggctcgcttgccgctcggcagcatatcccacagcagttcaccgaggctcagaacgatcggggtagtcatggttggtttcctttcctttgtttcttttaccgggtgtttcgtatggaacatcttgtgatgtcggcgcttggtttaggagacgtcgaagaacaccgaggggtgttcgaggaattgggtcaccgccactgctgcggcaccggagaccgccgcgtcggcggacagggtggataggctgatggaagtggaggcattgatttcggggatggcccgttcggccaccgtggcgcgcacctcatcgagcagtatcgggccggcttcggacacgatgtcgccgatgatgatgtgctcaggattgtatccattgaagatggtgacgcatccgtagccgacgtatcgggcgacttcgcggacaatggcgattgacgcttcgtcgccgtcgccggctttggcgaacagggcgcgggcggcttcggtgtgggtcatatcggccgcgccgggaaccacggtgccatcggcgataagcatgtcgtgaatggcgggggtggagcagtagcgttcaaggcagccgacgttgccgcaatcgcaggggcggccgttgacgtcgatggagatgtgtccgatttcggtggcggcaccgaggaagccgttgatgagacgaccgttgtcgatgacgccgaggcccacgccttcgccgaccagataataggcgaggttgccgtcggcgtgcaccgacgggtcgaagagataatgtgcgagggctccggcgcgggcgtcctgttcgatgaacacaggcacgcggaaagcggtggcgaattcgtcgatgaagttgattttgcgccagccctgcatgctggacaccacggcggtgcggcctacgttacgcaggtaggggccgggcaccgccatgccgatggccacaatggacgggtcgttgtcaagcagttgttcgacgcgctggtggatggtgacgatggtgccgttgatggtgttgccgtacaccgtgggcaggttttcaaagctcagggtgttgccgcacaggtcgaacacgccgatctgcaccagcgagcgggcgaatttgatgccgatgatgcggaaccgcgtggtgtcgagtttgagaccgatggaacggcggttcttggaaccttccaaatcgccggtctcttcaatcatgccggcctcgataaggcgtgcggtgattttggtgatggccgcgggggtgagttccagtgccttggcgatttgcgcgcgggagctgatgccgttgtgatacaggtgcttgacgatgcgggagcggttggattcggagacactggcttgggaagtggcatgggtggtgtttgttgccatcggtcttaagtcctccttgtctgcaccgttgcgagttgttccgctcgtctttgaatctgaacttgattaagatattaacgctgttaattgattgacgcaatcaatatgtcattcggtgtgtcgtgcatgtgagtgtcgtcttgggggaatttgttaagatggttgtcaatagtcggatgcacactgatatcaagcgaaacgttcgatgaagaacaggggaggactgatgtctgaaaacactatgaacaatctcaaaatcggtgttgacgtgggcggaacaaaaatcgaagctgtgctggttgacgcaatgggcacggtattgggttccgcccgtattcccgccaggcatggcaacgatgccgtgatcgaagacatcgtcgctgtagcacatcaggcagcgggtgagcgttttgacgaggtgagggccatcggtgtcggtaccccgggcacggtggattcggccagcgggcatgtgggcaatatcgtgaatctcgacgtggtctcgctggatatggggccgttggtctcgcagcgttcgggcgtgccggcccatgtggaaaacgacgtcaatgccgccgccgtcggcgcggccaccgtattgggcggtgcggacggcatggccggtaccattgcgttcctgaacttcggcaccggactggctgcgggcatcgtcgaaaacggcgtgctgatgcatggctatagcggcgcggccggcgaaatcggccatatcccagtcgaacctcatcgcctcaagtgcccttgcgggcaatacggatgcttggaaacagtctgctcgggcgcatccgtggggcgtctgtggcccaacgccgacccgccgatgcccgacctgattcgtcgcgcgaaaaagcgggaggccaaggccgtcgatgtgctggacatggtagtgcgcgccatcggcgacaccatacaaatcctggctcagtccgttgatccgcgactcatcatcttgggcggtggcatggccaaaaccggcgaaccattggtcgaggtgatcacggctgagctgcgccggcgcgaatcgcaatgccgattcctcgaaacgctggacctgccggcccggctgcgtctggcacctgtcggccaaccagtcggagccatcggtgccgccatggcggcgtagcctggcatagtgccggggcatgggagatgaggcctcagatttgtctccgaggccccatctcccacgcagtcctatatcgctttatgtcgtgctgtgccgcgcttggtcttgcgcgtttcgttgccggggtgaccggcttttatttggccaagtgttggaagaccacggcgatggcctcgccctgcacggtgatgtcaggtccgcattcgcagcgccgaatcaccgtgtgtttgtggaaggacgaggatgtggcggcatccagatattgctgggccgctccgatgaacgtcgcgttgatgatgttcggctggccatagacgcatacgtctgccatatccaaaaggcccacaggcatggccagggcttggccaagatagcggcccgcccgagcaaggataccctgatgctgctccacgtctgccgcgctgagttgcttcttcaatgcggttccggaaatcatcgtctccaagcaaccgtgcttgccgcaagggcacagcggcccgtcaagatcgatggaaatatggccgagctcgccagccgcgtgcagttcgccgattaccggcgtgtccgagagcagaatcgccgaaccgatgcctctttcgatgcgcacgaaaagcatattcggcccgccttggccaaagaaacgttcggtgagcatggctgcggtggcgtcgttgctgacgtttacttcaagtccgaaatgttcggcgattggcgtggacaggtcgagattgttccagccgcgcatcgtggaggagcggaccacgccgttgtctaccacgccgggggaggcgactccgatgccgatgacctcgccatcggacatgcccagcatcttctcaatgagctcgatgatcacatccacggaaacgaatgagccggtgttcagggtgacttcggcgtgacgcagcggctggccgagcagattggtgactgcgccgtgcagcaggtgctcctgcgtcaggtcgatgctgatgatgcgcagtcgatcgatatcgatgctcagcagtgtgcctcgtttgcctttgccgccgctgggtgcctgaccggtctcgcgcagcaatccttcctccagcatccgaccgaccacatcggaaacggccacgcggctcaatccggtgcgccggccgagctcggcgcgcgaatactggttggtggggaacaacaacctgaagataagttggcggttcttgcggcgcacatcggcgggggaagccttggccgcatggtcgtcggtcgttgtgttgagaccgagatatgacatgtttcctcctacctgatggtgagcgagtggacggcgattgttgttccatacacagcttagacggtgaagcgcaatttcgtcgttgaaactgttatgaaacttcactaataaattccagtgtacctgtgtgaagcgtcaggaaacaccgtgagtgttcatgaggtccaaaattgttactatcattaacaaatagcgaatcaccaatcggcgctacgccgaacggtggttggaacgccgcgcggcacccggacgtgacaaggatgttgccattatccgcaagacgggcggcggtacagcgactcgcatcgggcgggccgcacggaactggaggaaaccgatgccggaaatcatcattgtcaagaacgaagccgaggccggcgagatctacggccgttgcgtggcggacctgatcaaagcaaagccggacgccgtgctgggcctggccactggctccagcccgctggccgcctatcaggcgctcgccaagatcgtcaaggacgaggccattgacgtttcgggcgtgcgtggtttcgcgcttgacgaatacatcgggctgccgctgacccatcccgagtcctatcatgcgaccatccatcgcaccgtggtcgaaccgcttggcctggacccggccaaggtccatgtgcccggcgacgtactcaacggcactccgctcgaagacggcgacaaagtcgcgctggccggcccggcctatgatcgtgccatcgaagccgctggcggcattgacgtgcagattctcggcatcggcaccgacggccacgtcggcttcaacgagcccggttcctcgttggcctccggcactcgcgtcaagaccttggccgaacagacccgcgtcgacaacgcgcgcttcttcgacaacgacatcaaccaggtgcccacccactgcatcacgcagggtattggcacgatcatgaaggcccgtcacctcgtgctgctggcgttcggtgccggcaaggccgaagccatcgaggagacggtggaaggcggcgtgtccgcgttctgcccggcttcc

SEQ ID NO: 133 - DNA, 18648 bp, Unknown
  R206_24m  MAG No. k141_39617
catagcacatcacggctgccacaccgaggatttcccgtcgggggctagatatatgcttccggagcatatactttccggaaacctacaggtcaatccgtgaaaatccgcgattccggacacactttttgacccttaaccctcaggttcagtccttcccataaggtgcggtcgtcgattcgatatgtcagattatgcgtgatcaataaggcgctcatgcttgatgttccttacgtggtaagcggttgctgatacaggtttgtggatggcgatcagggatgtttgatactgtcggcgcgcagccgcgaatcgtaaagcactgtggttgccaacgaaacgacgatgaatagtaaggaaaccgaggtcgtggaaacggcgttgtaacctcctatgagcaactggatcggaagagatgcactgcataacgccgctgctaggaacagtatcgattgaaaacggagatatgacggcgctccatgcatatattccacgaacataatttgacgtcggagtgtgcatagtgtcaaagccaccatgattgcgccgcccagcagacatgttatggatatgcaagctgtgatggaaaaatagttcatttcctgagttgttcgtgccaaacgagtttgtatctcgtcgtgccgattgacgaccgaagccaccaaagagtccacgcccttttcccgtaggatttcgagcagctgatggcgggagctgtaatcgaaggtcatgccgccggtggacaccatcgatgtagtggtatcgccagagagcagtgacgggtcaatgacaacaacaggaacagaggaaaggccatcggtgttggaaggggtgtcaaatgccgataagacagcatctcttggtctggattcaatggagatgctcgtgcgattgatggcgggcagactctttccctcttctgccgccaaactttgctcgaatgagtatgcgcgaagcacattgttcgtaatggattcgctgttccattgttcattctcgggcataatcacactgattcgtgcaagtgtcgtgttgtttcgtataagatgatgaagccttgccgtacgggaatccatgaggatgcagggctgtgggtcttgcgagctatccacccacgtgcatcctagccggaatgaggcgaatcgcgtatgttctgattgggaagtttgttcgacgaagtcgttccatgagggcatggaacgagctcggttttgatcgctgctataccacagttgcaattggaatccgtcgttggatgacaattgatgctccaatgttgttttcagtgtttgggattgccgccatttgaagttcgtaacgttcaaactggcagagctgagagcgagaacgatgattgccatgatgcagccggaagccatgagaaaacgtaaagggcgctttccttggattaatttgagtgcgttcggcaccagaacccttactagagcaatcgacaatgacaaggcaaccaatgccatgcacgttgtggcgatgatgatggagaggaatacctgaccggcgaatcctaagggagaagcgaaaggccagaagatcgcaccaatggaaatccaagtcatccatccgatgcagacgcagatgatgaaaaagaacgcatgccgcaggaattgcctcataataatgccggttgttctcatgccatgcaaggcttgtatcgcgcaaacgcgtgaagctgtcgacacggaaagcgcgccggacacaaatactacagcaagtccggcgaatatgacttgggcgatggaattggagaagaattgtttggtgatttgtgtgatgccgatgggggttgctctgttaagttcgaatccttggcgccgtatggatttggctactgaagcggtatcccgtggtgatccatagagaagccatcttcccaatgggtcggtgaatctgtctccgcgttgcacacgtgtgcgcggcccgaacccataatccgggtatggcgaattcgcatgcatgccgttgccgtctaatgcgccgaaaatagaaattacgcgtctgttggtaccgtgaccgtccggctcataggagactctcgcgagtacgacatgatgggtcgctgcgagaccggtcaatgtcgatagaggctgcccgtgcgcgtcggaaattccaatatcgtagctagggccggagggataggtttcttcgttattctgcgcatagaatcctgctgcgagagtgatgagagccacggccaatatactggcgattttataagtccagtgcatgatacaccttattcccggtaacaatgtgtttgtgcggtggacgataggaagttcgctcgccgcacattattgcgcggctgttttgccgcatataacacggtaagacgccaatgaggagcgaacgaagtctgtgtgacgggaatcgtcacagtgttacgatttcgtttgacggaggcgatttggggaggggtgcttatgaagaacgggcgcctgattcggcttgccttggtggacaacgatcgttgctctgcggagatgatggctttgcttattggcaggacgattcccgaggcgcatatgctatgggttacggataatcccagtcttgccttggaacgttgtctgttcgatccgcggaagccggacatccttatttgcgatctcatgatggacgggctgaacggagtgcggctgacggaacgtattcgacagcggaacgtgcaggttggcgtcatcgtagtcacttcgtatgacctggcaacctatggtgaggatatcgcgtgttgcggagcccaagcgttgatttcgaaaagagatttcgcagcgaccatacgcgaggcggtcaaatcggtgtttgacgggggaacataccctcatggttggggtttgcatagccttgaagagacattgcatacggtggatgccgcacagccggaagcggatggtgccaggctcttctccgatcgagagctggcggtgttgcgtctctatgcacatcatgtaccgaccattgaaattgcgcgccgcttgggaatcggtgtcgaaactgtgtacagctatgtgaaacgagccatgcgcaaggtcggggtgacgaggcgcggcgaactccttgattactgtgagcgataccatgttctgtgacggcagccgttttcttagacgtcgcttccgcgatttcgggaagtcttggcatggcgagaagatcgcggcgctagcctgcgccttgtgcatagccgctgatacggtcatcgaatcgtgtatcaatccggtttgggatgcgtgggccctgtgggtgggtctgttgttcgtcatcctgtcgttgctctgcgtggcattcccgttcggcggcaatatcgcgttggcgatctcatggtgcgtggtgttccccttgccggtggatctgtccatgtcggtgagcgtggtgatagccgagccattaatcgtcctctcctatcaacgcatatggtgcggcgtggtgttggcggtgactgtgaccgtatctcgcgtggcgcagctgatatggcagtatgggttgccgatgggttgggatgccggggcgttggtgtccgttgtgccttggaccgtcatgccggcgttggcgtgcgttggaatcggtctgctgctgaattggcatcatcgtgagggggagagggagtcggaagcgcgtggcagggccgaatcgttggatttggcggcaaggctgcatgatgcgacgaccaatgatctctcatatctcatcatgagcatcgacaggatcatgtcggaacacccttcgcaaggagagtcgatggacttgccactgttgcgcgaagtggctcaacgggcgctcgatcagacgcatgatgtcatagcggttctcgcaaagcacaatgtcggtactgcgcgaatcccgcgatgccatgcgcgtcgctccggagaagccattgttccgatcggtgcaggtcgattcgaggccgagatcgaacggcgccggcgggaactcgcaacgcttggtttccgaggcgaggtggttgtgtccgatcccttcgatctcctgagtcggtttgacgagaagactatccagttgacgcggtcgttgctggaagagacgtttgccaatatcgccaagcacgcggatcgcgaacaagggtatgtactcgccatacaagtgcggcaagacggactgtacgtatcggtggctgacgttcccgccaagatggcggatggagcattggcggaatctccgagaacattgggcatgggatttggaatgtctcatctgtgtcaatcaattacgcggagcggtggttggctgcgcgtccaagaggaagacgggtattggagttgcctagcgtatattccgatatatcatcgggatacagcgtgaatcggaaggaaacagcgcatgggattcaacatcgaacgtgtggacaagccgtttgtggtcaaatcgccgtaccgaccatccggagaccagccgaaggccatcgaggaactggccacgcgcatcgagaacggcgagaacgacgtggtgctcatgggcgccaccggcaccggcaaaaccgccaccaccgcatggctgatcgaacggctgcaacgtcccacgctcatcatcgagccgaacaagacgctcgccgcgcagctgtgcgctgaattccgcgagctcatgcccgacaacgcggtgagctatttcgtttcctactacgactactatcagccggaggcctacataccgcagaccgacacctatatcgagaaagactccaacatcaacgacgatgtggaacgtttgcgccatcaggccacggccaacctgctgaccagacgcgactgcgtggtcgtggccaccgtctcctgcatctacggcctgggcactcctgaggaatacgccgggcgtatgctgtttctcaaggaaggccagcagatcaatcgcgacgacctgctgcgccggttcgtggccatgcagtacaagcgcaacgacatcgccttcacccgcggcaccttccgcgtgcgcggcgatacggtcgaaatcatccccgtatacgaagaactggccatccgcatcgaattcttcggcgacgagatcgaccgcatctccaccctgcatccgctgaccggcgacgagatcgacgaggaaaacgaaatccacatcttcccggcctcccattacgtggccggccccgaacgcatggaacgcgcgctcaaaaccattcgcgaggaactcgacgaacgcctggcagaactgcgtaagcaaggcaaggagctggaagcgcagcgcctcaacatgcgcaccacctacgatctggaaatgctcacccaggtgggcgtgtgctcgggcgtcgaaaactattcgcgccacttcgacggccgcgccgccggcaccccaccgcacacgctgctcgacttcttccccgatgacttcctgctggtcattgacgaatcacacgtcaccgtgccgcagatcggcgccatgtacgagggcgatgcctcccgcaagcgcacgttggtcgaacacgggttccgcctgccctccgcgatggataaccgaccgctcaaatggccggagttcctgcagcgcgtcggccagaccgtgtatctgtccgccacgcccggcgactacgagttgggcttgtccgacggggtggtcgaacagatcatccgtccgaccggcctgctggacccgaagatcgacgtgcgcccggtcaaggggcagatcgacgatctgctcgccgagatcaaggcccgtgtggccaggaacgagcgtgcgctggtgaccaccctgaccaagaagatggccgaggatttgaccgactatctgctggaacgcggcatcaaggtcgaatacctgcattccgatgtggatacgttgcgccgcgtcgaactgctgcgcatgctgcgcgaaggcaagatcgacgtcatcgtcggcatcaacctgctgcgcgaaggcctcgatttgccggaagtatcgctggtggcgatcctcgacgccgacaaggagggcttcctgcggtcctaccgttcgctcatccagaccatcggccgtgccgcgcgaaacgtgtccggcacggtgatcatgtacgccgacgagaccaccgaagccatgcggcaagccatcgacgagaccgaccgccgccgcgccaagcagattgcctacaaccgggaacacggcatcgatcccaagcccctgatcaagaagatcagcgatgtcaacgatatgctcgccaaggaggatgtggacacccagaccttgcttgaaggtggctaccgcaacgcgggcaaggccggcaacacacacctgggcgtgccggtactcgatcccaacgaggcagacaaacgccacgaggagatcctgaaggccggcctgcccgcgcaggacctcgccgacctgattcgccaactgagcgaacagatgcacaccgccgccgaacaactccagttcgaactcgcggcccgtctgcgcgacgagatccgtgatctcaagaaggagctccggcagatgaccgaggcggggcgatgacccgtcacatacatgggttagtgtagggaatcatggcagaaaccccactcgcatttgaaatcatcaccttcgtggtgctcgcgctgttcttcatcgtcgacctgttcgtcatcgggcgccgaccgcatgtgccctccaccaaggaatgcgtgcagcatatcgccttcttcgtggtcatggcgttgatcttcggcggatgcatctggttcttcgccggctccaggcccgccatcgagttctattccggctggctcaccgaatactcgttgtccatcgacaatctgttcgtgttcgtcattatcatgtcgaacttcgcggtgcccaagcagattcagaagtatgtgctgtccatcggcatcaccattgctttgattttccgtggcattttcattctgatcggcgcggccctgatcgcccgcttcacgtgggtgttcttcctgttcggtgccttcctgatctacaccgccgtcaaactggtgctcggcggcgatgaagacgaggaatatcacgaaaacggcatcatccgtaatctgcgcaagatcatcaagatcaccgacgactatgacggcgagaagctgcgcaccaccaagaacggcgtgcgttactggaccccgatgctcatcgtgttcctgaccatcggcaccaccgacgtcatgtttgccttcgactcgattcccgcgatcttcggcctgaccaaggatccgttcctggtgttcacctccaacgtgttcgccctgctcggcctgcagcagctgtacttcctgctgggtgctctgctcgacaagctcgtctacctgcctgccggcctgtccgtggtgctgggcttcatcggcgtcaagctcatcatggaggccctgcacggcaataccttgccgttcatcaacggcggcgaaggcatccattgggtgccggaagtgcccacatggctgtcgctggctgtgattgtggtcgcaattggcggcgcatccgtggcttccgtgatcaagatgaagagcatggaaagcgctgaaaaggcctgaaaccgttagagaatacaacccttaaacctagtcaacacaacaatgtgagcgctcacaacacaccgtgaagaaaacttgtcatgagtcggctcgcgctagtagactgggtttcggcaaatggggcaatcgtgcctcgaaccaaattgaacaagaataggcaggcattcatgcgtaaagccaagatcgtagacaccatcggtccttccaccgaggattacgacaacctcctgaagctcgttgaagccggtatggacgttgctcgtctgaaccgctcccacggcacccccgaggatcacctcaaggtctacaacaacgtgcgcaaggccagcgaagccactggtcgcaacgttgccgcgcttgttgatttgcagggcccgaagattcgctgcggttggttcaagaagaacgccgatggcgaagacaaggttcagctgcagctcggccaggaattcgtcatcaccactgatgacgtcgagggcgacgagcacatcacctccaccaccttcaagggcctgccgggcgattgccacccgggcgacccgatcctgatcgatgacggtaaggttcgtcttgaggtcaccaaggtcgagggcaacaacgtgtacaccaaggtcgtcgtggccggtcctgtgtcctcccacaagggcatcaacctgccgggcgtcgccgtctccctgccggctctgaccgagaaggatgaggctgacctgcgttgggccatccgcaccggtgccgacatcatcgccatgtccttcgtgcgtttcgccaccgacatcgaccgcgcccacgagatcatggacgaggaaggccgtcgcatcccgatcgttgccaagatcgagaagccgcaggctctggagaacctcgaagagatcgtcaagaccttcgacggcgtcatggccgcccgtggcgacatggccgttgagtgcccgctggaagaggtcccgctggccaccaagcgcatcatcgagctggcccgccagtatgccaagccggtcatcgtggccaccgaagtcctcggctccatggtgaactccccggtcccgacccgtgcagaggcctccgactgcgccaacgccgtcctcgacggctccgacgccaccatgacctccaacgagaccgccgtcggcaagtacccggatgtgaccgtggccaccatgtcgcgcatctccggctacgccaccgaccacggcttcgaccgcatcccggagctcaagaacctcgacatgtcctccaccggcgccgtctcctccgccgccgtggacctggccgacaagctcaacgccaaggccatcgtcgcctacacccagaccggcgccaccgtgcaccgcgtctcccgtgagcgtccggccgccccgatctacggcctgaccagcaacgagcacacctaccactggctggctctgtcctggggcaccgaagccttcctgctcaaggaggactaccacgacaagtcccgtaaggatctcatgatctacacggacaagatcctcaaggacgccggcaaggttgctgacggcgacaagatcgtcatcctgagctctgctcagggcgatcaccagccgggccgcaccgactccatctacgtgcacaccgttggcgcttgcgactgatttcaggccgctggtagctgctgacagctagcacatagcacgcgaaagccccccatccagaaagtggatggggggctttcgttatccgttatgttgcgattgtgcggtgattgcaatggcacgtagtcaccgcgatgatcgagcgtggtgactagtcgttgagatgatcgagcgtgccgctcttcagacgcagaatggcgaccatggtcttggcatccacaatcgtgccattgaccaccatctcataggcatcgtccaccgacaccatacgcacgtcggaacgcggagtctccgggccgatttcctgacgggaagccggggtaagtccggtggcgaagaagattgcggtgtgctgggtggaatagctcggcgtgttcataaaacgggtgaactgtgtaagcttggaggcatcgaaaccagcctcttcggccagcttgcgcttagccacatcggtcgggcgttcggacgggttgttggcgtggcctgccggaatctccaacgtccaacgatggttggcgatgcgatactgctcgaccagcggaatcatgccgtcatcggtgacggccagcacagccacagtgtcgccattgttctcctgaacaaagtagcgttcaaacgaaccgatctgattcgactcataggagacgtgatcgacattgaaataatgcgtctccacaatctgtctacgggaaatctccttgaccggagaggggcgccagggatcgaactgacggtaagtttcgttgctcataagccctcctaacaaaagcgatacatcgaaactacagcccattgtaagcggtgaaaccacgcagaagaacgggcaacacacgggtacgccgtccacgatatcgacgtgtttcgcctgttttaccggggggaatggaggactggcgcgtgtcttgtgtcgcaggagtcgaatcggtatgctactctcttcagagtgcttaggcacgccctcgtatcccaattggtagaggaagcagcctcaaaatctgcgcagtgtgggttcgagtcccaccgagggcactttagctaggagttcgctgaaattattacgaaccccattgttgggtaattcaagaaagaggttggcatggctgcaaggaagaagtccgaagaaccgagtatcaacgtcgatgaggtgctgaccgacgaagaactcaaggccgtagccgatgaaagcgaacctgctgagcgcaaggccgtggccgaggatggtccgcgtaccgtcgtcgtggccgaggatgaagccgtgaaccgcatggatctggtcgccatgctggaagacaacggttatgaggtcgttggtcaggccgccaacggcgaggaagccgtggaactgacccgcaagtatcgccctgatgtggtgtgcatggatgtcaagatgccgcgtatggacggcatcgccgctgccggcattatctgcgatgagaacatcgcccctgtcgtcatgctcaccgcattctcccagaccgatctggtgaagaaggccaccggtgccggcgccatggcatacgtcaccaagccgtacgaggaatccaagttgctgccgaccctcgaggtggccatgggccgtttcgccgagatcaacgatctgctggacaacgtggagcgcagcgaacgcaagctcaaggaaaccaccgaccagctcaaggaaaccgaagagaagcttaagaaggccgaagacacgcttgaggagcgcaagctcgtcgaccgcgccaagggtctgctgatggacaaggctgacttctccgagcagggtgccttccgttggattcagaagacctccatggaccagcgcatccccaagaagcgcctggctcaggccatcatcgccaagtacggcgatccgaagccttctgattcgggcgaacgctgattatcggcatcaccgtgctgagtcgtaaagcaacacaaacacactatgggagaggccagcgtgaccgtacccaccaatgaaacattgctggtggtggacggccactcgctggccttccgtgcatttttcgccctgccggtcgacaacttcagcacttccagcggccaggccaccaacgccgtctggggttttgccaccatgctcgcgcaggtgatcgatgcggagaaccccgaccatctgggcgtcgccttcgatgtgaagggcggcacattccgcaatgagatgcttccgcaatacaaaggcacccgtgaggcggctcccgaagagctgctcacccagctgccattgattcaacgcatgctcacggccctcggcgtcacctacatcgagaagccgggattcgaaggcgacgacgtgatcgccaccctcgccaccatgggagacaaggccggctaccacacactggtattgtccggagaccgagacgccttccaactggtggatgacaacgtcaccgtgttgtacccgggtcatcacttcaaagacctgaagcatatgacgccgcagtccatcatcgacaaatacaaagtcactcccgcacaatatccggatctggcggcgctccgcggcgaaaccgccgacaatattcccggtgtgcccggcgtaggcgacggctttgcggccaagtggatcaaccaattcggttccctcgacgacatttgcgagcacgccgatgaaatcggcggcaaaaaaggcgaatcgctgcgggccaatatcgaccaggtcaagctcaatcgcaaagtcaacgcactggtacgagatgtcgatcttggcgtcgatattgaggatctgacattcggcaccgtggacgtggcacaaatcgacgccctgttcaaggaacttgaattcggacctcgcaccaagagtcgcgtgctgaaaaccttcaataccggggccaaggtttccaacacatccggagccggcgagtctacgaataatgaacaggacgagcaggataacagtctcgatctgaacctgccggaacccacgagcatcacctcttcggagcagttcgacgaatgggtcaaggcccatcgcgccgaggtcaaagttcccggtgaaatcgccgatttcacggtttccgactatggcgatggttcgcagcggcatgccgtctgcggcgacgcggtcggccgcgcttggaccgtggccgcatggggcgacgaaaggccggggcgtgccacggcacaaaccattgccgtggccacggcaacatcagcggccatagtgccccttccaatcaccgataccctgcgagcacagcttgcgcggttcctgaaaagcgaacactcccgcaccatcgtgcatgggtataaagaattgctgcatcttctgggcgcggtagatcttgacatggacctgccgatgttcgacaccaagcttgccgggtatctggcccaaccggatttccacgccgatagcctcaagcaggcggccgagcacttcctcgacatccacttcaccgaaaccgaacagccttcgcaaggcacgttggacttcgatgacgatcaggtcgaagaagatccgaacgaacatcgtctgcgtgatctggccattatccgcagccttgccgtcacgctcgggccgattatcgacgagcgcgaacaatgctggctgatgcgcgcgattgaacttcctgtttcccgcgtattgcacggcatggagcatacaggagccaaagtcgatagcgttcgactcgtttccatgcgtgaccagtttgccgccgaggctcgtcaggcgcaggaaatggcttgggagtatgccggcaccgaaatcaacctgcaaagccccaagcagctgcagaaggtgctgttcgaagatatgggtttgaaacccaccaaacgcaccaagtccggctcatacaccacgaatgcggccgcattgcaggatctgtatgtcaaatcagtggacaatgagcgggccaacggtttcctcggggcgttgctgcgccatcgagagatcaacaagctcaagcagatcgtccaaacgctgatcgatgccaccaatacatcagatgagcgcatccacaccactttcgagcaaaccgtcgcggccaccggccgattgagctccgtggacccgaacctgcagaacatccccaaccggaacgccgccggccgtgagattcgcggcgtgttcgtgccgggggaggggtacgaggccctgatgagttgcgattactcacaggtcgagctgcgcatcatggctgatctgtccggtgatgaggcgctgatcgaagcgttccgctccggagccgacttccacaaatacgtggcctcgatggtctacaagctgccggtcgaccagatcaccggcgaccagcgcagccacgtaaaagccatgagctacggattggcctatggtctgagcacgtatggtctcgcccagcagctcaagatcgcgccacgtgaagcggaagcgttgaaaaaccggtatttcgataccttcggcaaggtgcacgattaccttgaatcgctggtggccaatgcccgagagaaggggtatacggaaaccattttcggacggcgtcgctacttcccggccctgcattcgaccaatcgtgttgcgcgtgaggccgccgaacgtgcggcactcaacgcaccgattcagggatctgccgccgacatcatgaagatcgcgatgattcgcgccgagcagaccttggccgaggcccacgtcaagagccgtatcattctgcagattcacgatgaactggtagtggaaatcgcgccgggagaaggtgaccaggtcaccgaactggtgcgcaacgccatggaacacgccgtcgaccttgccgtgccgctggacgtatcgtgcggcatcggttccgactggcagctcgccgcacactgacaatttctagctcccctcgggtgaggggtgctgagccgttgagcaaacagtccagtggattgtttgtaggcgaaggcgagccgatagtcgagcaatgaagagcacgagcatggcttgtccgcaattgcagaatgagtcccttgccgcaatagcccactacaatgggacatatgccgaatctcaagcaagtcatcgacgttctcgagaccctgtacccattgcgctacgccgaggaatgggatgagccgggtctcatcgtcggcgatctgagccacgacgtgcaccgcatcgtgttcgccgccgacccgacctccgccatcattgacaaggccatcgccaccggcgcggacctgctcatcacccatcacccgttgttcttccgttccgtacacgagacgagcggactcggtttccggggcgacatcgtccgcaggctctaccagcacggctgcgggctgtgggtagggcacaccaatgccgacgctgcgtatcgcggcgtggggcaggcggcggccgactacttcggactcatcgaccagaaaccactcgtgccgattgacgatgccaacgcctctcatccggtcggcttggggcgtgtgggtcgtttgccgaagcctgttgccctgaaggatttcgctcagcgtgtattcgacgaagtgtccgatcatggcatgaccaccgcgctcggcatccaggtatgcggcgattcggacacttttgttcagtatgtggccattctgcctggctccggtgactccctgttcaacgaggtgcgtgccaccggtgcggacgtgtacgtaaccagcgatttgcgtcaccacccggtgaccgacgccatcgaacaagcccggtatgaagcccgtatgagggcccaaggcatcatgctcggccatggaatggcgggggagagccatgtgcgtccctgcttcatcaacacccctcatgccgccatcgaatccatgtggttcaactacgcgatcgatgatgtgccggccgccatcgaacaagcgaccggagcaaggcctgaagtcgagtggttccacgacacgaccgatccatggacgctgtccattaccgcgcatcgggattaaggcgctatagtgacgtggcgaaaacgttttttccgaggagatgacatgtttgggggaagcaagcaggaacaactggagcatcggctcgaccataagctgaacgcctcctcggacggcatcgacatggacgtgcccgccaaagtgatcagtagcgaaaccgtttataccgggcgcatcttccacgtggacgacatgcgcatcgctctgaccgacaagcagggcaaggaacacgagatcggccgccaggtgctgcgtcacgccccctgtgtggtcatgctcgtgcacgacatgtccaccgaccgttacctcatcgaacgcgaataccgtgccggatcggacatgttcgcctacgggctgcccgccgggctcatggacgagggcgaggacatcatggacgcggccctgagggaactggccgaggaaaccggcgtggtgccggaccgtgacaccatgggtgttgacttcgtgggcgatttctactcgtccgaaggcatgaccgacgaactggcccacatcatggtgttgcatttgggcccgttcagacgggagcagtgccatttcgacgcggacgagcacgtggaatccgcgtggattccgtggagcgaccttgccgccacgcgcatcacctcatccaattcgatgatcgccatccagcatgaggcgttacgcagactcatcgccaggaactccgacaaagacaagccgtcgctgttctcctgacgttcaactccccggcacatcagtgacacaagaaagtgggatactgaaaactatgcagatcagacctggatcaatgtatccgctgggcgccagctatgacggcgccggtgtgaacttcgcgctgtactcacaggttgcgcagaaagtcgagctatgcctgttcgacgagcacgatgcggaaacgcgcatcgaaatgaccgaacagaactcatacgtatggcataactacatccccggcctccagcccggccaacgctacggctaccgcgtctacggtccctatgacccgatgcacggcctcagatgcaaccccaacaaactgctgctcgacccgtatgccaaggccatcgaaggcaacatcgacggcgacgaaagcctgttctcctactggttcaaaagcccggacgacacctcggcgatgaacgaccttgactcggccgcccacaccatgaagtcggccgtcatcaatccgtatttcgactggggcaacgaccagcacccctacatctcgtaccacgattcggtgatctacgaggcgcatgtgcgcggcatgaccaacctcaacatggacgtgccgccggacatccgcggcacctacgccggcctggcctatccgagcgtcatcgaatacctgaagaagctcggcgtcaccgccatcgaactcatgccgatccaccagttcgtcaacgactccttcctgcaggagaagggcctgtcgaactactggggctacaacaccatcggcttcttcgcgccgcacaacgcctactcctcctccggagagcgcggcgagcaggtcaacgaattcaagtccatggtcaaggcctaccatcacgccggcatggaggtcatcctcgacgtggtgtacaaccacaccgccgaaggcaaccatatgggccccaccctgagcttcaagggcatcgacaacgcctcctactaccgactggtggaaggcgaccagcagcactacttcgacaccaccggtaccggcaactcgctgcttatgcgctcgccacacgcgctgcagttgattaccgattcgctgcgctactgggttaccgaaatgcacgtcgacggcttccgcttcgatctggccgccacgctggcacgccagttccaggaggtcgacaagctgtccgcgttcttcgacatcgtggagcaggacccgatcatctcgcgcgtgaagctgattgccgaaccgtgggatctgggctccggcggctatcaggtgggcggcttcccgtccagctggtccgaatggaatggccgctaccgcgacaccgtgcgcgacttctggcgctcgcagccctccacgctgcccgaattcgcctcgcgcctgatgggcagttccgatctgtatcaggtcaacggccgtcgaccggtggcgtccgtgaacttcatcaccgcgcatgaaggtttcacgatgaacgacctggtcagctacaacgaaaagcacaacgaagccaatggcgagggcaatcgcgacggcgagagcaacaatcgctcttggaattgcggcgttgaaggcccgaccaatattccggacgtcaacgacttgcgtcagcgtcagatgcgcaacatgttcgccacgttgctgttcagccagggtatcccgatgatttgcggtggcgacgaagtggcccgcacccagcagggcaacaacaacgcctactgtcaggacaacgagatctcctggaccaactggcatcttgacaagggacgcaaggaactgctcgccttcgtttccaaactcattcatctgcgtttggatcatccggtgttgcaccgccgtcgctttttcaccggccgtgagcccggcgacgattcgaacatgattccgcaggtcgaatggttcgaccacaccggttcgatcatggatatggacgactggcagaacacgcatgcgttctccatgatgatctatctgaacggttcggatattccggaggtagactggtacggcaaccggatggtcgacaatgacttcatcctgatcttcaacgcgcattacgagccgattatgttcaccctgccggatgagcgatacggccgcaaatggcagctggtcgtggatacgcacaacccggatgggccggaactgagctatgaggcgggcttcatgatcaccgcccagtcccgcagcttcctcatgctcatgagcgacaaaaagcccaagaagcccatgggcctataaccagaccgaatttaagctccctctgacgagggagctccctgtatagccgggtgagggagagaccgcagcaaagccgcgaacccctactcgcgccccttacgctcctccacgagccgagcatccccgaacgcaagtagatgctcgccggcaagcgggcgcggctggtcgagcagctcgcggaaatccaggattccatcgacttcatcgacgccaaacagcgcttctacgacgacgtcctgtctggcgcaaccccatacgtaagcgtgctcatcccatccgcggcgctcgcaaaggagtcagaggaaccgggagaattgaagggggtggagaggaaataggttcgaccgagccgtttcttcctccgggatacaagcgcgaacaacggtttgttgtacccgcgcttggcgaacgggacatgcccttagactggaatcagcaagcgcacagcgagacgcgcgaatcgttttccgatgtcgggaggtagtcatgtcgatcggtcaggttatcaaagtcgtgcgcgaggagcgaggtcttacgcagtcgcagttcgcgcacgagctgttcgtcacccaacaggcgctttcccgctgggagaagggaacggcagagccgagcatcgacatcagtcggcttatcagcacccgttttgaggtgccgatggcgaggcttatggaaatgccggacaacgatttttgccaaagttgtgccatgccgttttaccgcccggaagatcacggcaccgaaccggatggaacgcgaaacg

SEQ ID NO: 134 - DNA, 14516 bp, Unknown
  R206_24m  MAG No. k141_39901
cgtatcgcgacaactgctgctgagcggtggtgacctggccaaattcagcggccgtgccaggttcgcgtatgcgatcggcggtgccgtcggcacgtggggcggctggctcggctccgcccactggcagatactcgccgtcgtggccctggtactgtgcgccggattcatcccgttgctcaaggccatgcctggcccggtacggcactgaggtgacggatggggccggctggcatctcgtgcgccgggcgatttcggcagattttgccgtgctgatgtatgcaggtgttgacgttcggcgaggttcccagccacattgctgtgtgattgatgccgctcgataggcatgtcaggccggacacaccacggcgatgccgaatgggcgacgggccgacgacccgcatcatcgcagcagccgggttttgccatccttgacaagcagggcctgccggttggtgaggggcttgagactgagatcggcaccataccggtcgagaatgcgttgtgcggcgtggcccatggccgttgcatgatggtgggggaccacgcggaaatcagccaagcccaatcctgcgtaatcggtgagatcgggggctttgtccgtgcggtccatgagcttgatatagccgatgtcaggtgccgtgatgaccgagcccgcggactcgccgatgtacggcgtgccggcgcgcacctgctcgatgatggcccggtcggcaccggtgcggcgcaactcctgcaggagaaagaacgtgttgccgccgcccacatagatgcagtcggcctcggcgatgctacgcgtgacgcgttcggcggacccgctcggcacatcttccacatccagttgctccacctcgaaaccgaggcgttgcagcgcgtgtttgctcaacgccgagtgaaccggcccccacggttccacggcgctcgccgtcgggatgaacgcgacccgcttgccttgcggatgcggttcgacttcatgcacggcggacgaggcgttgcggaatatcgaagtcagcagcatcgtaaccataaaagccttcttcacatatcgactaggcgactatgcggcagtgtcggccttgaatatacggaagtgttcgtgcgttcgctctgggtatatccggcctgatcagcgggactcggccaatgtgatgccggccgccgtcatctgtttgcgggccgcgacaccgagctcctcgctgaccggtacggtcaggtcctcgaacacggtgacctcgaaaccgaacttcccggcatcgagcgcggtgtccttgacgcaatgcgattcggcgatgcccaccacatccacgcgactcacgccggcggccttcagcgcattggccagcgtcttgccggcggattgctcggccgcaacctcctcacgggtctggatacggtcggtattgtcctcgatgccctcaaaaccggaatatgccgccgaatactggcccttcttgaaatgatgatggataatcagcgccttgatcgccggatgcaattcggcgttcggcgtgccggccgcaccatgcttcggccacgtgtccacgaaatccggttccgccgaccagtgcgcgcccggctcgatatgccagtcctgcgtggttgcgatatacgcgtactcgctgcgatgcgcgttcacataatcggcgatccgctcggcgaccgcgttgccgccttcgactcccagttcgccgccttcacagaacgtcggctgcatatccaccacaatcagtgccttggtcatcatcattccccctattgccttggattcgttttgaatattgtctcgaactcgacgtgcgattgctctcatcatagccatgcgcggccctgtgggaaacgttcgggcttacactgcaagcagcaatcgaatacaagaaccaggggagggtgaccaagaccatgctggaccatctgacgttgcacgtgaaagacatcgaccgtagcatcacattctacaaacaggcgctcgcaccgctcggctatatcgtcaaggcgcatcatgagcccacgctcggattcggcgtggatgacggaaccctgcactccgatttctacgtgtcgccgattgacgggccggaggcggaggcttcgccggtcacgccggtcacacacatcgcgttcctggctgacagtcagcaagccgtgcaggcgttccatgcagccgcgctcgccgccggcggccgagacaacggcgctcccggtccgcgcccgtaccatcccggctattactccgcattcgtgctggacccggatggcaataacatcgaagccgtcgtggattgggctcattcgaacgagtaaaaaacatatccgtgtcgtgcctcaggcagcatcgacggcgtaggctccagtcagtcggatttgtggtcgcgacggcgttataggtcacatcacgcaagcgtgacggtgacggtctgctcggcggtttcggtgccggtccatgtgccggctctgcggttccaatccatgccgtccgcgtgcagtgcatcaatgccgtattgatgcgcctgtgtgaccagccaccctgccgtctgccagcaaagtcgagtgcggttgtcggcggacaggccgtccggcagcgtgatcgtcaacgttgtgctggccgtattggtcgcagcgccgttgttcgtgccggttttgccatttaggggcataaccgagaccttgacattcggcagtgtagcgcttatggcggcaaccaacccgtccgcgtccgaggaggttgctggctccaacgcgcacgtgacgcccgccgaccgttcgccggtcagccccgaggcccaagcgcgtgccatcgcatcccatgtggcatatagttccgggtagcctgagcgctgcacctcctgcgcggcgtcctccaccggaatcgtctcccaatccggcacctgcagcagatggtcgtagaagatgtttgtcgcataggtcatgtcggacacctgctccgccgtgccccagccttggctgggccgctgttggaacaggccgagcgaatccaagtcgccgtagtccagattcgtcagcctcgactcctgcatggccgtggcgatggccaccgtcgccgcgtgatccggcagtccgcgcgtgacggcgatgttcgcaatcagcgccgcgttctgcgcctgatcaggcgtcaaggtgcggcgggctccgtcgggcgacaccgccgcgcaatatgcttcctcggccgtgcgcgcggtctcgtgaggcgtgaatagccgtggcagcagcgtccatgccgcgatcagcgccgcaacaacaagtatgacggctgcaatcagcgcgcccgcgccatgggagcggcgtctgccgcaccgcacctgttgtcccattgcgcctccaatatttcggtgtcatggctgaccgtgaccggctggcctatgcagcatgcgagatttgtcgtgttccggctcggccgtcatcatgacagcgtggcatatccacctgaacggcggctgcgccatcacgcgactttgtgacaattcttcacgcttcctgacatccgcgcaatcagaccggggaatgatacaccgacatctctattgcaagttcgacgcagctgataagtcgattcgcaatcgtctatttgcgtttcaaggggctgatttgctcgttccgagacatccacttccgtttcgaggggctgatggccgagtagcgacagctccaaaacggcgaaatgacgttggcatgaagccattcgtacttgggttttggccaatgaccagccccttgaaacggaagtggatgtccccaaaccacgaaatcagcccctcgaaaccgagaatggcggtcgggattgctccgacaccaggggagctgctgccgctattgtgtgaaaggcgatttgtaccgggttgaaggagaggaacacatggcacaattgcagccgtactgcgcgattgagggcaatgatgatggattgcccgtcgtgttcgtgcatggcatgggtgtggaccatcgttcgctgatgatgctcgacaaggcgtttgacggcaatgattcaattcgccgtatatatctggatctgcccggtttcggccgtacgccggcattgcccgagcatgcctgcgggctgccggaaatggcggattggctgcaaacggccattgacggccttgtcggtaaagcggctccattcgccatggtcggcaactcgatgggcggtgcgcttgtccgcgaagtattggcgcgcgaacctcgccgagtggccggtatggcattgatcgcgccggtcgtggacccgcagcatgccggccggcatgtggccgaacatgtggttgcacagcccaatcccaagctgacgcactccttgccacaggaacaggtgttcgatttcattaccatgggcgtcaaccagtcattcgacgcgtggcggcgctaccaacggttcatcctgcccggcgtggcgttgtgcgaccgtgcggcatgcgaacggctggatcagcgttattggctggccgataatcccgaggaaatgctcggcacatatgcgggtccggtgctcatcgtcaccggcaagcaagaccagatcgtcggatacgaagaccagcaagccctgttgccgcactatcccaacgccaccttcgtgactctggataatgccggtcacaacgcgcacatcgaccaacccgaagccgtcatcacgctcgtgcgcgaatgggtggctcatatggcgttcgttccgttgagctgacggtctgctgacagtctgccgaagcctatatgcatatgagcgaccaatgccggttgacgcaatacgccttgcaaggtatatcgtttttcgatatagtcatatcgatgttcgcggtgtcgccaaaaacgtcggcacctgaaaggaccgggctatgaaaaactacatgaaccgatgggtgttgctcgcgttgaaagccatcgtgattctggtctggctggcctgcctatggggccaactattcgccgtaccgggattgagcggcgcgctggccggcctctgcccgagccagacgtcgatgcactggtcatgtctcattatgggcgtgctgttcctgctctgcatcgaagcggcgttcgtggccgtatggaaactgttctccttgtccggatcgggcgcgaactcgagcaggtgatttgagatgacgattcgcatcaatctcgacgtcatgatggccaaacgcaagattggcgtcggcgagctcgccgaacaaattggcatcacgcccgccaacgtgtccattctgaagaacggacgtgccaaagccgtccgcttcaccacattggacgccatctgcaaggcactcgactgccaacccggagacatcctcgaatgggaagatgtcgattgatcgacacgccaccggctcgaactcatggttcaacttgtagtctctctcaaaatcaatgatgccctatcatcctgcaagacgatagggcatcagcatgtgattatgcgcagctgatatgtcgcgttgttatcactcggcgtctgcggccggtgcctccttgggcgcggagaggaagtgctcctcgctgggcagcacggcgttcagaattacggccaccacgaacgacacggcgatgcagttcgaggcgaagatttgttggaacagtgccgggaactgcgcgaagatgtcgctcacctgggtgaagccgatgccgatggtcagcgaaagcgccgcaatcgtgatgttgcgctgcgtgaagcccgcttcggcgatcatctggaagcccgaaagaatgatgttgccgaacatcatgatcgtgcagccgccgagcaccgcctgcggcagcgagttgaacacctcggcgatggccggcacgaagctcgccagcaccagaatcagtccgccggagagaatcaccttgcggttgacgaccttggtcatggccaccaatccgatgttctgcgcgaacgaggtcagcggcaggcatccgaacaggccggatacggtggagatcaggccgtcgccggcgatggcgcccgcggtctcgcgttcggtgggcgtacggttcaggcccaccttggtcagcgcggcggtgtcacccagcacctcgaccgaggagacgacgtagagcaggccgatggagatgatcgaaccccagtcgaactcaggcttgaacggcatgaactgcggcacggacacaatagcgaggttctggaaaccggagaaatcgaccttgcccatgcagatggccgccacatagccgaccaccaggccgaacagcacggacagctgcttggccgtgcccttcatcaacagctggaacgccaggcaggcgaccaaagatataagcccgagcgtcaggttctgccagcttccgaagtccttggctccgctgccgccgccgaagctcgtggcacccacgttaagcagcgagaagccgatcgacgtgaccacgatggcggagacgatgggcggcacgaaccgacgccaatacttggccgtcaaacccagcacgagttccagcaggccaccgaccattaccgcgccggccactgcgccatagcccttgtctgcgcagatcgccacggcggccgccacgtaggtgaaggagatgccggtgaccatcggcagacgcgagccgatgagccacgcgccgtacagttgcaggcaggtgcccaggcccgccaccagaaggccggcctggatgatggtggccgattgggctggggtcattttcgcggccgaggcgacgatgaagatcggggcgaggttcgccacgaacatggccatcacatgctgcaggccgaacggaatgcccttccagaaggatactggcgcgttcagcgaagacagcgcctcaaaggatacggaattcttggttttcttctctgacatgattcttttcttctctctgttgctcccgctggcgggagcagtcaatgtgctcagtgcctaaatgtgatttcgccggtctcgggattcatggactcgacgatggccagcgaatccacatcgtagccttcggcacgcagcgcgtcaccgccgccctggaagcccttctccacggcgatgccaatgccctcgaccgtgacaccggccgcctcgcacaggtcaatcagaccgcgcaacgccttgccgttggccagaaaatcgtcaataagcagcacatggtcgccggcgttcagatacttcttggccacgatcaccgggaactccttctgcttggtgaaggaatagaccgtggtggtgtactggtcgccgtcaaggttgatggactgcgccttcttggcgaacaccaccggcacattgccgaaatgctgggccgccacacacgcaatgccgatgccggacgcctcgatggtcagaatcttggtgatgtgcttgccggcgaaatgagcggcccatgccgaacccatgcggtcgaacagacgcacgtcgcactggtggttcagaaacgcgtccaccttgagcacatcacccgccttcaccgttccctcgctctggattcgctcctcaagttcctgcattagacctcccattgctgtatgtcagtgaatgatatggatacttgtaagtgtacgttgtcctgcgctgacccgtgcatgtggtaaacatgaatgtcgcgattcaaagggaggcaacagtgtacgacgagccggaagtcatcgcacgcagcgcgcaggaactcgtaggcgatctgaacccgcagcaggcggaagccgtgcaataccgcggtcaggcgctactgatcggcgccggtgccggctccggcaaaacccgtgtgctgacccgccgcatcgcctggatcttgagccagttcggcgcatggccgagccagattctggccatcaccttcaccaacaaggccgccgccgaaatgcgcgaacgactcggctcgctgatcggcccggtggcccagcgcatgtgggtctccaccttccattccgcctgcgtgcgcattctgaggcgcgacggcaagtccatcgggctcaagtccggcttctccatttatgattccgccgactccgaacgactcgtcaaaatcatcgccaccgaattcaacctcgacatcaagcgctacactccacgctcgatcctcggccatatctccgacctcaagaacaatctgaccggttggaaggaaaacctcgccgttcacgcgcccgacttcacgcctggccagcgcggctaccagttcggcacggtgggcgaccttgaagccatctatgcggtgatctacgccgaatacgagcatcgcttggccctggccaacgccgtcgacttcgacgatctgatcggccgcacggtcgagttgctgcgcaccgacccggccgtcgccgagtactaccatcaccgcttccgttacattctcgtcgacgagtatcaggacaccaaccacgcccagtacgtgcttgtgcgcgagctggccggcgtggacacgggggagaaggccatcccgggcgcgccgaacgccggcaagtccggccccgcctggatcaccgtggtgggcgattccgaccagtccatctacgcgttccgtggcgccgacatccgcaacatccaggacttcgagcaggacttcccgaacgccaagaccatcatgctcgaacagaactatcgttcgacgcagaccattctggacgcggccaacgcggtgatcagcaacaacgagggccgcaagcccaagaaactgtggaccgcgctcggcaagggcgagccgatcgtcggctacgcggcggacaacgcccagcaggaggcccagtgggtggccaccgaaatcgcgcgcctgcacgccgaagagggcatctcctactccgacatggcgatcatgtaccgcgccaacgcccaatcccgctcgctcgaagaggcgctgatcaacacgaatcagccgtatcagctcgtcggcggcaccaagttctacgaacgtcgcgaaatcaaggatgcgctggcctatttgcaggcgctcgtcaatccggacgacgatgtgaatctacgtcgtattctcaacgtgcccaagcgcgggcttggcgaccgcgccgaaggcgtgctgctcgcctacgcgcgcgagcatggcaccagcttcttctacgcactcatgcacttggatgagatcgaggtgccgacccgcaccgccacctcgctacgagcattccgcgatctgatgggcgcgctctcgcagttcacgcacgcgcacgactccaagcccagcgagatcgtggccgaagtattggagaagtcgggcttaagggccgaacttgagaaatccgtggatccgcaggacgcctcccgtctggagaacctctcccagctgcagtccaccgcagccgaattcgaacagaacacgcctgacgccacgttatccgcattcctggagaccactgcgctcgtggccgactccgaccagctgcccggtgaggcggaggactccggcaaggtgacgctcatgaccttgcacaccgccaagggcctcgaatacccggtggtgttcctgaccggcatggaacagggcaccttcccgcattcgcgttcgatggaagacaccactgaactgcaggaggaacgccgactcgcctatgtgggcatcacgcgtgccaagcagagactgtatgtcacgcgcgccgccgtccgctcccagtggggccaggccgccgatatgatgcccagtcaattcctcgacgaaattccggattcgctgattgattggaaacgccgtgaagccggcgtggagcgtatgcgcgccaactgggagaccgatggattcgccgacgatttgggcggctgggatgatgacgatttcggcggtgccacgtttggcgggtcgtcgacgttcggctcgcgtggttcgtccggttcgggttcgtcctatgggtcgcggtcgcggtatgggtcgtcgtatggctcgggttccggctcctcgtcgtatggttcccgttcaggttcttcgtacggttcccgttcatcatcatatgattcccgctccggctcgtcctcctacgggtctcgctcccgttcggggtcgtcttacgggtcgcgttcccgttccggttcttcatccggttcatatggcggcacccgtggcggcaaggtcaccacgcgccgcaccacaccgaaatccggttcgaccggctctgccgtgcccagctcgaagctcaccaaggacaatggcctgaatatcgccgacttcgccgtgggcgacatgatcagccacgaccagtacggtctcggcaaggtcaccgacgcgcaagacaagggccgcaattcggtaatcaccgtggacttcggctccgccggcgtcaaacgcctcatgctccgcgtagcacctattgagaagttgtagatagattggcccctctgacgaggggctgagttatataccaaataaattcacaaaaaacaagacttgtgttcttcatcactatctgggcataatgcggaggttgcgcctacgagccctgggaacaggggagaggaaaaagtagttatgaagaacaagctgtttgcatccgtgcccaatattctgttcggcgcgctgatcaccatcgcgccccagacctttgcgcacgcctgcaccggccatgacatgccgggtgcctgccactactcgcagcaggcggccaccggcatcggcgtcgtcatcctcgtgtttggcgtcgtggctttgttcgtcgccccgcagattcgcatcggcctcaatatcgccgccgcagccaacgccctgctactactcgccgtacccaccttcctgatcggcatctgcaagggcgcgatgatgcactgccgcatggttatgctgcccacgctcatcgtgctcggcgtgctcaccatcgtgttcgcggccatcgccatctggctcgactctcgcgccgccaagcgcaactgatcgagcagacggccggagcccagccattccgaacgctggactccggtctcgcttattgcaaccgcactataagcaacataaggactcatcgtgccatcccatatcgcattgcgcggccttccgattgaaaacctcaaacgcaagccgttccgcaccggcgcactgctctccgtcgtcaccatcctcgcgctgacgttcttcggcggcaccatgctgaccatgaacctcaacaccggaatgaccagtatggaaaaacgcctgggcgccgaccttatggtcgtgccgcagaacaccgcgcagaaggccgaagcgctgctcaccaacggcaatcccagcactttctatttcaccaaagacatcgccgacgaggtcatgcaggccgacggcatcgcacaggccaccgaacagacctatatatcatcgctggccgccgcctgctgtgccgaaaagctacagatcatcggttacgacccggacactgacttcatcatcgaaccatgggtcgcatcccagttcgaaggcccccttgaagacggtcagatgattgccggcgcaaacgtcaacgtgtccaccgacggcgccatcgaactctatggccgttcatggccggtcgtcgcccagctcgccaacaccggcaccagcctcgacaactcggtgttcatcaaccaaaacaccgtgcccgacatggtcgccgcctcggccaaggtctccaagcaggtcatgcccgccgaatatgccggcaaagccgtctccaccgtgatgattaagacgcagcgggggtacgaagcgcagaccgtggctgagaacatcaagcgtcttgactcccgattcgccgatttgggatacgtataccccggcggcatcaccgccaacaccagaacttcgctgaccgcgcttgtcacctacctcaagattttcgtggcggtgatctgggtaatgggcgtgattgtgctgctcgccgtattcgcctcgtcggtgaacgaacgcaaacgcgaattcgcgtccctgcgcatcatgggcgccacgcgtggcatgttgaatgccatcattctgaaggaatccgccatcatcggtctgatcggtggcgtaatcggcgtcggcgcggccagtctggtgattttcccattcagttcgctgatcggcaaacagcttcaattgccgtatctgcaagccagcccggttgcggtgatcggattcattgccgtgaccgttgtgtgctctacgatcatcggcatcatcggttcgctggccaccatgtggcgtctcggccggcccgaagcctacctgaccctgcgagagggggagtgatatgactgagacaactacgccgcttcagccgaccacggttgggccgaccaggctcccgccgaccacgccagctcagccgaacgcgccgactgcgccggattcgccgcacgtaaccgagacaccctccccggaccatctgctgaccttgacggacctgacccgccagttcgtccgccgcggcacgccgttcgacgccgtcagccacgtgaacctcatcgtcgatgccggcgaattcatcgccatcgtcggccggtcgggcaacggtaaaagtacgttgatcaacatggtcgctgggctgattcgcccgacctcgggaaccgtgagcgtggctggacgcaatgtggccgacttgggcgataaagcactgtccgtgctgaggaatcgcaccatcggattcgtgactcaaagccagaccctgctcggcaacctgaccgtgctcgacaacgtgattctgcccgcaacgatgtttccggagccgctgccgttcgcccaaaacgcagaagcaacggatgccgttgctcaggtggacgctgttgcgtcgaccgatgccgtggcacaagccgctgccaccaatgatgaagcagccgccgacccgttcatgccggatgtcattgcgccaatcacagaccgggaaaacacgccgtcaaacacggctgcgagccgtccggacctgttcgccacccgagctcgcacgctgctcacccagcttggtgtcgccgatctggcagacagctacccgcgcgagctgtccggcggtgaaatgcggcgcgtctccatcgcccgcgcgctgatgaaccagccgagcctgcttatcgccgacgagccgaccggcgatctcgaccaagagagcaccgacatcgtaatgcgtctgctcaaagaccaagccaacaacggcacagcgattctcatggtcacccatgatcccgatgcactcgaatacgcagaccgggtgtatcgcatggacgccggagtgctgtccatagcctcggtgtaatatgatttgctggtgtctgccaacaggtagataccgtctggagtcatagcccatcagcgggtcggcggtaggtgatcgcaagaaaaccaacccgttcgtgtttgttcacgacgaagcgctggggaggcccggctcagcgcttgtctggcatgtgcgagacaagcgttccgttcagataacgacagaaggattaatccaatgacgaacgttcagcgttctcgccgtcaggtgcgtctgtctcgcgccctcggcatcgcactgacccccaaggctcagcgcatcttcgaaaagcgtccgtacgctcctggcgagcacggccgtgaccgccgccgcaccgagtccgattacgcggtgcgtatgcgcgaaaagcagcgtctgcgcgctcagtacggcatctccgagaagcagcttcgcgccgcttacgagaaggccacccgtactgccggtcagaccggtaacgccatgctgaccgacctcgagacccgtctcgacaacttggtgctgcgtgccggcttcgcccgcaccaccgcccaggctcgtcagttcgtggtgcaccgtcatatcctcgttgacggcaacatcgtggaccgcccgtcctaccgcgtcaagcccggccagaccattcaggtgaaggccaagagccagaccatggttccgttccagatcgccgccgaaggcgtgcaccgtgacgtgctgcctgcggtccccggctacctcgacgtgaacctgccgtccctgaaggccactgtgacccgtaaaccggaggtcgaggagatcccggtgcaggtcaacatccagtacgtggtcgaattctacgcccgctgattcgggcccccttatctgaaacatcagaatcaaggacataccgcttggaccccgctcccgcaagggacgcggggttctcgcgttccggggcgcgggcgttttcccggagactggatgaacggaatcacgccgttctgcgcaggaggaatggggcggactttgggcttgagctgcggcgccgggcgctcatctcggtgttgtcacctgcagtgtgggtgatctggatgttgttgttgcgatgtgtccgttcggcacattgatcgaatatcttctggtctacggatgcgggcaagccatttcctggaaggcgtttcgtcgagattggcgggagcttgcgtcagcaggcgtcgatgaaggcgctgaggatgcggcgttggttgctatcggcgcggtgagagaactcaggatgccattggacggcccagacgaaacgcttggccggcatccagaccgcctccacgatgccgtccggtgcagtggccatcggttccagtccctggcccagcgtgcgaatcgcctgatggtgataactgttgacgcccagcgtataggcgcgcggatgatacggcctgccgaaggaatcgacctcatc

SEQ ID NO: 135 - DNA, 3074 bp, Unknown
  R206_24m  MAG No. k141_40671
caacagctgcggcttggaatcgagccggctcaggccatgccatgccaggtccacgatgtacgcggccagctgctccttgctcaccttgggccggtcggcccagtactggccggtgaacacggtcatgcccaccagcatctgcgcatagtacggcacgcctttggtggagagtttctgccgtttgaacgtttcggaaaggatgtcttcgacgcgcacggcgatgtctcccagcagtgagctgaacgagccggacggttcggtgctgggcgagtcgcgcgccagcacctggaatccctcggcgtcctcttcgatataggtgagcagtgcgagtgcggtgcgttccacgatctggcgtgggtgcacggtcggatcgtcaagcgcggcggtgagcacactggtcaacgcgcgcatctcacggtccacaatgacggcgtacaggccctctttgccgccgaaatgctcatatacgatgggtttcgatacttttgcggtggcggcgatctcctccacgctcactgcttcaaaacccttcgacgcgaacagcgaacgaccgatttcgatgagctgctcgcgccgctgatacgacgtcattctggatgtattggccatgctgtccagtttttcacgccccgtggatagctccctgaccgtccgcccccacgtatcgtccgattctggcgaatcggacatgtgtgtcatattgacaatgcttcatcgcggctttaatatatttaataaataattaattttattaaagggggtgatgtggatcgtctaccagaatggttggccagccttacggaggaggatttggccttcatcaagaacttcgtgctatcgtcaggatctctgaagcaaatgtcccagctgtatcaagtctcctacccgaccatgaggatccggcttgacaggcttatcgaaaaaatacggttgaacgacaacgatacggaggatccattcatcctcttggtgaagagtctcgccattgacgatagatacgacgtcgacacggctcgaatactcatagacgagtacagaaagagaaaggatgaatcatgagctggacatggattgcattattgattgagacctaggcgtaatcgccgtattcgttctggtcttcctcatcgcgaggagtctgattcgctacgcaaattccctaaagaaaggaggcagtccttcaaagcagacagcggaagacaaaagaatcactcttcatgatctataaaaacgtcaccagatgtatcgaagtcaagatcgcattatcgatgccttgcatggcagagcaccttatccccctggcgaatcggacattcgtggtgcgtccgcggggcggagccggtgtgtccgttgcgcttcttaggctggagccatggatacgaatgtgattattgcgattgtcgccgtcgccgtcatcgcggcaattctggtgatcggcggatggtggttcggcaagagccgcaaggctgccgtggccaagtccaccgaagccgcgaaagccaaggccgacgcccgtcttgctgcggaagcggagtcggccgcatctgattcttccacggtgaagccgtccgttgattccaatgttgatgcagctgaaaaagctccggctgaaagtcagcagaagtcctcagctcaagcttcctcttccgaaacggcggctcctgcaccagccaccgaagccaagcccgaaccggttcatgacacccccgaatccgccggcacacgcatgcagcgtcttaaggcgcggctgtcgaaatccggcaatccgttcggcaaggccctgttcaacattcttgcgaaggatcagctctccgaagccgattgggaagacgtcgaagacacccttctgctcgccgatgttggcgcggaagccagcgaacagctcgtcgaggaactacgcaacgacgcccgaatcgcaggccagtccgatccggccgaagtgcgcgcggcgctgaaagacaaactgctcaagctcgtcggcactgacatcgaccgccggctcaacgccgacaaggacggcgcgaacaagccgagcgtcgtcatcatggtcggtgtgaacggcactggcaaaaccaccaccgcgggcaagctttcccgcctgcttgtttccgaaggcaagcaggtcatgctgggcgccgccgataccttccgcgcggcggccgccgaccagttggaaacctggggcgccatggtcggcgttccggtcgtccgctccgacaaggacggtgccgacccggcatccgtcgccttcgaggcatccgccaaggccaaggaagcgaacgcggacgtgctcatcatcgacaccgccggccgactgcagaacaagtcgaacctgatggacgagctcggcaagattcgccgcgtcaccgaaaagaacctgccggtggacgaggtgctgctcgtgctcgacgccaccaccggccaaaacggcatggcccaggccaaggtgttcgccgaagccatcggcattaccggtgtggtgctctccaagcttgacggttccgccaagggcggcatcgtgatcagcgtgcagaaggagctcggcgtgccggtcaagctcgtcggtctgggcgaaggtccggacgatttggcacctttcgatcctgaaggtttcgtggacggcattctcgcgtagacggtcgagctctcctcagcgaggggagccctgcgtccgtccacgttgtgggcgcgggaaacgcccgcaacgcaccaaacccagccccgaatcatattcgaaacatgattcggggctttcccgtatacgttggaatcatgccggaatcagcccacccgacatcaacctaactgtcagccacgcttaacaatcgcgtaacttggcgtaacgaaaccaaaacgagaccggctttaactgacaaactgttagcccccataagggggacggcattgtagagacaaataagacgccggccgcacaaagcccccggtgccctgaacgaaagagagggaggtagacatgggagcgattgattccggtaacaccgcatggatcctgacatccgcgtccttggttttcctcatgacgcctggtgtggcgttcttctacggcggtatgg

SEQ ID NO: 136 - DNA, 3964 bp, Unknown
  R206_24m  MAG No. k141_42364
cgagatacaggccatcgtggacgagaccgacaaccgtcccatgcgcgtgctcggctaccgcaccccggccgaggcattcgccgacgaactgctatcattaaccgaacaacaaggatgttgcacttctaaatagacaacggggtgactaacgaagagacggcggtgttctacactggtagccatgtctatcgcatcagtagaggcccaaaaacagctcgaccgtatcgtggctctcggctatccggatgtggcggatatttccgccgccgcattccgctcgctggcccgacccctgatcggggcgctcgagcattccgatttgggatcgaacatcctgctggtgcccacgcgcgaactggtttcgcctgagtcactgatcgcacgaacctccatcaatcgcatggccggcttcaccaccatgccgccgcgtgacatcgccagcttcctgcctcaagacggcttcatgccgccggaaggcccgttctatctggtcgtcaatccgcacaccggcacgtgttatatcaatcgcgagccggacgtggcccgcaagcttatcgactccgatgaacgcctgccgctcaccctcgaggaaggcttggccatcgccacccagcacccggagtggctgctggaaaagaacggcttcaatctgctcggctcacgctccgcagacggccgcgtgccgagcatctggatgagccagaacgcaccgcgactgggagctgtctggcccaattcccgccatacctggctgggcaacgcgtattgcacggcccgtcgcggggtgagtctgtttaagtaggtttagcgcgcggccttgatcagcgaacggatgatggctataaagccaaggctcatcgcgccggccaccacggcgaacacctgcgggcggcgcagctcgttgcgtgcgctgaccgctccggtaacgcaatgatcctcgaaccagacgcgcagctcgttgctggagtagcggccgaccagattaccccatgtgagcatgcgggtcacatagcccgccggattgctctcatggaattcaaataggcgaatgccgcggtaccgcgacttgggaccatagcattcgaacccgcacgtgggtgcatagcccagatcgatatcatgcacatgaccaacgaaagagttcttatggtcatgcccgcagaacagcgcgaaatagccgccagcctcgcgcaaggcatccacctcgcccacattctcgtccgcgcagccgattgcctcgccgagccgcgagccggggcggcagacctcatggttgagcacatagcaacgcccggcgtgcgtgcgcgcgccttccacggcgttcggcgtccatgcgggcacttccttcagacaatcgtagaattcctgcggcggaatgtgctggaaggcgatggccggcacgggcttgccgtcgccattgcgctcgcccaactcggtttggacggaccccagccattcgatggccttgggggtgggggtgccgtacccgtcggcgtcggccaggtcgagtcctcgcggattgaccacatacgccgggtattgggcatcgttttcttcgggtttgccggcataatcgcctgaattgaccatcataacggacatggccacgcggccggaaccatcggaggactcgacgggcagcgcgaacgtgccgggctcgagactgtcgtcggggttcaggcagccggggtattcgcggtagatgtcatcctgttcgtcggccagaatgccgcattggaagtcgtggttgccgtaggtggcggcaaagggcacgccggcctcgacgaccggaccaaggaaaccggagaacgtgcggcggaccttttcgcgggtctcattcatgagttcgtcgagggtcgccggcgtctcgtgtgcggggctggccttgccggattgcgttgaatatacgagggtggaaaccgtctcgggcgtggggctggtctcaacggaatcgcctacttcggaagtcgtgatcacgtcggtcgaatcggcgccggcagcggcgacggcgttcgtcacggtatcggggtcaagcagcgcggctggtacaggcttgccggcttcggtgagacgatcggccacgcgatcggatactttgcgaattacggggtgacgcttgatcccgcggattttggcctcgatctcggtgaccgcgcgcacgcgagcgcccggctcctcgccgcggcggcgcaggaacgtgtcgatgtaggcgggatcatagccgcggatctggtcgccggtgaacaccacaagatccggatcggcttcgcggatggcctcgcggatgaggcggatggtgtcgggcaacacatcggggccgtcctgtacgtcggccatttgcagcacgcggaagctgccgtcttcgcggaatcgcaagctcgtcatagctcttcagtctatgttgccgggcggcggatcgcccgcgcgttcacaggactggcacagcaagggacggggcagggcggggtgccgcagccgtgttgttgcttgatggtgccgcgattttgtcatgcagcgtcggtggagatccagacagcgtccctatgctgacgttctgagaccattggcgtcgttactgattcatggaatggcccggcgccgacgctcaaagaggctagcgtcggcggtgggccaatatttgtcgcgttgccgatggttgtgggcctcgtagcgtcgatagtgtgccatagcctggcaatttgccgacgataagctttcccagagtcggtatttcgccataagttggtccgctgacgacgctgagcagtttggctgtcggtgcagtaccaatatttggcccgccgccgacgtatggagggccatctggtggggtatcgcaggcggggtgttgtgccggagtcaaagcgtggtccgctgacgacgctgagtgccctcatatcagccaggtgcataagcaaatgccacgatacggcatttcccgcgggtttgcccgaaccggcctgtaggatgttacgtgcgtattgacaaatccgcgtggcccggcgccgccctggcacaacgccgcagtcgcgtccgcaagagggcccgcgcaataaccagtaaaggaggaacaatgggtcagggtcaatcatccgtttttgatctcgcggcagtggctgcggcgtccaatggggggaacaacgacccgctgctgcctccggcacgattcatcggcgatccgcagaagccgagtcgtatgccgtataacaagtacgccgcctacgacaagcagatcccgtttgattacccggagcgcacgtggccgggcaagcgactgcagcgcgcgccgcgctggtgctccgtcgatcttcgcgacggcaatcaggccctcgtcaacccgatggattccgagcgcaagctgcgtttctggaacctgctcgtctccatgggattcaaggagatcgaggtgggcttcccgtccgcttccgaaaccgatttcgacttcatccgtatgctcatcgagcgtgagctgattccggacgacgtgaccatcgtggtgctcacccagtgccgcgagcacctcatccgccgtacttacgaggcgctcaagggtgccaagcgcgccatcgtgcacttctacaactccgtgtctgtgctgcagcgcgaggtcgtgttccgcaagaacaaggaagagatcaagaagctcgccaccgacgccgccgaactgtgcaaggacctcgagaacgaggccaagggcatcgacctgtactacgagtactcgccggaatccttcaccggcaccgagccggagtacgccgtcgaggtgtgcaacgccgtgatcggtgttatcaagccgactctcgagcacccgatgatcatcaacctgcccgccaccgtggaaatgaccacgccgaacgtgttcgccgacgaagtggagtacgtctccacccacctcgacgaccgtgactccgtagtgctctccctccacccgcacaacgacgaaggcatgggcgtggccgccacc

SEQ ID NO: 137 - DNA, 14116 bp, Unknown
  R206_24m  MAG No. k141_43050
agaccgagggctagtgttcgaggtctacatccacgtcccgttctgcttgcggcgctgcggttactgcgacttcaacacctacacggctacggatcttggtgcgggggcctcgcgcggcaactatgccaatatggtcattcgtgaaatggccctgaccaagcagtggcagctcgaccacggcatcgaggagccaccggtctccaccgtgttcttcgggggtggtacacccacgattctcgccgcccgcgatctggtcgccatgctcgatgccatccgcaagatctggagcatcgcgcccgacgccgaaatcaccaccgaagccaacccggacacggtcaacgaatattacatcaatgagctcgctgccggcggcttcacccgcgtttccttcggcatgcaatctgccgtgccgcacgtgctcaaaaccctcgaccgcacgcatacgccggccaacgtggccgcaggcgttaatgccgccaataaggccggcctgcgctccagcgtggatctgatttacggcgcaccgggggagagccttgacgattggcgcacctcggtcacgaccgccatcgacctcggcgtgaaccacatctccgcctacgcactgaccgtggaacccaccacgaaaatgggtcgtcaaatcgcggccggcactctgcccaaacccaatgacgatgacgaagcagccaaatacgaaatcgccgacgacctgttcgccgccgccggcctcgaatggtatgaggtctccaactgggcccgccccggatacgagagccagcacaacctcggctattggcgcaacgtcgattgggccggtctagggccaggtgcccactcccactacaacgcggtgaccgaggctgaccacccccagtcggcttcgctgacagcccccgccagcgggggcaagtccgaagccattgcctctgcctcagctgatggacaggccaacgccgaacttggagaaaccaacgccgaactaggtatgatcaacgcgcatgggaacaactcccaagaaattcatgcccccgctggcgggggctgtccggcggatgccggactgggggtggtttctgtctcacacggtctgcgcagctgggacatcgcgcacccgcgtttgtggggcacggccatcaacgagaaccgtgtgccgtgggccgatagcgagacgatcactcccgaggaaaacctcgaagagctcatcatgctcgggctgcgcctgcacgagggccttggcctcgaccgcatcaaccgcgccatcaacgatgcaggtatgagcagcacgccccagactctccgaaccgtttcggttgaccaactcgcccccatgatcagcgaaggcctgattaccgtatccgataatcatcgagtggtgcccactcgtcgtggccggttgctcaatgactcggtaatcgaacagttcttcgattacgtcggtgtatgagtcggtggtatggtgcgcggcagtcgccattacccgttcgctagttgtggttacaccgtcagagggagcttttttgttttaccggcgggggagggaaccgcgtaggactacgtccggggcgctttgcacgtagatcaggcggttggcagtgccgccggtggcctccgcgtcatcgcggttggacaggatgctgtccacggcggcctggcccatttcggccagcggcaggtgcacggtggtcagtggtgggaacacgtcggcggagtaggggatgtcgccgaaaccggtgacgccgatttcctgacccggctcgatgccgttggtgcgcaacgcggtcatcgcaccgatggccatcacgtcgttgagcgcgatgattgaatcgatgcctttgccgtcgtacagtgcgccttcgcccggcttcagcagtccggatcgggccatttgcatgacggccgcatagccgtcggtgcggctgaacttaccgtttgccacggctttcgggtccacggtgatgcctgtctcgtccaacacttccatcacaccggccagtcgttctttggaggagcggtgtgcgtcatcgcccttgagaatcgcagggcgcgtatacccggaatcgacgataagctttgcgatggcacgcgcgccgacgtcgttcgccacgtccacggccgggaagggcaggttgcggttgagtacgaacacggcatgtccgccggacgattcgtactggatgagttccgtctgcaacgcctggcgttccggcgcgtcggtgtattcgctttcggagatgatgatgccgcgcggcctggtggatacggacttacgcaccgcctccaactcctcgtgcggggtggctgccacgccgatggtcacggagatgccgcgttcggccgccgccttgaccacgccttgcgacacggatgcgaagtagggatcggagatatcggagaccagcagcacgatgttcggtgcagtgcctttggccactgcctgagcataggcgttgggacgatagttgagcttggtggctgcttccatcaccttgacatacgattggttgcgtaccttgcgggtgctgccgttgagcacacgggatgcggtggcgatggagacctgggcttctttggcgacgtccatcaatgtcgctggcgattgcgccttatcgttctgtacagccacgatcgaatcggtccttttcttccctgaaacggaaaacatgtctaaacgcttaccgcaatgatatcgcagttttgcttgcaatagtagcattgtggattggaaagcctgaattttgaacaaaaataatcacgcgaattatggaaagcgcttaccgttccgcgtgtcgtgcggtatgctcgaagcatgacgcgatacttatgtgcccctgactccttcaaagagagcctgaccgccatggaggcggcccgggcgatggctcaggggattgagaatgccgaccacgatgccgaggtccgttgcctccccatggccgacggcggtgaaggcaccgcacgtgcgcttgtcgacgccactggcggatcgatgcacgccgtgccggtccacgacccgctcggccgacctgtcgaaggccacttcggcctgctcgccgacggcacgaccgccgtggtcgagacagccgaagccagcggcctcgcactgcttgaagccaaaaaacgcaacccgttgattgcctcctcctacggcaccggcgaactcatactcgccgccgttcgttccggagccaagcgcatcatcgtcgggctcggcggcagcgccaccaacgacgccggtgccggacttctgcaggccctcggcgttcgtcttctggacgggaacggcaacgaccttaagcacgggggagcggccctcgctgatctggccaccatcgacatcagcacgatggacccggctctcaagaacgtctccatcaccgccgcctgcgacgtgaccaacccgctgaccggtcccaccggcgccagcgccgtgttcggaccgcagaaaggtgcctcccaggccgacgtcgccacactggacgccgcgttggcgcacttcgcgcaggtcatcaaaagccggctcggcgtcgctgtgaacgacgtgccgggcgcgggcgccgccggcggtatcggcgccgcgctgaaaggcttccttgacgccgaattccgtccgggcatcgccatcgtcatcgaacaatccggacttgatgcggccgcgcaatgggctgacgtggtgttcaccggcgaaggctccatcgacttccagaccaagttcggcaaaaccccggccggcgtggccgaaaccgccaagcgccacggcaagcccgtgatcgccgtcgccggacacatcggcacgggcatcgacgaactgcatgaggtcggcatcgacgcggtattcggcatcgcccccggtgccgccagcctcagcgaactgctggccgacgcggccgccaacgtgacccgcaccaccgaacaagtcgtacgaaccctacaactgaagcagcttcacaagctccctctgatgggccgagccgtgaaggaaacgccggaggcgtttccaggcgagggcttgacgacagtcaagccagccgaaggctccataattgcgggacgagctgccgcggcaaagccgtgactgagggggagacttgtggcgcagccgcaaaaaatggcatcggctttcagccgatacagtcattcgtctgcttctctccctcagtcagctgcgctgacagctccctcgtcagagggagccacacaattcggaaagaaagatatgcgcaccatgctgtacaccaaggtgaccagcatgctgagcaccacgggcatcgccagcgagaaatacgccttcggaatcggtgccttttcgaagagttcgttatccatttccgtcccttggtgttttcgttcttcagtcactgcgcgggatgccgttcggcgtgcatcacaggcattgtagaggcaacagtgtggacaacgggcgggggagtatctcatgatgcggtgagggcgttgatgatgacgcatcgtgtattggtggccgtgtgcatcgtatgtgaacctgtgctggcacggcgtacacacgatgggaaaagaaagaatatatggaccccgttgtcccggttattgttcagttattactgtgttgaattattgcgttattcaattattgtggtgtgccggccgattgcggcctgcgggggattgccttcgtatgtgtcgtgcaatctcatgaatgggatcgttcgctagattcagcgagcgtccttgttggcggcgttgatgatgtcggcgaacatcttggagtcggcgtagccggcgcgggcgatggcgtccataccggagagggtgaaaccgcgaatcatggaatccatgaatgacataatgtgttccttgtcttgacttgcaaagccgtgggctttgcgatgtgttgttgtttacgttatgagacgggccgtgtgtgagcggcgagtcagggaagaggctcagcgagcgttcttatcggtgtcgttgatgatgtcgagaatcatctgggagttggcgtgaccggactgggccagggaagtggcaccgtacatagccagaccgcgaatcatggaatccttgagagacatcatgtttcctttcgttggtcaaaaccttgtggctttgagttttgtttatcggtttctttctgaaaccggtttcagaataacgcagtccgatgacaaacgcaaggggactattccgctctcggcgtttctggcggaatatcgccgttctatagataccgttcggtagttaagaggctgtctagtcgactttctgacggtcttgttctgggcgcatggttttcacgaaatggcctcatgtcgcggaaatcgtacgctgagtcgtcgtaagcgtacggtcttcacgaaatggggtctcatctcgtgaagaacgtacactgagtcgttctgggcgtacggttttcacgaaatggggcctatcttcaccggattttgggcacaccggccttgagcagcttggtctcaagattgatggggcgtagcagatcctcatagaacacatggacgatttcggtgacgccctgttcccggagatgccgatcacgtctgcggtcgtactccattttcgcctggaggcttgcgcgattcttgttgctggtgtcggcgtatttggccatgccgtcgtattctgccacgatgatgcggccgtctgcgagcttccaacagaaatcgacgcgatatggcattgcgggattgtcgggattcatgaactgcacctgcagcaggggaatgccgaaagacaattcggtgatctggccacgcatcaatgattcgccgccgttttcgctcaggggatccgcgtacttcagcagcttggtcacggagacctcgtcgcagacgctttgaatcatcagcgactgcacctcttcgatggtcgtcagggactttctcagagccgaatcgtatatgggcagcgcctgtgggaatgggaatgccgcgcagtcgagcagcgttcgcgccggagtcgtcaagagaatgccattatgcttccgcgtcggaatccgattgatatagatgcggttgagacgcgcctcgtctccgccgccgatgccggacttcgaggcgatgtgcactgtgccgtcgtgcagggaatagttgtgctgtagtccgtatacgcacgccgcactcaaccccgcaaatacccactgagggtggattgcggacagcgcacgtatgacctgcaatgactgttgctctctggtcatggtgttccaaagtattcggtcggcgtacaggttcttatacggtgacaccagctccccggcatgcaggcgacgtttcagggcgcgccgttgcgcatcactggtgccatagcagcagcgacgctcctgcttcgcctgctgcagcagtgcagaaacttccttgtgttctttcatatctcgacgctaagggtgattttgattgttgcacaagctcaaccggcaaatgtgaatactatgtcacgcgaattgttggtgtggataacttgaatcgacgtcgacggctttgccgacggtcttgtcggaggcgatattagcctaggacaccttgctgcgccgccttccataccgagaacagtcatcagtgacaccgagggcatcttcagcgtatgttcttcacgaaatcagctgccatttcgtgaaaaccgtacgctcagaatgactcagtgtacgttcttcacgagatgaggccccatttcgtgaaaaccgtacgttgacgacgattcagtgtacgttcttcacgaaattagggatgatttcgcggaaaccgtacactcaccgcaactcagcgtacggttttcgcgaagttattgatttggatataggttccccgtcatgaactacaatgaatcgcggcgaaaaacggggaaccgaagtcggagcgcggctgaacggatatgggtgtgactggatgactgccatggtgatgccggttctccttgacgtacgcaataacaacaactgacaacaacaggggagacaaggatggcgagaagtgcgggccgcacccgaccggtgatcaaggacgtggccagactggccggagtctcggcaccgaccgtctcccggtatctcaacggcaccgtcaacgtcaccgaagacaagcgtgaacgcatcgccaaggccatcaaggagctgggctatgagccgagcattgtggcgcgcgccctgtcgaaccgggagatggactccgtggtggtgttcgcggccaatccttccgccttctccacgtccgaaacgaaccatggggtcgaggccgccgcccgtaaacgtcggttcctgctcaatatcgtttctttggatgagtccgacatggactccgtcaaggctcgtgtgcgcatgggtttgtcgatcaggccggcgggcgtgatcgtctacgagtacgaccgggccggcatcgccgcactggaatacattcccaaagatatgccgatggtcgtggtgggtggcagcttcggcgacggcgaataccagatcatcaacgccgaaagggatggtggccgttggatgaccatgcatctgctggatctcggccatcgcaccgtgttccatgtggggcgcccggaaggaccgaccgataacacccgcaccaatgggtggcgtgacgcgctcaaggagcgcggcgtcacggtacctgacccaatcatcgtgcccgacgatgatttggaggagtcggtcaaggctgggcgcaccttgggccgtcgtggtgatgtgactgcgattttcgccggcaacgacgagaccgccatcgctgtgatccgaggtctaagggaggttggtcgccgcgtgcctgctgacgtgagcgtcgtaggctttgacgaccgcaacttcggtgccatgtggaatccggcgctgaccagttacacccagaacttcctggacatgggggagcggtccttccggatgctgttcgaacagattcaggccaagcgtgccggcgatgacgcgccgccctcgcaggtcgaagtggtgcaaggcaagccgtgtctgcgtgcctccgaacgcgcgtacggcgacggcgaaatcgcgtagtcgatggggcgtgcgtatcaatcgatagtgactgtagcgcattcatatcgtgacgaggagtctcccatgccgaactgtaagcgcttaccttaaatagttcgtaatgtgatttacgtcataccaatagatgttctgaatcatagtgttatgcaaggattccttgcggaaaatggctatttatcaacagttttcgaaaagtccgcatgatgggcgactgtgagcacgctttatggtaatcgctttccgtagtgttattgttacagtgtgacttttgaacaatcggtaactctgaagactcagccccagacctcgggcactatctcagcggcagacgccgcgatgcaatcggcccgcgacgaacgcatccccggcaaactcatctgcgcgatcgtggccgtcggctcactcgcattcttcggcatcctgaccgaaaccgtgatgaatgtgctgttcccgcagctgatgggcgtgctccacatcagcgaggccaccatccaatggctcaccaccggctatctgctggtcgtgtcgattactgtgccgctcagcgcatggctgcgccgtcgcttccgccagcgcagcatcttcctggcggcaacgcgatgttctccacgctgcagcagttcacgggtgcggccggcaccactgtggtgggctaccgtgatctccgtgttccagtccggctcgggcaaggtgggttccgccggctatgccgccgccaccgtgaccggcgcatagattgactacgcgatcatggctgtggtcatcgttatcgttatcgtgttcgtcgccatgctccacgccctgcgtaaccggaagtagatggtaagtcgagtggcaccatgctaccgcgcaatggctgggcatggagttttggctaggaatcgttcgacaggcgttggcgcggccgctgagagcattcgcgtcgaaaggtttgccggagctcgttcggcgtggaatgggccgattcaccggtgattgttggtcaaacagccaatgctgacccttctgccaatggttagcgaggttcctatcataagcatttcggagagcgatctcgaaaaaggcgacatccttcacgaggatttgaccaaggtcaacattccactcgtataaagtaaggctgtaagcgcatcttggtggcaagcgtcaaggtatgtacggaatcgcggggcggaaagccactcctcaatccactgcggattggtaataacggatgattgtaacgcatgaatcacgaggcccccttacctcgtattgcaatgccccggtgacatgaaaaacggcggtcaacacggggcttgtacattaaggatacaggaagggtagttataagttgctgatatgccgtgttttttacgatagtcatcggcctctcccatacggcggaacaggaactgacggatgccgagatgccgtgattcggcgggaggacctgtactggcccagtccttctgctcggtagcggtaccgctacgccgactcttcccgacgctccagtgccgccgatatcagtgaatgcccagcctgatgttggtagagttaaggctattggcttggtctcgacggtgagacttctccaatggccaatatgcactgttgcaaaggagtatgcggtatgcaaccaatcaaagccattcaatacggctgcggcaaaatggcgaagtacacgattcgctatatgcacgagaaaggcattcaaatcgtcggtgccatcgacgtgaatccggaagtcgtgggcatggatgccggtgtgtttgcaggcatcggccccatcaatgtgccgattcgcgccgatgccgaggctgtactcaacgagtgcgacgcggatatcgcggtagtcacgctattcagcttcgagaacgaaatcgccaccatgtgcgagcagtgcttggcccgcggcatcagcgtgatcaccacctgcgaggaatgcatctacccgtggaccaccgatccggccaccacgaaccgtctcgacatcatcgccaaggaagccggtgccaccatggtcggctccggcatgcaggacatctactgggtgaacatggtctccaccgtcgccgccggatgccacagcatcaagaagatcaccggtgcggtgagctacaacgtcgaggattacggcctggctttggccaaagcgcacggctgcggtctgaccgccgaggagttcgaggccgagcttgcgcatcccgaaaccgtggtgccctcgtatgtatggaattccaatgaagcgctggcccagaagcttgggcttaccatcgcatcgcagacccaggccagtgtgccgtatttcagcgatgtcgacgtgtattccgagacgatggacgagacgattccggtcggcaaatgcatcggcatgtccgccgtggtaaccaccgaaacgaatcagggcatcacgttggaaactgcctgtatcggcaaggtgtacgggccggatgatggcgatatgtgcgattggaagatcgagggtgaaccggacgtggagttccacgtggtcaagccggcgaccgtcgaacatacgtgcgccacaatcgtcaaccgcattccggacgtgctcaacgcgccagccggatatgtgacggtcgatcagctcgatgaaatttcatatctcacgtatcccgccgcgctgtacgtggcatagacccatattttcagggatgaaggccggcactcataagggtgccggccggtatcaggcggccagagtcgacgtgcgtggcatcacctggaactggatatggtcatgggtgatgtcatcgggccgttcatgccgtaggttcgactcgatcagcgtcaccatgcgatcgataaccgtacgagccattgcggggacgtctatcgccacagtgctaatgggtgggttggcgcagtcggaaaaggggatgccgtcgaatcccatgagccgtacgtcgtcgggcacgcggatgccatgttcggtgagttcgcggagcgcgccgatcgctatggtgtcagacatgcacaggatgccacaatcgcccgggacaggcgtcaggaccgcaagcagcatcctgctcggcatcggcggcgacatcgccaacttcaaaagcgcggcccacctggccgcccacgccggcatcgctccggtcaccggccagtccggcaccagcatcaagaggcgagaaaccctccagacggggcaacaaacgcttatagactattgcgccttgtataaatgcgaactgccagtcaaccttaccgttgactggcagttcgcatttatcgctcccgctggcgagagctgtcatgcgaagcatgactgagggtggtccacagccgccaatccgtaacatcacccaacgcagcatttcacgatacggacgtttccgtatcgtattttcgtgtggtcaaatagacatttcgggcgaaaaagttcgaaatacccccataactggccataaaaacaattgcttgagaatcactattgacttttatggcgactcggtatatggacacgtgaaacgaaaatgacatggagcaacggtactgtgtcaacagcaatgaacgaagaggcacgattcccttacgtgcccacaagcaattgaggtgattccggtgacattcaaagccccgctcgatctcacggtccacgctccggacggtatgtatgatcccgccaacgagcatgacgcctgtggtgtgggtatggtcaccactttgaacaagcgtcctgaacgcaaaatcgtcactgacgccattgaggtactggtcaatctcgaccaccgcggtgccgtgggtgccgaggagaacacaggtgacggcgccggcattctgatgagcatgccggatgagttcatgcgtgccaccgtgcccgccgaactgcccgaagccggccactacgccgcaggcatcgccttcctcgaccgcgacatcgaaacctccggtcagcaggaacaggccatcgccaagatcgtgcgcgaggagggccttgaagttctcgcatggcgcgtggtgcccaccaacccggacggcctcggcctgcaggcccttgccgccatgccgggattcaagactctcgtggtcgcctctccggacggtgctctggccggcgtggacttggatcgcaagaccttccgcatccgcaagcgcgtcgagcatgaggtaggcgtctacttcgcttccctgtccgcccgtaccatcacgtacaagggcatgctcaccaccatgcagctcacccacttcttcgaggatctgaacgacgagcgcatgaaggccaccatcgccatcgtccactcccgcttctccaccaacaccttcccgagctggccgctggcccagccgttccgtctgctggcccacaatggcgagatcaacaccattcagggcaaccgcaactggctctccgcccgtgaaggtcgtctgagcagcgaactgctcggcgagttcgagccgctgctgcccatcaccactccgggctactccgattctggcaccttcgacgagtgcctcgaactgctgcacctcgccggccgttccctgccgcacgccatctgcatgatgctgccgccggcttgggagaagaacccggatctcgatccggacgtgcgagccttctacgagtacaacaacacgcttatcgagccgtgggatggcccggccgacatcgtcttcaccgacggcacccaggtcggcgccctgctcgaccgcaacggcttccgccccggccgctggcagctcaccgacgacggctacatcgtgctggcctccgaggccggcgttctgccggagatcgcgcaggagcacatcgtgtccaagggccgtcttgagcccggcaagatgttcctggtcgacaccgccgaaggccgcatcatccccgatgaagagatcaagaagaccctcgcctcccagcacccgtaccgcaagtgggtggaaggcaactcggtcgagatgagtgacctgccccgccgcgagcacgtgagccactccggacagtccgtccagcgccgtcagcgcgccttcggctacaccgaagaggatctgaagctgctgctcaccccgatggccaacaccggtaaggaaccgctcggttccatgggcaacgacaccccgatgccggccttgtccagccgcagccgcatgctgttcgactacttcacccagaagttcgcgcaggtcaccaacccgccgctggattgggagcgtgaggaaatcgtcacctcgcttgaatccgccatcggcccggaaccgaacctgctgtccgattccgaactgcacgccaagaagattctgattccgctgcccgtggtcaactctgatgagatggcccagctcaagcgacttgacaaggcccgtatcctcggcggctactaccgtccgtacgtggtcaagggcctgtaccaggtcgccggcgggggcaaggccctccaggagcgtcttgacgagatcttcgccgaaatcgacgaggccattgataacggcaagaacttcatcgtcctgtccgatcgtgaatccaaccacacttggggcccgattccgtccctgctgctgacctccgccgtgcagcaccacctgttgcgccgccacacccgtacgcagatctccatggccgtcgaggccggcgacgtgcgcgagattcaccatgtcgcgctgctcatcgcctacggtgccgcctgcgtgaacccgtacctggcattcgaatccgtggaagacctggcccgcaacggctacctcaaggtcgacgcggacaccgccgtcaagaacctcaccaaggccctgtccaccggcgtgctcaagatcatgtccaagatgggcgtctccaccatcatgagctaccgtggcgcacagctgttcgaagccgtgggcctgagcaaggaagtcatcgacgaatactttaccggcaccacctcccgtgtgggtggcgtgggccttgacgagatcgccgaagaagtggccattcgtcaccgcgtggcctacccgaaccagtggagcgcatccccgcaccgcaacctgcgcactggcggcgactacaagtggcgtcgtaccggcgaggaccacctgaacgatcccgaggccatcttcctgctccagcagtcgacccaccgtggcgactaccagatgttcaagaagtattcgcaccacatcaacgacacgtcgaac

SEQ ID NO: 138 - DNA, 13376 bp, Unknown
  R206_24m  MAG No. k141_43089
ggctgggtctcgaagtcgaagtccatcgtgccggcgagcgcgtaggcgatgaccagcggcggggaggccaggtagttcatcttgacgtccgggctgatgcggccttcgaagttgcggttgccggaaagcacggcggtgacggtcaggtcgttggcgttgatcgcctcggaaatctcgggcagcagcgggccggagttgccgatgcaggtggcgcagccgaagccgacgagctggtagccgagtgcatcgaggtcgtcctgcagccccgcggccttgaggtagtcggccacgacctgcgagccgggagccagcgaggtcttgacccagggcttgggcttaaggcccttggcatgtgcgttgcgggcgatcaggccggcggcgatcatcacggacgggttggaggtgttggtgcatgaggtgatcgaggcgatggccacgtcgccgttttcgatgtcgaaatcgccacggaagtcggtggacacggccaccggatccttgacggtcttctcggtctcgtaggcgggggcggtcttctcgaacatgctcttggcttcggacagcagaatgcggtcctgcgggcgcttcgggccagcgatggacggcaccacggtaccgaggtcgagttcctcgtattcggagtactgcggttccacgtaatccgggtcggaagcgtcgccccacagcttgttggccttggcgtaggcttcgaccagggcgacctgctcttcggagcggccggtcaggcgcaggtagtcgagcgtgacattgtcaatcgggaagatgccgcaggtggagccgaactcggggcccatgttgccgatggtggcgcggttggccagcggcacggaggcgatgccttcgccgtagaattccacgaacttaccgaccacgccgtgcttgcggagcatgtcggtgatggtcaggaccacatcggtggcggtaacgccctccgggatggagccggtgagcttgaagccgaccacgcgcggcacgagcatggagatcggctggccgagcatggcggcctcggcttcaatgccgccgacgccccagccgagcacgcccagaccgttttcggtggtggtgtgcgagtcggtgcccacgcaggagtcgaggtaggcgagcgcgttgccgttggcctcggccttgctcatgaccaccttggccaagtattcgatgttgacctggtggataatgccggttcccggcggcaccacgcggaagttcttgaatgcctgctggccccagcgcaggaactggtagcgctcgccgttgcgctggtattcgatgtccatgttttcctggaccgcgttggcgatgccgtacttatcgatctgcacggagtgatcgatgaccatgtcggactgaacctgggggttgatgacctccgggtcgccgccgaggtccttgaccgcgtcacgcatggtggcgaggtccacgatgcagggcacgccggtgaagtcctgcatgatcacgcgggacggcgtgaactggatttcgtggctgggttcggcgtttggatcccagtcgagcagggtcttgacgtgctcgtcggtgatgttggcaccgtcgatgttgcgcaccagattctcgaccagcaccttcagcgagtacggcagatgatcgatgccgtcgagattggcgatgttgtagtaatcgaagtccttgccggctaccttgagggtagccagctggtcgtcgcgtaaggacatgcttcctccgaaatcatgaatcggcttatgatgccgctgattatccgctacacatggtacgggcacgttaccgaggctctggcgtgtcggcttgaagtatgagacaatcgcgccgccgtctcaatgccgacgcgagagcttgcccgtcagtccgcgcacgaacggcgccagccacaggcacagcgcgaagatcagcgcggaaccggccaacgcgatcagcgtggccaccatcgtggcgccggtcggcagaatcagggcgaagaagttcgccacgaacgggacgaacgcgccgatcacgcccgccgccgcgaacaccgccaccagcacgccacgccaaccgttgagtggtctggccacgcgggccagcacgaacacgcccatcgcgaacaggatgatggcgctggtggcgcgcagggcggacaggtccgcggcatcgccggtcacgttccagcccatgaccggcggcagcacccaagcggccagcagcaccgacagcgcagtggcgatgccgcccggcagcgcgaacgtgaccacacgcttgaggaaccccggaatatagcggcgcgtgttcggcgcgagcgccaggatgaacgcgggcatgccgatggtaagggcgccgatatacgtgatatggcgcggcaggtatgggtatgggatttgcgtcagcactacgccgagcgaaatcagggcggagtacacggttttgacgaggaacaggctggccacgcgctccatattggccatgacctgacggccccgcgccacgacgtccggcaggtgcgagaacttcgaatccaccagcaccacccgggccacggccttggtggcgggtgccgcgttgcccatggcgatgccgaggtcagcctccttgatggcgagcgcgtcgttgacgccgtcgccggtcatggcaaccacgtggttctgcgtgtgcaacgcctgcacgatggcccgcttctgggcgggcagcacacgtcccagcacatcgacgttctcaagcacgcgagccaactcgtccacgtcctcgggcaacgtgcgggcgtccatcgccaccggctcgcggtcgccggtgagcctgaccttgcgggcgatggcgccgaccgtcaccggattgtcgccggagatcacacggcaacgcactccctgttcgcggaaccaggccagcgtccgcgcggcatccgggcggatcctttccgagcacagcacaagcgccaccggcctggcctgcgcctccagccgaggcccgtcggattcaccgggcttggcggacgcggccgtctgcggggaacggccggtgtgaagcgggtcgtcgggaccgtcgtatcgggcgatcagcaatacgcggttcccgtcgtcggcgtagtcgttgacctgccgcagcacatcggagtaatcgccgtcgagcgcggcgacgatgacttcgggtgcccccatgtaccatgtctcgttcccctcacggcccgtggccgccgacgatccggcgtccgggcggcgcaccgcgctccatttgcgcgatgaggagaacggcacacgggatgcgacctgtccggggccatggccttgggccttgagcccggcgagcacggcctgcccggtgccgttgggttgttcctcgtcgcagcaatcgtacagggcctgcacggcctgccgttcgcaggccgcatcggcggcggcgtcgagcatcaccagtcggtcgaaggcgatgccgccatcggtgatcgtgccggttttatcgaggttcagcgcgtccacgcgagccagtgtctccacggattcaagctcctgcaccagcgtattgtgacgggcgagacgcatggcggccaccgcgaagttcagcgaagtcagcagcaccagaccttccgggatcatgcccaccacaccggcgacggcggacaccacggcctgccgccattcaccggtggagagcgccgcgtgccatcctccgaccgtatggatctgcgagaggatgagcagcacgcacaacggcaccaccaggaacgtcatgaatttcaggatcgtgttgatgcccttgttcagatcggacacggtcttcttgtacaccttggcctgcgcggtgagcgtggcggcgtaggaatggctgccgaccgcattgaccttgaccaatgccatgccggagaccgcggtggcaccggaatacacctgctcccccaccttgtggcgcacggtacgagattcgccggtgagcatggattcgtcgagttccagtccccaggtctggatgatctgcccgtcggccggcacctgttcgccggcacgaatccataacaagtcgtcaagcacgatttcgttatgagatacctcgacatccttgccatcacgatgcacgaggaattcggaggccacaaggatggaaagcttatccaacgtgcgcttggccctgagttcggtgacgatgccgatgcccgtgttgatgatgatgacgaatccgaacaccgcgtccttccaggaaccggtgacgagcaccagcgccatggcggcgcagatgatgccgttgaacaacgtaaacacgttggcccgtacgatgtcccgcaccgagcgggacgtggaggttttcaccgcgttcgactggccgctttcgattcgttgcaccacttctttggaggtaagaccggttgctccgatctcaggcatttccacggctgttgttgcactcatattccctagcctaccgcgtcttgtttcgcaatccgctaaggctcagggatgattcagggtgctttctcagcttcaaggggctgattcggctcaggagacggtgactttgatctcgcgttcgtggggttcgtcgcgcgtgatggtgagcacggcgtcagtaatagccattggcttggtatcggcagtgtcgccagaatcggcactgttggtgttgaggtgaaggatgacggcgtacagcagttcatcttcgggcgcatgctttggatcaatgagagcgactggaataccggcttcacgcgcattggtcaacgtctggttccagctctcccggttggcgtcggtaacgtcgatgccgctgataaccacgattttgaccgcgcgagctacgaaatcggcaacaccctgctgtgcggtggccgcattcttgtcgacgccagtatgagcatccatactatcggcaccgttttcgctggtagtgccggcgtcagaagattcggtttcaccggatacgccatcagttgcgtttgccgagctcgcggatgtctcgagcgaggcatagtagacattgagtttgtcatcagacagcgcattgatggcggacttgtctgcggcggtgtcagtcgagcccacaaagccgactgtgacatccgtgggatgtgtggaatcgtgggcgacttccggcatgctgtcttgggtatcgccgaccgccctaccggctggcgtgcaggcggccagggacaacacagccgccatgcaggccagcaatccgagaattcgtcgtgtcatatgctcacctgtcagcgggtaaacagggccaccgtctcaacatggtgggtcatcgggtagatatcgaaggcacggatgtctttgagctcgtagccttcgccgatgagtgtcgcggtgtcgcgtgcgaggctggtgggatcacaggcgatgtagaccacgctggatgcgccggccgcggcaatctggcggcagaccttggcacgagcaccggcacgcggcggatcaagcactacgacattcggtttggccagatgcgccggcacatggtccagcgtgcgcgagacgtcacccgcgcgggcgtccacatcgttcaggttcatggcgcgcaggttgcgctgagcgttcttgacggccacacgcgcgccttcaacgctgagcatgcgggtgcgttcaccggtcattgtggccagcggcagggtgaacaggccggaaccggaatacagatcccagattacggcgtccgccgctgactgcagctgcccgttgaccaggttgatcacgtgcgtaccgagggcgatcggcgcttggcgatgcacttgccagaaaccgttggcgtcaacctgatagtcgaaggtcgtgccgttgatggtcacctgttcggtgagcagctgggagccggcgcgcagttcgccgtccacaagtacggcgtaattgtcgtctgctgccgcggtatcgacgatctcgccgcgcggttcgggcacggaaagacgaatctgggagccgggttcaaagccgccctcccacacgtgttcgcgcttggcgacgtccagcagcgtgcgcgtggcaagcggcatggtgtcgatggccacgcggttgtgtgtgccgcgccggcgcatggatggcatgccgttgtcgtcggcaatcatttcgatgcgggtacgccaattgaggccgccggcttccttgtcgccgggcatgcactcgatgggaacggccacgtcgatatggccgagtcggctcatctgttcggagacggtgatggccttccacttgagctggccgggcaaagagacgtgcacgagatccgcaccgcccactcccccgcccatcgccaagggaccggcaagtggccatgccggggtgactcggtcttcagacggctcgagaacctcgacgacttcgccggtccagaaccggtcgtcccggtcgtggggctcgtcaagttcgactcgcacgagttcgtcgggcaaggcgaagcggacgaacaccacacgaccgtcgatatgggccacgcagcggccttggtcggcgtatcgttcgatacgaacttcagcttgcatcatcgtcctttccggttgcgctcggttcgagttcggcatcaacagcgacttcagtctgtgtcttcttagccgcgaccttatgccggtgcatcggcgtggcaataatgaggtaactcacccaaatcgccaatgcccagaacggaatgcccatgagcaggcgggtcacgccgagtgcagccacatggttggtcagatacagcggcacctgcaccaccagccgcagcaggaacagaccgacccaaaggccggtgacaatcatataggcgcgtttcagggccttgtcgtccatccagtcatggaaccatgccttgaaatgctcggtgggcaggctacgaatgaattcgacgaccaaacccagtccgggcacgcgcgcaatcagcgacacggcaagcaacgcggcatagccagcattggtaatgaatccgaagatgtagtagttgcgggcctcatgagtctgccatgcccaaatcaggcagatgccaaccgccaccagaccagagaccgcgcccaataccgactggcgctgaatcagtcgcacaataacctgcaataccgccaacacggccgaaatcgcaatggtgagattcagattgctcgtggccacgaacagtacgacgaacaccacgccgggcagcatggattcgatgacgccgcgagggccgccgatggcatcaatgacggagaagtcctcgccgtcattgccggcgtcggccagcgcggataaaccggtgcgtttgttgtctgccaagtctcttcctatggatcagcgaacttcggagaacatcgggccgcgagacagcgtggtcttcacttcggtctgctggtcctggctcagcggacccttcggcttgttgtccggaatgtccttgaagtgttccttgccgttctgctcgccggcttcggccgcggccttgcgctcggcgggggcgaccggcggatgcatcgggatcagatcgcgcggcgccaaaggctcctcgccacgctcgacgacgatgccggcgaagaacttgttcagcgcctcggtctccgggctgtccggatcgatagcagccttgccggagaagatgccacgcagcatccagcgcgggccgtccacaccaacgatgcgcgtgttcacggttttgccgcccttgacattgaccggcagcttcagttcggtgccgaacacaccgtccacttcagaagcggccttgttggcttcaagcaggtcaccgcgaacgtcgtcccacagtcccagggtcttgggtgcggcaaaggcttcgatctccaggctggaggagccgaaggtgatggtggagccaagcacttgctgggtggcgcggttggccttgatacgcagctgaatgccctggaggaagggcaggtagtaggcaccgagatccagataatcgtcataatcgggcacgtcctcatcgttgacgtcccacgggcctcgctcttctccgcggccctggtattcgttggatggctccgccaatacggtttcagcgctttccgcctttgctgcggcgtttgcggcttcggcggccaccttgtcttcatcgacaggctcaacggccggctcggcttccttcttgctcttcttcttgccgaatccgaacagtcccataattcctcgtttcatgtaacggttgcaaccttgctaacactagcactcaggcttagagaaagctgagcatcgcggccgccgatgtccggttcgattcgtagggaggccaaaatagtatggccgcatgaccatcaccattaccacgtctaacgtcaacggcattcgtgcggccaagcgcaagggcatcgaggattgggccggcaagcatgcgccggatgtctggtgcatacaggaggttcgcgcgcctcaggacgatgtcgattctattttcgatgaatttggtttcgaatacgccaccgccggcaaaatcgaggcaccggccaacctccatgccatgaacgaggtctgccgggtgaaaggccgcgcgggagtcgggctgctcaccgacttggaagtgcttgacaagcgatatggtctgccaggtctgagcgaggatgtggattcggggcgttggatcgaaaccgatctcaaaacgcctgagggctatacgatcaccgtggcatccgtgtacatacatgccggcaacaccgatgatccgaccaaaatggaacagaagtatcgttttctggacactatgctggcccgcatgggcgcgttgcgggacgaggctgcgcatggcggcaaacaggccgtgctctgcggcgatttcaacatcgcgcacacgccgcttgatatcaagaacgccaaggccaatgagaagcacgccggattcctgcccgaagaacgtgcctacgtggacaaatggctggacgaatacgagttcgtggatgtgatgcgttcgttggccggtgatattcaggggccgtacacatggtggagccaacgagggcgcgccttcgacaacaatgtcggctggagaatcgactaccagttcgccacgcccgagttggcggagaccgcacgcggattcgtcatcgacaaggctcccacgtatgacaaacgctggtccgatcacgccccactcacgatcacatacgaggtatgacatattccgtgggacaacatccgaaaatcgacgattttcgcgggtcgtcccacgccccacagcatgagtaatcatcgaccacactaagaatggcgtaattccgggcttcgtgagaaatctgctgtgggacaacactcatgtctatcgattgatgttgatgttgtcccacaaattgtgggacaacatcgggaaaacaccgatttttgcctttcgtcccacgcgaaccatcatgcaaacctgcacatacgaatattgggttctttccacggatggaaagaacccaatacaatgcgctcaaacgcagattatcagtccagaccgagttggagcttgccgccggggatggcgtcgagcaggtctcgggtgtactgcttctgcgggtggtcgaagacctcgtcggtggtggcgtgctccacgagcttgccatgctgcatcaccacgacctcatcggcgatctggcggactacggccagatcgtgggtgatgaacaggtagctcaggcccttttcggcctgcaggtcgttgagcagacgcagcacctgatcctgcaccagcacgtccaaggcggagacggcctcatcgcacacgatcacgtccgggtccagggccatggctcgtgcgatggcgatacgctgacgctggccgccggaaagctcgttcgggtaacggcccatcacggaagccggcatctcgaccatgtccagcagttccttgacacggttggcacgcgacttcttatcgccgatcttgtggatacgcagcggctcctcaatggaacggaagatggagtacatcgggtcgagcgaaccgtacgggttctggaacaccggctgcacatggcgacggaaaccgagcagatccttggccttgaacgtggaggtgtcgcggccttcgtagaacaccttgccggaagtgggatccaggaggtgaagcaccatgttcgccacggtggacttgccggaaccggactcgcccacgatggccagggtggtgccgcgcttgacagagaaggacacgtcgtcgacggccttgaacatctccttcttgcggggcagcttgaattccttggtcaagtggtcgacggtgatgatgtgctcgcttttctcaagcgtgctttcgccggcgatgtggtggtcaagcagggcgtccgcgttctcaccgcgctccttggcggagatgatgcgctgggaggccagcgacggggcggcggccacgagtcgcttggtgtacgggtgctgcgggtgctgcagcacctcgagggacggaccggattcgacgacctgacccttgtacatcacgacaatgtgctgggcgcgctcggcggcaagacccagatcgtgggtgatgaacagcacggcggtgcccaacgagtcggtgagcatgtgcagatggtcgaggatcttcttctgcacggtcacgtcgagggcggaggtcggctcgtcggcgatcagtaggtcgggcctgcaggccaggcctatggcgatgagggcgcgctggcgcataccaccggagaactcgtgcgggaactgacgggcacgggtagcggcgtcgggcaaaccggcctcggacagcagacccacgatacggtcatccattgtggagccgatgacgtacttcttggcgaggtaccaggcctgatcatcggccacaccggccttgatgaggtcgtcggccacgcgccaacgggtttcggagcccggaacccattcgttggtgaagcgggcgacggccttgtcgaaggcctcgccggacacgccggcttcggtcaaagccttctttgcctcggtcatgagctcgggcagttccttggcgccgaggaaggtctcgtcgtcgttgcccttgacttcgacctcgtcgccggccagggccttggcgagggcggagcgcttctcgtgggccacatccatgttgttggccttcagcgcctccttgacctgggatccgatacgccacaccgggttgaggttgctcatcgggtcctgaggcacgagacccatcttggtgccgcgcagcttgtcgaactcgctctgcttggcaccggcgatttcctcgccgtcgagcttgatggagccgttgaccacgtgaccggtgccgggcagcagacccagcacagccatggcggaggtggatttgccggatccggattcacccacgatggccacccactggccaggatagacggtgaagttggcgtctcgcaccgcatgcaccggcttgccggtgtcggtggtgaagtcgatggccagatccttgacctcgagcagcggaccatgctctttctgcatagccagcatcttggcgttggtgttgtcagtcataatgtttctccactcccctcgctcaggccgtacggctcttcgggtcgagggcgtccttgacggcgtcgcccatcatgatgaatgcgagcacggtgatggccagtgcggcggacgggtagaacagcaccatcggatcggtctgcaggttggtctgcgcgctggagatgtcgccgccccagctcaccgtggtggtgggcaggccgacgccgaggaagctcagcgtggcttcggccacgatgtaggaggccagcgaggtggtggcgatgacgatgatcggggccagggagttcggcaggatgtggcggaacaggtttctggccggcgtggagccgagggccgtggaggcggtgttgaattcgaggttcttcgattccagcacggcgcttcgggcgatacggcatacgccgacccagccgaagagcgtcagcaccagcacgatcttccagatggacttggaggtcttgaacatctgaagcaccacgatggcgccaagcagcataggcagcgcgaagaagatgtcggtgatacggctcagcaccgcgtcgacccaaccgccgaagaagccggcgacggcgccgatcagggtgccgacgatcacgactagtagcgtggagagcacgccgacagacagtgaggtacgggtgccgtagaccacgcgggtgtacacgtcgcagccctgcaggtcgtagccgaaggggtgtccggcggaggcggggctcaaggagttgcccagatcgcaggcgttcggatcctgcttggtgaacagaccgggggcgatggccaccacgatgatgaacaggatcagcaagccggagatgatgaacagcgggttgcggcgcagggttcgccatgcgtcggcccacatgctggtggccggtgcggattcgtcgacggaatcgacgtcctgcaacggggtctcgtcgagaggagctacgtaacggtcctgaccgggcagggtttccatgaagtattcggttcctggctcgccggtctggttgagctcgttttcagtggtttcgtttgccatgtgactcactcctccctatcacgcgtaacggatacgcggatcgagggccgcgtacagcatgtcgacaacgaggttgcacactacgaaaatcagcatgagcaacgtgacgatggacaccaccaggtttgcctcgcccttcagaatggactggtaggtgaggaagccgatgccgtggatgttgaagatctgctcggtgatcatggcaccacccatcagggcgccgatgtcctggccgaggtaagtgacgactggaatcagggagttgcgcagcacgtggcgcagcatgacctgaccgttcgacatacctttggcacgtgcggtgcgcacgtaatcctcggcgatgttggaggagatttcggagcgggtcagtcggatgatataggccatcgacaccgatccgagcaccatggccggcatgagcagatcaaggaagccggggtcggcgcctgccgtcaccggcaatatcgcccactgaataccaaagacatattgcatgacgaagccggtgacgaaggtcggcacggaaataagcagcagggagacgatcaggataacggtgtcgtaccacttgcccttcttgaggcccgagataatgccgaagaccacaccgaaaatcgcctcgaacacgaacgccatcaagccgagcctgatggtgaccgggaaggcgcgggtgatttcgtcgagaacgggctggccggcgaaggtatcgccgaagttcagggtcagtgcattcttcaggtagatgaagtactgaacgatgaacggctggtcgagatggtattctgcgcggatctgggctgcgacggcctcattgacaggcttgtctccgaacatggccttgacggggtcgcccggcagggcgaatacaagggcatataccagaagagtcgtaccgagaaccacgggaatcatctgcagaatgcgtcgcagaagatacttacccatacggttgctccttatttcctagaccggccagaaagggtata

SEQ ID NO: 139 - DNA, 28296 bp, Unknown
  R206_24m  MAG No. k141_43949
atcgcgcatcctcctcgcgacccctggcatcatggagccgttcgccgatgcggtcgcccaacgcggccgcgcggcacaacgcccacaccgccagcagacacacgacgattgcgacgacggccaccgctgccacagcccggcccatctcaggcgctccggcggcgacggcgcgacgagcgcgcgggatgaagcaacaccgccagcaggtgcgcgcgggcgatccgcacgcgcagcgacgggattggtttcacggctcccgctgcacgcgggacggaagcgatggtaggattggtcattgcgataactctctttcaatggagggcgaatcccgggactcttgtcacttgaatcgcccggaatcccgcccaaggttgtcgatcagccccgcaccaagcgccaacacggtgcggagcgctttcgttttccatgtttttccctccccagttcgaccagaccgaaccggggaggcggtcgtattgcgcaaccaagcgcgccgcccatagcatggtgcgcacaagccaccaagggcacgcaaacgaaaggaacggacatgaccggcaacaccacggcaagaacacaggccatcgaactgggagagcacctgcgtgaggtcgccgcatggaacgtgcgcctgcacctggccaaggaagaactcgaacagcaggccctgtgcgaggcggccggcatgaccaaggccaccatctcggccagaatgaacctcgacgccgcatgggacctcaacgccatcgcggccgcggccgtcaccctcggcatgcctccggccgaactgctcgacgacacgctgtacgacatcgtcaacaacgacgacacgaacacaaacgaaggcaaaggtgcatcgttggtggcagcgctgacctcgacgctcctggcacgccacatcgccggcaggtgcgacccgttgaaaacaaaaggctcctgccgaatcacaatgatggcgacaggagcaaaccggtacccccagagagagtcgaactctcgttgtcagattgaaagtctggtgtcctaaccgttagacgatgggggcgaacaactcgagttactttacgggaggttgttcggttatgcaaatcgacggcatttcggcgtgtcgcaatcagttcagggcgacggcctgataggtgaagtcgtgaatcacgcggccggcggccaggcccttcttctcgaagttggtgagcacgcggccctcgaaccgctcggattcggtgaagtcggcgtgcggcatgtcggcggccagatcggcgttgcccttgcccacgtgctccagcgggaggctgacggttacgctgcccaggttcttccaaccgtcgagtccgtccatcacctcgtgcacgtgcagggcatagtcctcgatgtcggtggcgatgcgccagacgccgtctgcggccagcgcgcgatggatgtcgccggccatagcctcctgcacgatgcggcgcttgtgatgcttcttcttgggccaggggtcggggaagaaggtccatacttcggctgcggtgccgggcgcggtgaccttgaacagctcgggcgcattgacctgggccacacgaatgttggtcagcccctgcttgccggcgagcagcagcgtgtgggccacaccggggtcatagacctccaaggctaggaagttcgtcttcggatgggccgcggctgcggccaccacgttctcaccctgtccagtgccgatttccacaatgagtggattgtcgttgccccatgcggactccacgaacgcgcggtcgagcgtgacgccttcgcgcacgtccagcagattgccggccgcaatgtccaacagatatgtgccggcatagttgtcccatgcgcgctgcaggcgatcgtccaaacgtccggagcggcgcacgaaggagagcaccttgtgcaaggggtgcgccggtgcctcggtgtggtccgcggccatcgcggcgacggaatcgattgctgtggattcgggatcggtcatatattcctcggattttccttgtgcgccgcaccgctgttcattcgttaggtcgatttggcgttcattaggtgggtggtgtgcgataccaaccaccatatcaagccatttacccggtgttcgtgcgggccggctccgggccgacctacctaatgaacgccagatcgacctaatgaatgcagatattgccggacgacaccaccgttttgtgcgattatgttcgtgtgatatactcaaattgtttcaaaaggtaacaaagcggaccaaaagtgaacagccgctgaactccacacggccgacacttgcaacccgcataaggaaaggtcaactatgacagttctcgtcaccggaggctgcggctacatcggcgcgcatgtcgttcacgcacttcatcaggccggcgaaaaggtcgtcgtcgtcgacgatctgagctacggcaagcccacccgcatcgaaggctcccgtctgtacggcatggatatcgccgctccgggtgccgacgagcgtctggctgaaatcctcgatgccgaaggcgtcgactccgtgatccacttcgctgcccgcaagcaggtcggcgaatccgtggagaagccgctgtggtactaccagcagaacatcaacggcatgctcaacgtgctcaccggcatgacccagtccaagaacgccaagaagctcgtcttctcctcttccgccgccacctacggtgtgccgccggtcgatgtggtgcccgaggacgtcgtcccgatgctgccgatcaacccctacggccagaccaagctgttcggcgagtggatggctcgcgcctgtgagcagccgttcggcatccgcttctgcgcgctgcgctacttcaacgtggccggctgcggcccggtcgaactcgaagacccggctattctgaacctcatcccgatgctgttcaaccgcctcaagcagggcaaggcccccgccatcttcggcgacgactacccgaccccggacggcacctgcgtgcgcgactacatccacgtctccgacttggccgacgcccacatcgccgccctcaagtacctcgaccgtgacgagcgcaagtacgacgccttcaacgtcggcaccggtgaaggcacctccgtgcgccagatcgtcgacgaagtcaagaaggtcaccggtctgccgttcaccgaggctgtcatggcccgccgcgccggcgacccgccgcacctgatcggctctccgaagcgcatcaacgaggagatgggctggcacgccaagtacgacgtggaagacatcgtcaagtccgcgtgggatgcctggcaggccaaccccgaacaccacatcgacgtcgacacctggaagcaggctgactgagattgacgattgctttgcggtggatgccgtgaagtgcttctgttcataagggcgtgaccggagttccggtcgcgcccttcgtcgtttgtagatgtttatggcagacgtgtccgtgtgctggtgatagcaaaaaccttgaaattacgcggaacacgccgaaatttgcacgaccggcgaatttcagtaatatatacatctgttgcctcacgcaagtgagaacaatggccccgtagctcagttggttagagcgccgccctgtcacggcggaggtcaccggttcaagtccggccggggtcgctggaatggttatgaaacccggattatccgggtttttgactgttcatggctctgtagctcagttggtagagcgagcgactgaaaatcgctaggtcaacggatcgacgccgttcggagccaccacaatgaagccccgccttgtgcggggcttttgcatatccgtcacgtacctactccggcgggctggccggtcaatgcaaaggctcgcgttcgccaacaactgtcttcctcgccgcaactacgcacgccaacagcaccaatgcgaacatcgggttagggttaaataaagaaacgtgggtcttatccgcgcgtgtcatggtcggtgcgatcgtccgccccagccgtttctggggctgtggcgctcatagagtcagtattgcagaaaaagcacctgcgaaatgcgcgtgcgaagggaatcgtgtgggacggcacgtgattttgccgattttcgacgtgccgtcccacagcgttcgaagaacgccctcagagctgagggcaaagaacggctctattctgcggttctcggcttatgtcatgcgggatagcagatacgtcaaacgattgatgtatctgctatcccacacttctgtgggacggcagatgaacaatggtaaaaaccgcgtgccgtcccacagaaacggagtcaggcctgccaccattggcgcagagggtaccacttgccgtccgggtggcccacgcgatccggcttgacagccaggaactggtgaatctggatgccgtcgagctcgaagttcagagcgcaggcggccatgtacataccccataccttggcgcgttcaaagccgacctgcttgaccgcgtcgtcccaatgctcggagaggttctggttccagtgatgcagggtgagcgcatagtgctggcgcaggttctcctgatgcaccacgttgaagccggcgtcatggatgcacgattcgatgaagccgggcgcgccgaggtcgccgtccgggaagatgtaacggtcgaggaattcgtcggtgccgggcttgccgtgaggcttgtcatggctgatggtgatctggtggttcagcagtcggcccatcggcttcaggagacggaacatctcttcgaagtagctctggtagttcttgacgcctacgtgctccatcatgccgatcgagcagataccgtcgaagtcatgctcgggcacctcgcggtagtcctgtacgcgcacttcggccagatcctgcagcccctcacgggcgatccattcgttggcgtacgcggcctgttccttggagagggtgacgccgagcgccttgatgccgcgacgggcggcggtgatgaccatcgaaccccagccgcagccgatgtccagtaagtgctggccgggctgcaagtccagtttgtcgagaatcaggcgcagtttgttggcctgtgcgtcttcaaggctcatgtgctcgttgtcgaatatcgcgcaggtgtacgtcatggaggggccgaggaagtcggcgtagaactcgttggacatgtcgtagtgaaagctgacggtttccgaatcggccttttcggtgtgcggcatcaggccacgcttgatgcgggcgaacttgcttgggccctcggtggcgggcaccggcggcttcttgaagccgtgactcagaatgccggcggatacgcgggcaatggatgcgggagcgagcgggcgaacgtatttggccagcgacaccagcttgcgcatcgccggatacgggtcggcgtagtcaatgccgtccacgtcgaaatcgcccagaatgtatgcgcgcacgatgccgatttcattcgggtgcgcgagcagctggtacatgcagttcggcgtggcgattttgaccttcaaatccgcgtctgccgggccgaaatgcgagccgtcaaaagcgtcgatacgaacgggagcgtcggggtcgagaaacagggatgccatctcgccgaccgtcatagccttgccatttgccattatctgcctcattctcttatgatgatcaccccaattgtcgaggtatcttagtcctcttcaagagactgaaaccgttgaatacaccatctggtgaaccagttcgcgttcggctgatgaaacacgaatggaattaggcatctcgcatattgattgtgtacgcgcgaagtaagcagataagagacgagtttctcggagagcaccaagcgactccggaaaatggtcttatcgttgagatctcgggcgattgaactggtttggtcaatggacaataattcgacaagtgcggaattccgccatttcttgccattattttcagtgttgttctttcagcgtgttttcaggtgaatgctcatgcgcggagtagactggggaaccgttggaccactcaaagagtgagtggaccaccagttaagacactagctcaaaaggagagtccctatggtataccgcatgattttcaaccagactgcatacttcggacgtggcgcgatcaaggaaattccggccgtcgccaagcagcacggcttcaccaaggcatttatcgtcactgatccggtactgctggagaccggcaccgccgagaaggtcaccaaggttctggatgaggccggcctgccctacgaagtgttctccaacgtcaagccgaacccgccggtagagtgcatcaaggacggcgtcgccaagttcgccgagtccggtgcggacttcctgatcggcctgggcggcggctccccgcaagacacctgcaagggcatcggcatcatcaccgccaacccggagttcgccgacgtgctgtccctggaaggcgtcgcggataccaagaacccgtccgtcccgatcttcggcgtgccgaccaccgccggtaccgcttccgagacgaccatcaactacgtggtcaccgataccgccaacaagcgtaagttcgtggctgtcgacccgcacgatatcccgatcgtcgccttcgtggacccggatctgaccgactccatgccgcgcggcctgaaggttgccaccggacttgacgccctgacccacgccatcgagggttacattaccccgggtgcctggagcctgtccgactgcctgtccatgcagaccattcgcatgattgccaagaacctagccaagtccgccgacggcgacattccggctggcgagcagatggcgtacgcctcctacatcaccggtatggcctactccaacgtgggcctcggcctggtgcacggcatggctcacccgctgggcggccgtctgggcgtggcccacggtgtggccaacggtattctgctggccccggtcatggaatacaacaaggactacacgggcgagaagtaccgcgacatcgccgacgcgttcggcgtcgaggacgcctacaccggcgacctggagaaggtgcgcgaagaggccgtgcaggccgtccacaagctgaccgtggatctgaagaacccgaccacgatcagcgaggtcggcgccaccgaggctgatctggaaccgctggcccacgacgccttcaacgacgtgtgcacccccggcaacccgcgtcaggccaccgaagaggatattctcgcgatttacaagtcgctgatgtgatcagtcgatgacggtaaacattagctccctctgatgagggagctgtcagcgtggctgactgggagagaagttgcggcgtagccgctgaataataggtatcggcctgcggccgattcaatgttttagcggttgcgtcgcagtctctccctcagtctcacttcgttcgacagctccctcatcagagggagcttgcataagcagagggggctcgtatatccagctacttttcgtgcttttcgtcgtagacttcgtcggtgggggtctcgtcgtacagctgcttgccttgcgcctccgccagtttcatctgctcgttgatccacgcggcttcagcaggattgatatccgcggaattcagcactttctgccacaccgggtagaacatatgcatcgccggatacatggcggtgaacaacacctccggcttatgcgtgcgcgtatgttgcggatgcgcatcaaacgtattcttaaaacgtcgcatgtagttcaggaatgaactcagcgacgtgtccatccgtcgcgcgctcatcgcggcgatcatgcgcggcgagtacacggttttcagattcttgcccatcagatgcagggaaatatcgatatcctcgtgcatcacatcggccttatctcggcagacctcattcgcgatctgatgccaggccgaagcgcgcaaggccatattcgagccgaacagcagcggctggccgccatcggcacggtagattcgcttgcgtaaggaattgtcgcctttcaacccgaaatgacgtgagggcatgtcgtaatacatcaccggaccagtggcacccatcgcggccgggtcttcggtgaagatgccggagaccacctccacccagtcaggccggatcatacagtcggcgtcaaaacggcccagcacatcgccggtcgcggcgttcaggccaaagttgcgggtgggaatcagcccctgttcatcgttctggtgcaacagtttgaccggggcctcgggatgttcggcgatgaactgttcgacaatcgcgcaggtgttgtccgtagaacgattgtccaccaccagcacctcatgcggcatgatggtctggcgagtggcgttcagcagacagtcgcggatgcgttcggcttcgttccacgctgggatgatgatcgaaacgttgagcataacatcaacaatagaaaagcgggtgtacgccgccggcgtatccgagcttcaaacccctcgctacaatggggagccatgagcgaacgcgcgcgaaacataaacagcaccgacacgtcgagaagcggtgccgcagaagccggggcagacccggacgacgagaatcgtatcgactttggtactttgttccccgccaagggagattcccgcaggccaccggaatggttcggccgcgcgctgctgtatgtggccctcgccgtcatcgtattcatgttctgctggcgctcgtggggcgacatctcctatctggtgttcgacatcatcatctcgctgttcctggcgctggccgtcgaaccgctggtggtggcgctggtggctcatggctggaagcgtggcgtggcttccgccgtcagtctggtgggcgtggccgtggtcgtgggtgtgctgctcacgctgttcggcaatatgtttgtacagcagatgattgccatggtccgcggtttgccggcaatgtatgggcagattcgtgagttcgtggaccagcacgccacgttcaagatgccggaaatcagcaatcttggcatggaaatcttcaacaatatccagacctcgtgggtcaccgatttcgccggcaccgccatgagtacggtgggtggcctgttctccttcctgctgaacctcatgaccgtggtaatgaccacgtattacatctccgccgccggcccaaagctgcgccgctccttctgccagtggctggcccccaacacgcagcgtcgattcctgctggtgtggaccgtggcccaaggccagatttcgtccttcctgttctcccgttcgattctggcgctgatcaacgccacctgcaccgccatcttcttggagatcctgcatgtgccctactggctgccgttggccctgttctgcggcgtggtatcccagttcatccccacggtcggcacctatatcggcggtgcgctgccggtgctgttcgcttggggcaaccgcgggtggacgtacgccgtggcggtgctggtgttcatcatcgtctaccagcagatcgagaacctgattctctcgccgaggatttcgcagcgcacgatggatatcaacgcggccgtcgccttcctctcggtgctggcgttcggctcgctgttcggcgcattcggcgcgttcctggcgctgccggtcaccgcatcgctgcaggccatcttccgtgcgtacaccaagcgctatgagctgattgactcaccgctgatgaacgatccgactccggagaagaagtccaagatcgtcgaggcgtccgaggcgttcggcgagcacgtattgcagccaatcggcgagcacatgccgcgtgcggccaggggatccaccaaccgcgtgccgatgaatgaggaactgcgtttgctgcaggaacagatttatgcgattccgtcgcacgagacgaaagaatccgatttggacgattccgccaccgtggcgattccgaagaacgtgctatcctccagcgctcgcaagggattacacggcactgagccggagtcggatgccgatgataccgataacgccgataatacagtcggtgcggatgcaagctttgatgagccggatacggcggcgattccgcagcgtggtgccgcggatacgcagcagtctgagcagcccgagcagcctgagcggtccgccgaacagcctgagcagcccgagcaacgcaagcaaaccaagcagtctgatcaatctgcctccagcaatcctagggcagggtggcgctgatgactctgctttccgtactcgatattcttctgatgatcgtcggcggtgccggcatgatatatcagggactgtgcatcgtgatgtccctgttcgccaagcccgtgcgcttccccgacgccccgatgaccaaccggtatgccgtgctgatctccgcgcgcaacgaagaaaaagtgatcggcaaccttattgggtcgattcgcgatcagacctacccgtccaacctcatcgacatctggctggtggccgacaactgcaccgacaacaccgccgacgtggtgcggtctttgggctgccatgtggtggaacgccacaatcttgagctggttggcaagggatatgcgctgacgtatctgttggggcatatgctcgacatcggtgtggccgatgattatgaggcctacttcgtgttcgatgccgataacaagctggacaagcactacttcgaggaaatgaacaaggcgttctgctccggattcaagattctgaccagctaccgtaattcggtgaatctggcggataactgggtgtcttctggttctgcgctgtggttcatccgtgaatcgcgattcctgtctaactcgcgtatgattctcggttcctcttgccatgtgggcggtacgggattcatgttctcccgcgaggtgatgaagcggaacaagggatggaagttccatctgctcactgaagatcttgaattcactatggattcgattctgcatggcgaccgcatcggctattgcggtactgcgattctctacgacgagcagccggttaccttctcgcaaagttggcgtcagcgtttgcgttggagcaagggattcctgcaggtattccgttattatggctcggcattgctgaaacgcgcggttcgcgaacgtgatttctcctgcatcgacttcaccttgatgctgtgtccgtttaccgtgttgggcgtgattcgcgcggtaatgggcttgctgttcgccgcgtgtggcttcgtgagttggccgagccagctgcaatcgctggccagttggtccagtggcatcatcatatcggtgttgggcctgatggcattggctgcattgaccatcattgtcgagcgcgaccagatcggtgccacgaacaaggagctgctcgcctatgtgctcagcttcccgatttacattctcagctacgtgccgatctccttccaggccctcttctccaaagcccagtggaagcccatcgcgcataagggttgaccgagtccgctagttggagctgctcagcggggcaatccaacagcaacccgggggtttgcttcgctgagggttggctggtggggtagagtggatgtatgagcttagacaatactcaaaggaatgtcggatttcagccgccgatgatgccagctgccgcccccgcgcctgcacagccgtcgcaaccgcagccacaagcatggccgccgaatccgaatgcggcggtgtccattcgtggcctgttcaagcacttcgaccggaagatcgccgtcaacggactcgcgctcgatattccggtcggctcgttctatggacttgtaggccccaacggcgccggcaaaaccaccacgctcaatatggtgaccggtctattggtaccggacgccggcaccgccatgattttgggccatgacgtgtggagcgacgtgaacacggccaagcgcatgatcggcgtcatgccccagcccgaccagatcttcgaccgactgaccggtttgcaattgctcgtctactccggcatgctgcgcggcatgagccgcgatgagaccacgcgtcgcgcccaggacctgctcaatgctttcgacttggccggggccgccaacacgatggtcaccgattattcggccggcatgaccaagaagatctgcctggcctccgcgatgattcatagcccgcgcattctggtcctggacgagccgtttgaatccgtggacccggtgtccagcgccaacctcaaagacatcctcatcgaatacgcgaagaccggcggcacggtgattatctcttcgcacgtgatggcattggtcgaaaagatgtgcacgcatgtggccgtaatcaacaacggtctggtgtgcgcggccggcacggtggacgaggtcgccgccggcgaagaactcgaagaccgcttcctgcaactggtcggcggccgccacgaagccgcccatctcgcatggctcgacggcgggcaagcccaagcccaagcaccaacttcggtccagccggtccagcccattccgcttacaaccgccacgcccgccacacccaccgatgaggcccgccgatgatcagcagcgccatcaccctggtccgcctgcgctggacgctcacgctcgccaccctgcgaaaatcggcgtggcagaccgtcgcctatgtcttttccgccgtattcgcggccggcaccatcatcggcaccggcgtgctcgcatggttcatcggcatactgccgcccttcaccgtgaacgcggatggctttccgctgaacatccttggttccggaggcatcgtcaacatagtcgtcgtgctggtcggcgcgaccatgaccatcttcatcggcttcatccagctcatgatgcttggcgaaggctccaccatgaacccacgcaaattcgcgctctacggcatcgccgaccgcaacctgcaattcggcttgctgctttccggcctgtccggcatccccgcccttaccggcgtggcctcactgatgctctggacactggcctatcggcatatgggaccagccgtaatcatcagttccctcctcgccgcagtgctggccgtcatcaccatgatgagcatctccaaactgctcatcgccctatccaccacgctggtgaccagcaaacgcggcaaaggcgcgttctgtatcttcatcgtgctgacgttcgttatcatctgtcagttgccgaacattctggtcaactccggcgtggccttcagcctcaacaccgaaacctggggcgcggcgaccaccatcgtcgcatggacgccgttcggcgcggccttccaactaccgttcgacgcgcttaccggagcctgggcggtgctgctcgcccgcatcgccatccttgccgtcacatggattgtctgcttcgccgtctgcacctggtgtctgagacatgaacggctcaccatcggcgcaaacagtccgtccgagaccgccaaaggcatcggcgcattcgcatggatgcccgattcggcatccggcgcggtttccgcacgcctgatcacctatctcaaacgagacccccgtcaagccatgaccttcgccatgccggtcctgttcctgatcatcttcgccttccaggcacacggcatcagcgcggtcgtctggcagtcgctgatctggtgcggctggttcatgtccgtcgtggaaagcaacgggctcgcatatgacggccgcggcttcaccatggaagtcatcgccggcgtgcgtggccgggccgacagaatcggccgcgtacgcgtctacgtcggcatcatggtcgtctacatggtgctgctctatctcgccggcatcgtgctggtcggcgcactgaccggacgctgggcgcagcccgatgacctcgctaccggcctgatcttcctcgccacgggcatgggcatcgccttgagcggactgggcgtggccgaagtcacctcctgtgtactgatgtacccggtcgcctcaatggacaagccgttctccgcgcctcaaggccgcgccatggcccaaggcttcttcccgttcgtctacatgcttggcagcctgctgctcatgctgcccactggcatcgtggcgctggtcatgctgctgacaggagccgaaggcggcatgtggctggcggttattccggtcgcgctggccaatggcatcggcattctggcactcgggacatggctgggcggtaagctgatggatgcgcgaatgctctcgattgtggcaacactcgactcgttcgcctcattgcagaaatgattgccttggcataaggagcacgatggtatctacagcggtatcacgccgtcagcgacgtgaagcgcaacggcggacccaacgatcgcatcgccgaacactgaccgtcatcatttccgcactgaccaccatcgccctgttcgcggggtactgcgccgccgacatcaccgacgtggcccccggattgttgacgttaaaacctgtcaccgcacctgttttcgccaatccggccaccgccaaatcaggcggcaccatcgccggtgccctgaacgcgaacaaggccattgattccacggccgcttctgcactggtcaacgaattgctgtccgcgcaaggcgtgggaaacgatacgtcggtgatcattgaagacgcccaaggcaccgtcgccgccgaacatgagtcgaacactccacgcgagcctgcatccacactgaaaacgctgaccgcgctcgccgcctcatccaccctgaacatggcatccaccttggatacccaagtgttcctgacccaatccgatgacggcaccaatacgttgaccctcaaaggcaatggcgacatgctgctgtctgcaggcgattccgacgcaaaccataccaacggacgtgccggtctgaacaccttggccaaggccaccgtggccgcgctcgcccagcgaggcatcacttccgtcaatctcgagtacgacgacaccctattcggcgactcacgcattcccgcaggtctgtcggaaggcggcgcggtcttaagcgactacaccgtctacttcacgccggtctcatcaatggcgattgatggaggccgccaatacaccgccgatacgcctgcgccggccgaccctgatgattcggccggatacccggaactgtcccagcacaccgccagcgacgtggccacgaaattcgccgaactgctccaatcgaacggtgtggccgttaccggagacgtgacggcaaacaccgctccatccggcgaaacgcctttggcttcggtgagttcggcaacactgtccgaaatcatggcatacacgttacggcattcggacaatacgctggccgaggagttcggcagactcaccgccttggcgaaatcagcgacaaacagtcctgaaggcggcacggaagcggtcaaatccactctgaacgatctcggtctcgacacatccggtctgaccatggccgattgctccggcctgtctcccggctcccggctcaccgtacgcacgctggcggccgtccaacaacgtaatctgaccaccgagagcggtgctgctggtgcggaaggtctatccatcgcggggttggtgggcacggcgcaggatcggtatacggatgatgccgtggccggtctgctgcgcgtcaaaaccggcagcctcggcacggtcacgtcgatggccggcaatgtgtcccgtaccaatgggggagcgttgtcgtttgccgtggtggtcaacaatcctgaggattatgccgccgcgcgtagcgccatcgactcgttcatcaccaagctcgcggggctgtaaaagaggcatcaagggccatcaagggctacaaaggccgtaaacgtccataaacgcacgagtgcctataaccagaaaagggtggtgagtacatggcatattccgcacgattgcgcaaggccgtaggcgcggtccgaacaacgctgagcgccgtggaactatgcgatgtgcaggctcccgaattcgcgcagcatggggaccatgccgttgccgccgatgcgccgctcgtgctcgtggcctgttcaggcgggcgcgattcgatggcgctggccgcggtgagccatatcgtatgcacgtccatgggcgtgcgttgcggtgtcgtgattgtggatcacggcttgcaggagggttccgaacaggtcgccggcgaggccgcggatcgttgccgtgcgttgggactgggcccggtcatcgtgcgcaacacaaccgtgcaggcacgcggtgagggcctcgaagcggccgcacggcaggcccggtacaacgagctgtgcaccgcggcgcgtgaatcaggtgccattgccgtgctgttggcccacactatggacgatcaggcggaaaccgtattgatcggactgctgcgcagccgtggcgtggatgcgttggccggcatgccgcaggtcttcacacgcagtggcgtgacttttgcgcggccgctgctgacccttactcgagacgaaaccaccggcctctgtgaagacttgggtgtggaatattgggatgaccccaccaatggcgatgcggtagacggcgagttgccggacgactatccgttgcgctcgcgggtgcgccacgacctgctgccggccatcgaacgattcgctggattcaatgtcacccgccatttcgccgaaagcgcacagctggccagaatggacaaggagtatctggatcagcgatccgacgaggtgatgggggaggcggttacggcagttgaccggccggcatcgtcggcagcggtatcgaccgatacgccacgagcctgtgctgcagacgataccaacgattcgggccatggcatcggcctgatgatcggcgtcaaacgtattgcacgtgagccagaggcgattcggttgcgggtcatcgctcacgcgctgagccaggccggtgtgaacgccagtgccgcccagattgccgccatcgaccggctggtcgtcgattggcatggccaaggcggcgtctcacttcccagaggttattcagccaatcgcaagaaacacgtcattcgcgtgtgccaagatggagcgcatgcgaatcgctgacgttgaggaagatattgaccacgagctggtcagcaaagaacagatcgatgccaagatccacgagatggccgctctcgcgagcgaggattaccgcgataagaatccgctgctcgttgcggtgctgaaaggggccgtgaatacgctggtcgcgttcacccaggccatgagcattcctgtacagatcgacttcatgagcctttcgagctatggctcgggcacagtgtcgagcggtgaggtcacagtcaggcaggatttgtccgccgatgttcgcggacggcacattttgattgtggaggatattgttgattcaggacgcacgctcgcgtggctggtcgcagaactgaaacgtcgtggtgccgcttccgtggaggtcttcgctttgctgagcaagccttcccgccgagaagtggacgttgatgtgaagtacgccggctatgagattccggacgagttcgtcgtcggcttcggcctcgactttgacgagcgctaccgcaacctcgattcgatcgcggtcctcaagccgtccgtctaccaaggagtgcaagcatgagcttcccgcaagggccgggtaacggcaataatccgaacccgaacaacaaccgtaacaacggcaacccgttcactaacccgttcaaccgtggcaataacgggaacaatggcaaaggcaacaacaacgagaaccgcccgatatggcagtccccttggctatggggtgccgtgctcgtggtcatggtcgtgctgatgttccagatgttcgccggcggtggcaccaaaaccatcgacaccaaagatggtttcgcgctgatcaatcagggcaaggccacgtacgccgagatcacggacaacaagcaggtcgtccgccttaagctgaagaacgactacaccaagaagaacgccgacaccggcaaggtgaccaactacggcaagaacgtgcagttctactacaccttcgcgcagggcgcacaggtggccaaggccgtggagaacggtgatctcgaaaagggctggacctcgaatatcgagcagaccagcatgctgagctacctcgtcacctcgatcctgccgttcatcatcttcttcgccctgttctggttcctgatgagccgcatgggtggtgccggcggcatgctcggcatgggtggcaagaaaaacagcggcaagctgctcgacggccagacccccaccaccaagttcgccgatgtggccggcgaagacgaggccgtggccgaagtcgaggagatcaaggacttcctcaaggatccgtccaagtacaaggcgctgggcgctcgtattccgcgtggcgtgctgctgtacggtcctcccggcaccggtaagacgttgctggcccgagccatcgcaggcgaggccggcgtgccgttctactcgatggccggctccgacttcgtcgaaatgttcgtgggtctcggtgcctcccgtgtgcgtgacctgttcgatgaggccaagaagaacgcccccgccatcatcttcatcgatgaaatcgatgctgtgggccgcaagcgtggctccggcatgggcggtggccacgacgagcgcgagcagacgctgaaccagctgctcgtcgagatggatggtttcgacaacgacaccaacctcatcatcatcgccgccaccaaccgccctgacgtgcttgaccccgctctgctgcgtccgggtcgattcgaccgtcaggtgggcgtggccgcccctgatctggaaggccgtgaggcaattctgagggtgcatgccaagggcaagccgttcgtaccggacgtcgacctgcacatggtcgccgtgcgcacgccgggcttcaccggtgccgatctggccaacgtgctcaacgaagccgcgttgctgtgcgcccgtgccggtgcccagttgatcgacaaccgcgccatcgacgaggccatcgaccgcgttcaggccggaccgaagcgcaagtccaagggcatggctctggaagagctgcgcaacaccgcataccacgagggtggccatgcgctggtggccgccgccctgaacaacaccgacccggtgaccaaggtgacgattctgccgcgaggccgcgccctcggctacaccgccgtcatgccgacctccgaccgctactcgcagtcgcgcaaccagctgctcgaccagatggcctacgcgatgggcggtcgcaccgccgaggaaatcgtcttccacgacccgaccaccggtgcctcgaacgatatcgagaaggctacgaacatcgcccgtacgatggtgatcgaatacggcttctccgacaagctcggtgccatcaagtggggttccgacgatgaccagaccactgtgatggacggtctgcagccgcgcaagtactccgatcgcaccgccgaagtgattgatgacgaggtgctcaagctggtggagaccgcgcacaccgaggcgtggaccatcatcaacgacaaccgcgagatccttgacgagctggtccgccagctgttggtcaaggagaccctgaacgagaaggaacttgcggcgatcttcgcgccgatcaagaaggctccggttcgtccggtgtggttgtccaacgaccgtcgccccgactcggacaagccgccggtggagattcccgaaagccttaagcgctcggtcggcatgaagccggaagagtagacacgatgacgattcggcccgacctgttcatgtggtttctcacgtacgcaggccgggccgacgtcgttgtggacaatgacaagggagagatgagatgaacgaatatatagagtcttgccagcgggagaaacgcacatacgacgaggaaggcgtgcgcgaggccgtacgtctgttcctgaagtcgattggcgaggatcccgagcgcgaggggctggtggaaacacctgaccgtatcgcccgcgcgtgccgcgagctgttcgccggtctgcaggcttccccggccgatgtgctggagaagcacttcgacgtggataccgacgaactggtgctggtcaaggacatcgaactgtattcggtgtgcgagcatcacctgctgccgttccacggcgtggcccatgtgggctatattcccgccaaggacggggtgatggggctgagcaagctcgcccgactggtcgaggtgtatgctcgccggccgcaggtgcaggagcgtttgacccagcagatcgccgacgcgctggtcgagtatgcgggcgcacgtggtgtgattgtggtgaccgaatgcgagcacctgtgcatgtctatgcgcggcatcaagaagtcttccgcccgcacggtgacctctgcggtgcgcggcatgctgcgcaatccggccacccgagccgaagccatgagcctcattttggataaatagtgtctactaagctccctcatcatagggagctcacttgggacctacatagaaggggaaacataatgactgatttgcaggcgttgcatgacactacgcacaccatggtgatgggtgtgctcaacatcaccgaggattcgtcctcggacggcggcctgtggctggacccggccaaggcggcacagcacgggcgcgacatgatggccgccggcgcggacatcatcgacatcggcgccgaatccacgcgccccggcgccaagcgcgtgtccgaggccgacgaattggtccgcatcaccggtgccgtcaagacattgattccggccggtgccatactgtccatcgacaccacgcgcgcatccgtggccgccgctgcgctgagcgagggcgcccagatcatcaacgacgtctccggtggcacgctggatgccgaactgccgcatgtggtcgccgaccacgactgcctgtacatcgtgcagcattggcgcggttggctcgccggctccaagggcgcgaaccccgatcaagacacctccgtctacgagcacggtgtattgaccgacgtacacgacgaactcatgcgccaagtcgacggtgtgctggccgccggcgtaaagcctgagcgcattatcatcgacccgggcctgggcttctccaagcccggcatcgagcacaacctgccgctgctgatcggactcgagaccttccgcgccactggatatccggtgctgatcggccagtcccgcaaacgcttcatctcggcgatgcttaacgaggcgggcgctgccggtgctgatgggccgatcatggtccagcgcgatgacgtgaccgcagccttgtccgccctgtccgccgaacatggcgcatgggccgtgcgcgtacacgacgtggccaaaagccgcgccgccgtcatcgccggcaacacctggcgcgaatacgcatgattcccctggctccctgttttggttgcttctaggccttggctcccctcgggcgaggggagctggcgccgaaggcgactgaggggagcatttgagcagaaagccttaccaatggacaccatcacacttaccggcgtacatgccaacggcacccacggtgtgctcgccttcgaacacgaacggccacaaaccttcgtcgtggatgtcaccctgcaccttgatctggccgcagccggtcaatccgacgatctcaacgacaccatcgattacggccgtgtggccaaggacatcacggctgtcatcgaaggccctcatgtggacctgatcgagcgtctggcccaacgtatcgcggacgagattcttgccgatgcgccggccgtcgcctccatcgacgtcaccgtgcacaagcctcacgcacccatcgtcgtggcttttgcagatgtatcggtctccatctcgcgcgtgcgtgccaccgataatggacgtactgctgaagagcatgccatccataacgcggtggtggccttgggcggcaatgtgggcgaggtggaatccaccttgcgagccgccgttcgggagattgacgcgctgctcggcacacaggtgaccggtatctcaccgctttaccgcacggccgcgtggggcatggccgacggtacgccggatttcctgaacgccgtggtggagcttgaaaccacaatgggcagccacgaattgctcgccgcgttgcaaagcatcgaggcgaaccatgggcgaattcgtgagaatcattgggattccaggccgttggacttggacattatcgactttgatggcatcaccagcgcggatccggatctggcattgccccatccgcgtgcttggcagcgcgcgtttgtgctggctccctgggcggcgctgaatccgaacgccaaacttgccggagcccatgaggggcctgtagccgatttgctggccgccgcaccggaccgtaacgccgtgcagctcgagagcgaagactggatgctcggcgggcatgcagtcaagcaaaaatcagcgtcggagtcggcacccgtctcacgcaaggcgattatttcgctggattccacctcgcaggatgccgaacggctgttccgcgaaaccatcgtttccatcgacagtgttcctggcaatcaggtacagggcatctcgccgctctaccatgtcagccatttcgacggcccggacgcgatgagcgcggtcatccaaatcgaaaccaagttgccgcccgccgacctgattgccgtattgggcagcatcgaaagtgttcatgatctggcagtcgaccttgaccttgtcgacatggaaggcgtgacttccgacgagcccaactgcagcattccttggccgtcggcccgtaaccatgcgtcggtattggcaccttggctggatatggacccgaatgcttctctgggcggcgacccggtggccttccttttggccatggcaccggatgccggacaggtcggattgctatcggacaactggatactgtcgaacagttgagctgatggcagaaccagttacgaacggtaggctagaaaccagacggtgacggaccagtctccggcctcgaacagccgggcacggcagtgacgaaaaccaaatcaagatgaacagcccaagcgcgagggccgttcgcaaacagcaaacagcaacgcaacgataaggaggccggacatgaaaacacggcgaacaccatggtggcagtatgtgatcggtgccgtgctgggcctgttggcgggtatcggtctggcctcctacggcgaaagctcgggactgtcgctgattggtgcgccttggattgtgaccggattgctggccgtgctgggcgttatcgtgctgatcttggccctgcaagtgcataaatacgcgaataccgaccccaagaagcgtccgcatagcttcatcaatcccactatcgcggtgtatacgctggtgctgtctaaggcactgggattggcgggcgcaacgctcgccggctggtatggcggtcagattgtgatgagcctgagccatatcgaggcggatttctatgcacacgccgtcaccgagtgcgcaatcgtggccgtggtgtgcatcgccgacatgatcatcggcattatcggcgaatggttgtgccagttaccgccgaacgaaggccccgaaaacccgaaaatcaaggaagccaagcgccgtagcgacatagcccaggcctacaaaagataatccgtgataagccccctctgacgagggggccgtaggcgtagccgactggggagagaagaagaaaaaccacaccatcggccaagccgattcccactattcctgcggcacgcgaaccatagcttcctgagcgatggccgccaccaagtcgccattctgcgcatacactttggcgatgccgagtccgcgtccgtgcgcggcgataggcgtatcctgcacatataaatgccactcgttgatatcgatatcctgataccaccacatcgaatggtcgatggacgcataggaaatgcccggtgtggaaatcgacagtccggcgcggcgcagcaccggctccatcatcacctgatcgcagccgagtgccagcatcgcacgatgcatgacctgcggcacatcgacgtggccatcggccttcatccacaccatctgcttgccggaatcatgctcggcggaatccttgtctgcgcgcagcatcacggtcggcgtcacgtggcggatatcgaatggcgatttctcggcatagaaattggcgaacggcgacttttcggcgaacggctgcatgagttccttggcggaagccaacgtttcgggatcgggcaggttttccggcatcggatcggcaaattccacaccctcctgaccggtctcctggaaggaggcgatggccgtgagaatcgacccctcggcttgggtgacgttgacccgacgagcggagaacgagcggccgtcgcgaaggttctcgacgtcaaacagcaggtcttgacgaatatcgccggcggcaatgaaatagccatgcaccgaatgcggcaggcgtgaagggcccacggttttggacgcggcgatcaccgactgggcgatgacctggccaccgtagacgcggccagtggggaagtacatactctcgccattgatgtatgtgtgattgcggtaagcggaaggctcgcccaacttcagcaccttcaccagatggtccaatggagttacggtggttgcctgagccatggcgttcctcgattcctgttctgctgtgttcgatattcggttatcgtattccaacctatggttggcagtctatccggtgggggttaagagttccgggagcgaaatgtaacgagactgtttggaaggtaaacggttggttatgcggtgcgttgccgctacgttgctgctgcactgccggtgtgttgccggtgcgttgccgtaggtgactgtgggattttatgggatgcggggcggggcagtcatgggggcaattatgggaaagccgcccctgagggacggctttcgacgtataaagcgcgttgtggcactaatgccggcgtatctcagccgcgcacaagcttcttgtgcaggcggtgcgggcgggccgcatcctcaccgagtcgggccaccttgttctcctggtaggcctggaagttgccttcgaaccagtaccacttggccgggttgtcgtcatcgccctcccacgcgaggatatgcgtggcaacgcggtcgaggaaccaacggtcgtgggagatcaccacggcgcagcccgggaactcgagcagtgcgttttcgagggattccaaagtctcgacgtccagatcgttggtgggctcgtcgagcagcagcaggttgccgccctgcttcagggtcagggccaggttcagacggttgcgctcaccaccggagagcacgccggtcagcttctgctgatcggcgcccttgaagccgaagctggccacataggcgcgggtcggcacttccacaccggccacctcgatgaagtcgaggccgtcggacacggcttcccacaggttcttgttcgggtccaggccctcacggttctggtccacgtagctgattttgacggtgtcgccgatcttcagctcgccgctggtcagcggctccaggcccacgatggtcttgaacagcgtggacttacccacgccgttcgggccgatcacgccgacgatgccgttgcgcggcagcgtgaaggacaggtcgtcgatgagtacgcgctcgccgaaagccttgtggatgtggttggcttccagcacggtggagcccagacgcggaccggccgggatctggatctcggagaagtcgagcttcttgttgttgcgtgcctcgttctccatctggtcgtaacgttccagacgggccttgttcttggcctgacgggccttgggggaggagcgcacccagtcgagctcgttcttcagtcgcttggcgagcttggcgtccttggctccctggatctccagacgcttggccttggtctccaagtaggtggagtagttgcccttgtacgggtacaggtggccgcggtcgaccacgcagatccattcggccacattgtccatgaagtaacgatcgtgggtgacggcgatgacggcacccttgtactggtgcaggaactgttccagccacaggatggactcggcgtccaggtggttggtgggctcgtcgagcagcagcaggtccggggcctcaagcagcagcttgcacagggccacacggcggcgctcgccaccggagcacacgttgaccggggtgtccggatcggggcactgcagggcgtccatcgcctgctcaagctgggagtcgaggtcccaaccgtcggcggcgtcgatctcggtctgcagcttgcccatctcttccatcagggcgtcgaagtcggcgtccgggttggccatttcttcaccgatctcgttgaatcgggcgaccttctcggcaatcgggccgaacgccatcttgatgttctcgcccacggtcttggtgtcatccagcggcggctcctgctgcaggatgccgaccgtgaagcccggggtcagcgtggcctcgccgttgctcacggtctccaggccggccataatcttcagcagggtggacttacccatgccgttcgggcccacgacgccgatcttcgcgccgggcaggaagctcagggtcacgtcatcgaggatcacgcggtcgccgtaggatttacgggccttgatcatctgaaatacgaattctgccatataagtgtcttatcctgtcttatcgttgcaatttcaacgttttgccgggcttggattccgtgatgacacactgtggaacgatgcgtccggtttcgggggttccgaacgacccgtttgatgccgcccgtccctggattttccgtgtcatcgcggcgcctcggtcccaagcaaaagcaccttgtggattatcccatatcccgtctacacgatgcaatggggttctggcgggcgggaattagcgattcggtcatcgggaggagacgtggaaggcggcggcgatgccgtcaatgccgacgccggtaaatgggcgctgggcatgccctgtttcctgagcgagagcccggccctgtatcgtctggcgatttgtcgatcgttgcgattccggcgttctgtcgggctttcatttcgaaatgacgcatctggaatagtgcggccgtctttggtgctcctctcttcagtgatccgccgaggttacgcccatggctgaacgcccggaatgtcccgcgaaatccggcgagacggtctaggccgcggatgtaccgtgaatggcgcataggcgtgtcggtcgccgcaatcatggcaatgagaggaaaccccgttatggatcatgcatcccgatctcagcatcagactcaggccgatgcgtcttcgatctcttcaacgaatccgacggcctcgtcgccgctgcccacccaggcgccgccgtggggcgcgctgtgggtgatggccctgggattggccatgatcgtgctcgacagctcgatcgtcaatgtctccatccccaccatcatcgacgacatcggcattaacctgaccgacgcccagtgggtcacctcgctctacaacatcgtgcttgccgcgttgttgctgcctttcggcaagttgggcgatgccagagggcgcaaactggtgtttcaagccggtaccgtgatcttcgtggcgagttcggcgctcgccgccgcctcgcagggtgcggggatgctgcttgccgcccgtgtgctgcagggcatcggaggcgcgatgatcatgccgaacaccctgtccacggtgtccgccctgttccgtggcaagtaccgtgccgcggcgttcggcgtctggggcgcggtgatgagttcggccgccgcgcttggtccgctgctcggtggcgtgttcaccgagaccttgggatggcgttggatcttcctggtgaacctgccgttgggcatcgcggtctttgtgtcggccatcttcctggtgccgaagaccggtgggaacgcctcggtcgccggtgccgcggatgccgcgcaggatgcccgatcccgtcgcgtcggtgtggatatcccgggcgtggtgttgtctgccctgacctcggccctgttggtgttcggtcttatcgaaggcgagacctacggttggtggaagcagacctcaacgcagttgaagctgggcgggttgagctggaatcgtgactggttgtcgccggtgccgatctgcctgatcgccggtgcgcttctgatggccgtcttcatcgtcttcgaatccgcgcggggcaaagccggttggccggtcatgctggacatgaccctgttccgcatcaagacgttctcgtggggtaatctggcggccgcggccatcgccgccggcgagttcgcgctggtgttcatgctgccgttgtatctcatcaacgcccgcgggctcaacacgctgcaggccggtgcgatgctggctgtgatgggcttggggtccatcgtcgcaggtgcgcaggcccatgtcatggccgccaggctcaccccggccggcgtgatccaactcggtcttgtgatcgagatcatcgccgtcgccctggtcgcggtccttatgcctgtggggttctctgtgtggtggcagcttgttcccatggccgcatacggtctgggtctgggcttcgcctccgcgcagctgaccagcgtggtgctctccgaagtgccgatcatgcagtccggcgaagggtcggccacccagtccacggttcgacagctcggcaccgccgtcg

SEQ ID NO: 140 - DNA, 8378 bp, Unknown
  R206_24m  MAG No. k141_44447
gaatcgcggtggccaggacggagaacgccactaacagcgcgaccatggccgccaacgtggcgaccaaacgatacgcgagcacgctgatggcattcatactggacagtgcgcgccagtacagcggcagcacgccccagccgatattggacacgagcggcgcggctatccccattcgcgtctgctcgacggtacgaaccgaagtcacgtctcaccaccatagcgactgatcacatgagtgtcccgcacctggtcacatggcatattggacttgctgatgatgaacagtaccggttattgttagagtcttttccacaggacacggagattgaacagatgattcggccttttctgagggcgcgaatcagattcgtaacgcagtggtttgccccagactctgttacggtgataataacttcatcgttgataagggagtcttcatggcaggcaatggcaacacggcatttcgtttccgagtcactttgcgccttgacgggcgtgaatgctggcgggagattctggtgccggcatcattgacgttcttcgatttgcatgcggtattgcaggaatgctttatgtggtacggcgagcatctgttctgcttctgcgccacatttccggatgggaagcaggtgcaagtggaagaattgtggggagaggagccctcataccatgaggcgaaatacgaacaatatatgccggtggagccgttgccggaagttcgcattgcttcggaaaccgagctgggcgacgtgtttcccaaggcgcgtaccgctcgctattactacgattatggtgacgattggatccatgatattaagctgctgcgtacctaccgcagcgtgcacgttgcggatcctcagctttgggatggggcaggggatgcgcctccggaggatgtcggcggggtgtatgggttcgatcggttccttgataccttgggcaatcccgaagatgaagaacatgatggcatggttgagtgggccgaggaccagatgtgggatcgtttcacgctgaaccgccatcgtgagcgtctgttccgttggcacaagcaccgtgacatgatgttgcagtagatggcgtggctacaatatgagcagctgtcagcggaatagccgtttgtggcttgcgggctaggggctgaaaatgctataaatatattgctttactcggaaacgagaaaggctccaagtcgccggggggctcccccggcattttttgtcaacggggacgggggtgcgatgccgtctgtattgagcatcttcgctgatgagagcggtgagtggggtaaacgatcagaatattatttaattactcttgttttttcatgaccagtctaaggatattagtcttgccttagagcggtaccgccagtcgttggctgactatggacttcctgatgtccctttccatgctgggccgctgcttaccgggcatgatgcttacgaagggatgagcctatcggagcgtaagaggcttctgggtttattcattatcatgactcggcggctgccgattacatatcggacgtttgtgcatcgtaaaagtgattttgacgataaccgccaacgttttgaagcgcaactcaaacgcgatattgttaatctacttttggcgcatctttcggatttccattcttatggcactgtcaaggtgtattacgacggtggtcaacagatagttactgatgccctgcgaggcgggattgagtatgcactctcaaaagatgccattgtctatcgtgacgcttctccacgcgactaccggcttgaacaagttgcggattttctatgcacccttgaattgacctgtgagaaattccggaatggggaacaaactgaaacggacaacaagttttttggtgattggaaatccttcagagtcaattatcttaagccgatccgcaggaaaagattggaatcataaatttggcagtgcccatatatattcgggacataattgaataacacgaaatagcaaacaaaatccccggacctacacaatcatcgccacgacaatctcagaaaacaccgttacggcaatcagtggtgcggtgccgtcgatgaaggcgggcatgggtggcagatggcagtaggcgaggtagcaggccatgtcggcgataagcaaaatcagcaggatgatggccaaaacgatggcggcggttgccccgagagctccggaactgtgcaacatagtcagcgcacatagttccagcgtgatccacatgacgatgagcaacagttccgtggtagtcggccgttgcaacagtcgcgaagtaagcacggccagaatggtataggcggcaacgccaccgaccgcgaaccgctgaatctgctgatttcgccggccctattaagtccctcaactccatcaatcgccgtctgacccatcacatcacgctttcatacacattgccgattgacagtcttagaacacagtctagaactgtcatggcatgttcacgcagataggggctccaacaaaattggctaaaagagaactcggcaacctataaaaaagacgcgcccgtgtgcccttacgttcagctccgctcacgaatgaaatcgaagatcacgtcgaagacctgctggctccagaaatcgtactcatgttcggcgccgtcgactagcaccagctgcgcgtccacgccgtgctcgaccagccggtcgcgcatcttgacggattgatggtaggggaccacggtgtcggcggtaccgtgcaacaggagcatcggcggatactgctggtcatcccgcacctgcaggtaggggctcatgtcagccgcgcgctgacggacctcggcattgatgccggtctcatgggtcgcgcccaccacggccgcgaacgggccgaaataatacagccggaatggattggtctcatcgtcgaatgcgtcgactgcttcaagcatgtcggtgggcgggaagcagctgaccacgtacttcaccgcatcgctctcatcggcattggtgccgtcctcataccgcggatcgtcggaggtcaaccccaccagcaacgacgtgttgccgccggacgacgtgccccagataccgagacggtcggggtccacgtgccattgacgtgcgtttgccctgagatagcggatggctgcttttacgtcctcgagatatgcggggaacacgtcgtggggatcgctcgaggcgtcgcgatgattcaccgtagccaccacaaagccttcgcgggccaaagccgagagctgcgggatctcgtagtcgcgatgcggcgtggtccaggcactgccttgcacgaatatcacggtggggtagcggcggtcatcgtcatcgccggtggattgtggtgagatgatatccatcaccaggttatcggccccggtcttgtacgccacgttgcgggtcagcgtggccaatccggcaagcgtgggattgtgcgggatatggatggcattgtttgcgccggcattggcatcggtgactttggctgaatcggtagtgttcatagaatccccctagctctgttgctatagaggtcatcatacaagaaataggcatgattacggcacaacgatgtctcggtcacagcgaagacatgaaggcgcgaagacgcgcccggcagcgcgcgctgcctgcctgcgagttgccttcaagtgcacttcaagcgataaggtgacataagcagcggcaatggagattgctgcccggcaacgaagcggacagtgcccgttcgccgattcacgataacagaaatgagacactatgaagactcaggaaatcggacaatccggcatgattgcgtcacgagtggcgctgggcgtgatgcgcatggacgcgttggatgccgccgatgcggcacgtaccgtggccgtggcccatgattccggcatcgactatttcgacacggcggaatgcatacacagatgctcgacgctgaaatccaattcaatatggcgagcgatcccgcagccgatcgcaccggtggcatcctgccttattcacgactgaagcatatgaccattcaggcatggtgcccattccaatccggcacggaatacggtccgttcgtcggcaacgagcatttccccgagctgaacgccgaattgacccgtcttgccggcaatccgttggtgtgagcgagagatgacgagaccaaggccgttgaggcgcgtgttcagcgtgcatacatctcaacggcggtcaatgctgtgtcaatgccaacattcagtgcctccgggcgtgcaccatctggcgaaagctgatgtgtatgtccatacagcagcctgcgaccgtcaaacggcaacgccttgccgctgaacttcgccacatcatcgggccaactgtatgccagatcctcccgatacgggtaatgcgaaagattgaccgtaccgagtccctcaatctcaaccgtatcgtgcggctccaaactttcgaacaggttaagtgcggggcggtcttcccgccaccagtcatcatggttgccgatcacaccatgcagatgcttgcaattgagcgctcgcaggcagttcttcagatgggtcagcgatgtgcggaaaccgatatcacccagaatccacagctcatcatccgggccgaccaaagtgttgatatgatccacaatcgccttgtcatgcgcatccgtatcggcgacctgacgaaacgtcagacccgcgccgaacgtctcctccttggcccaatcctcggcggtcttgcgatcatgcgcgtcgcacctcctcatagcgcgagcgcgtcggatcgaacgtcgtgaaccctcgcaacaccgtgaccagcggatgcccgaaatgcgtgtcggtcgtgaaatacctcatgacagtcgccttcccttttcggcgtgcagcaatgatttcccatcctaggcgcagccggcacctgtcggttcgtgttgccataatgaggcgcattgcaggggaacccgtgaacgcaagctgccggccatcgtggcggcgaacgggttgagaaaggcgctgtgcctgacccttggaacctgttggccaacaccatcgaagggagcaacgatgacttttgacgccgtcgcattcggcccgatcactctgaaccacctgccgccattcgcccagcgcctacgacatgcagtacacgtggaaacccgaatgggatgtgtgaggagttcgatggatgagcggtgggcgcgtgctttgcgcgccaaaggcattgatattgacgaggctgaaggtgctgatgagaaacgggcacacgacggcaaacggcataccaacatcacgggtactggtcgacgctccgagtcccagccggctgccgggctccgcggtcgatccaataccagtacgaatctgccggggccgaaggtgacggcacgcgccacgccattcaaggccaccggtcataagggcggcatcagccggcaggggaattgagctgatcgcagaaccatcgcgcgatgaatgggcatggccaacgccattccgccattgttgagccgcttctacttggaccggtacctctttgaacggagattccatattgaagctattccggcatcatatggcacgtaggaaatcccggatatcggcgatttcctcatcacagatggcatgggccatgccggaatactcgcgataggtcagatgcccggcccgttcaaggacctgatgggccgtttgctggtcgggcatcggaatcgtgcggtcctgcgcgccatacgccaggaagaatcgggtaggggagtcaagcgccgcctgttcctcgcccatgaacgaaggactgagcaggatcgcggcatcgaacaacgccggatgcgccttgaccagacgatacgacagataaccgccttgggagaaaccgatcaatatcttcctgcgatgggcgaatgccgaggcatccagcagtgaaaccaccgcatccccgaccgccgcgcattcgcgttggcgctcgtccacgccgcagccgtcgggataccagtaattgccgcccatatagggcctcgcgtaggtggcacgaaacgagatatagctgggtgcggcggcaattgcggccggggccgtatcggctcgcgtcggcgcatatacggcgtcgagaatccgcaccatctcgctttcgtcgttgccgtaaccgtggaacatcaggaaaatggggtcattgccgccggcatcaatctggcttgtcatctgcattcgcatcgtcatcacctcaccaacgagcttacatgcattagacttgtagcgattgacccaccgagcatgcaaggagcaagttatggagccgaggcgcgggcctctcaccgcaggcgagaaggtgcagttcaccgaccgcaagggcaagaagatcaccgatcagcttgtggccggcggctccacgcagaccgagcacggcctgattctgcatgacgatgtgatcggcaagaccgaaggcaccgtcatcctcaccgtgcacgccaagcgtgaggcacaggtcaatcaggtctaccccgagaaagacaagaacaagccgtggaaatcgtcgcgcgccatcggcggctgggagtatgcggtgatgcgcccgcgactggccgattatgtgctttcgatgccgcgcggtgcgcagatcatgtatccgaaggacatcgcccaggtcattcagctcggcgacatccgctccggcatgcgcgtgcttgagtccggtgccggctcgggcgcgatgagcgtgaatctgctggacgccgtgggcgagcgcggccatctgaccacgatcgagctgcgccccgaattcgccaaagtggctcaggccaacgccacgctgtattatggtgaagcccccagctggtgggatctcaaaaccggcgacttcgactccgtggccgccgaactgcccgaacactggttcgaccgtatcatgctcgacatgctcgacccgtggaacagactcgagcaggcataccgcgtgattgcccccggcggcgtgttggtcagttacgtaactaccaccacgcagatgagtcgactggccgaagccctgcgcgcggccggttgctggaccgagccgcagatccaggaatcgttcgaacgcacatggaaggcccaaggcctcgccgtacgccccgaccaccagatgatcggccataccggtttccttgttatctcgcgcgccatggcctccggattcgaggcgctcagaaagcgcgatcgcgtgaccaaggacacgcagaccgacatcgactcgctcaccgacgaacagcgtgaggcgcagatcgaggaactggaactgcgcgacatctccgaccacaaactacgtaaggtgttgcgcgacctcgaccgtcaggtgggagaactcggcaacacgcatgaataaccgcccgacgatgagtttgtgaacgctcacacacctctatactggaagcaacaccacaccgccacaccgggcagacggttcgtgaagggagccacggatgggcatcaagctgagcaaagtcgccaaagcagcgaaaaaatacgaccatatcctcatcatcatgaggcatgccaaggccgagccgttcggcgacaagggtgactcggagcgcgagctcaccgacaaaggtctgaaacaggcgaaggccgtgggcaagggcatcgagtcgctgggactggtgcccgaccagatctcctgctcgtccgccacccgcacgcgccagacactggaccgcatgctcaagacctttggcgacaagccgatcgtcgactaccgcatcagcctgtatgacgggggagtgcaggcggtgttcgacgagctcgcccacgtcaaggccaagaaccgcgtgttcatgatagtgggccacgagccgactgtgtcgatcagcgcccaatggctcgcctccgccgactccgacggcgaacgactcgacctgctcaacttgggactttcgcccgcatccatcgtgatcatgggatcgaacaaaccgttcgacgaatggcaggtgcacagcggcgaactgctcgcggtcatcaatgtgaaagacttcgactaaagcggatataaattccatctataacgacactctgcggccatttataaggggtggaatccggatgttttgctaccctaagtcgggttacgaacgcatacattggaggattcatgtccactctgacttccgtctccggcttcccccgcatcgggcagaaccgcgaactgaagaagatcatcgaaggctactggaagggcgccaacgacctggccgccgtcaaggccaccgccgccgaactgcgcgccaagcactggaagctgcagcaggccgccggcatcggcctcatccccagcaacgacttcagctactacgatcagatgctggacaccgccatcctcctcaacgtgattccgaagcgttacgagcgtctcgccttcgataaccaggaggacacgctcttcgccatggcccgcggctaccagggcgac

SEQ ID NO: 141 - DNA, 5910 bp, Unknown
  R206_24m  MAG No. k141_44975
ccaggcactgcctggtcggataacccagatgctccaccacctgggccgtcgtcatcggcgtggtgaaatacaactccaccgcacgctctcgttcctcaagaccggacatacgaaaatctttccgttcggtctccaagaaaatgtccgcagccccttatcaaaagcagctggagtcggcaatcaccttcaatgtcaaaatgctattgacggcttatggttattcgcagtccagcttggccgaagcgatgggaattggccgttcggccatgtccctaaagatgtcggggaaaacaggctggtctgtatacgacctggttaatgcatcaagattcttgaaagtaagcacggaacaacttcttgatgattctctgatgaggagaatgggcgtttcggacgatgcggaggcggatatggaaaagtccgccgtttccggcggactttccgatgatggtaccccccgtcggagcgcgcctccgcggaggcactcgaaaacatccacccgttcgccgacgacaacgggcgtaccggacgccagatcctcaacatgatgctcatgcaggcggggtacgagcccatcgccatcaggcatgatgccggcagcacctacgccggacggctcgagcagtggcaggcgtacggcaatccggttcccctagcgtgcatggtcgcggactgcgtggtccgggaacagtgccggatcgggaagatcgtgtccgatatccgccgcgggcatcccatcgccggacacgccagaggtatacgtgaatagtgtgtttacacactgttcgagaataataccctgacatgtcaactaacgcaacgtttactgggatgacggacaagaaggttggttcctatcagctcataatgacgttgccgactgcttgatggtggttgtggcgcttgtttgttcgattccgccggtgctgggtcgttttcgtctggctgaacggcggccaatctgggagttcgttctggtagacctcgtcgggccataatctcccagattctgcgggagtttacgctgacttcgggaattcgccgctgaactcccgtgccggacgcgggagtttacgagaatccggtactctcatgcataatctctcaacaaaaacgttggaattccgcgattctcaaaaatcgaccttgaagccgttcccgggagaacttcgccggattcatgtttcgcgctaaactcccgcgcgcatccggaagttttcatagaatcggtcgcgcaaacggacatccggatttctcaatttctcccgggatcagcctcttccaccgagttttccagaccacaatctgaaaactcgtgatttgagcctgctgaatcgagattttgagttcttcccaaactgactgccgcaaactgaccgcactcatcgtcctgtcagcgcagccggtttgcggaatggaagacgtgtgcggagagcagcgcgcagcggtgcatagtccccatggttggtggccgtccgcggctactccagcggtgtgcgatcccactggtcggcgcgtggaatggtgcgcaggctgcgcgaactgacgattagcagcatactgacgagcatcaccgcccagaacaccagcatagtcccgctgaatccgaaagcgggcaacagacttccggccgtcgctgagcagaacgcggacagtgcctgggccggtacggtaagcgtcacggtgatacgcccctgcatcgtgtcgggcgtcttaccgaaaatgaacccgagctgcaacgcgttgatgatcgggaacggcaggcacatcacggcgttggcgataagcagcacccagtagttgtcggtcagcagcatcggcagcgaagcgatgcagatgaacacgaatccgcagcatgtcaccggcccgaccggtgcggtatcgctgatccgtccggcgatgaacgcacccgccagcatcgcgaggaatacgcccgtattcacgaatccgatgagcgtcgcgttcacgccggtgcgcatcagatgcagctgaatcgcatactggaagccattgaccccgaaattcgccagcgcggacgacaccatcgtcaacaccagcatcctgcggtgcagcgaccacgaccatccttcggcgaaatcacggaaaaatgacgcgccgcccgctttcccaccgtcatcgtcgctatcgccgttgccgctatcgctgccgttccgcggatttccgccgactcggatacgtgtcgcagccacgcctgccagcaggtacatgaccgcagccgacaggaacggcaaccacggggcgatgccgtacagcaggccgccgactgggctgccggccatgttgatggtcgcgtcacggccttcgttgagactgcgcgctttcggatatgagcgaatatcgacgatggatttgagcatcgcatccgaggcggggccgagaaacccgttgaccgcagactcgaacaccgcgatggcaagcagcacggggaagaccagcttgccggccatgagcagcgcagcgactgacccccaacagatgacgcccgctgtcgcgttcacgatgatcagtgtcttgcgatcgtgacggtcggcgaatgtcccgccgaacacggcggtcgcctgctgtgcgatcgcggccagcgagcccaaccaacccgctgctgtggtcgatccggtgagcttgtatccgatcagagagaccgccagataccgcagggccacgccgatggccgtcgcgctgtccgccgtgaaccatggcacgtaacctgggatatcccacaacctgctttcgcgcacaggagcagaaacgagctttaacgaattactcatctaataatttatccttaccctaccagtactggaatcctacagaagattaggcggcactggttctttacaaacttgctcagtatgccaagcataatcatatatatatcgaagtaacccttttctccataatgagcaggacagcaatgacatcgataatcttcaacctgttccgctaccaacgatcccaatgttgaacataatcgatagctaagcttaccggactcatggtgcagcaatagcttgcctttgattgccaagtgtgaagaaatatagtcatatttattgttcggataatagaattcaggcaaacttaccgaattaccaaaatagcctggattaacaatgaacgctatatctttcttatcacatgagtagttaatcatccttgcgacttcggtggtgcttggaacgtctgccgcttgaattactaagttgattttctctcggtcaattaattcatcaagttcactatgacaagttatcattttatcaatgctatctatagaaagacatcttgacgccctggatttcagcacatcaacctttttcttcccaatgtctgttcgcacgtaatcctgacggtaaatgttgtctacagtgacaacatcatgatcgaccaaagtaatatgttccaaagcaagcattgaaatgtgccgataaatatgacttccaatagacccgcatccgagcagcaggcatctaatttgtcgcggctcagcgtgttcgacacgcaatacgtccaaactgacaagtttgtcaatagccgctggggccggtaacgttttgttggactcgtggcataatcaaaccatagaaacaaagaaatccaataaagcgacaccgtatccaagtgcccacctctatttgacggaatgcaccatattccggcaccgacgaacatcaggatcgagccccatcaccaatcggcaccaagccgcccatatcccatgattagctaaagatatctctgaatcacagcgttcagaaaggaggcgccatggaaaagccactgcttctgctggccttggtgccgctggccgtcggattggtcctgatatccgtcgtgatcggatccaaaaaccgggaagagaacgcaaaaggactcttttgcgttctcttctcagcgctcatggtcgttgccggcgcgttggccatcgcgagacaactcgtatgacgcttcacgctgcggcatgttgtcccggctattgcccacgcccattcccagctctccgcgccattcccgcaatcacgtctcttccccggtctcaagcccatgagacacttggagccatgactaccatcatcatgcgcacctctgagggcgatatcaccatcaacctgttcgacgacaaggccccgaacaccgtggccaacttcctgggcctcgccaccggcgagaaggaatgggccgacccgtacaccggccagccttcccatggcaagttctacaacggcctgaccttccaccgtatcatcaagcagttcatgattcagggcggctgcccgctcggcaccggtaccggcggccctggctacgagttcgacgatgagatcgacccgagcctgaagttcgacaagccatacctgctggctatggccaacgccggtctgcgtcgcggcatggacggcaaggtccatggcaccaacggctcccagttcttcatcaccaccgtgccgaccccgtggctggacggtcaccacaccatcttcggcgaggtcgccgatgacgactccaagaaggtcgtcgataagctcgaagcactggacaccgatccgatggatcgcccgctcgagccggccgtaattctgtccgtgaacgtggccgagtaagaccgacacatatacagcaaaggtcctgattggtattccagtcaggaccttttcgtattcttggctccctctctgaggggagctggcgccgcagacgtctgaggggagttccgcaagcccgcgctgctcccctcagtcagcttcgctgacagcccctcccggaggggagccaagcaacggcctacttcatcttgcgcagtcgaggttcggcggattccttggcaccggtgatgcggtacacgtcgaacacgccatcaatcttgcgcacggctgccagcaacgagttgagatgctgcggatcggccatttcgaagctgaactggctggtggccacgcgatcggaaccggtggcgatcgtaccggaaatgatgttcacgccatggtcggaaagcacacgtgtcacgtccgaaagcaggtttcgtcgatccagcgcctcgacctgaatcttgaccatgaacaggcccttggtgctggtccattcgacttcgaccacacgctcaggctgcttgtttttcagatcgatcatgttctggcagtcggtgcggtgcacggatacgccctgattacgggtgacgaagccgatgatctggtctcccggcaccggcatgcagcaacgggccagcttgatccacacatcgcccacgcccttgacggataccccggtggagctgctggaagtcttgcgctccacgggcttgagcggcagagcctcctgctcgacctcctcatcgacctcgtcggccccggcatccttgaccagatgcgagatgacgttctgcgtggagatctgcccatcaccgatggcggcgaacacagcgtcggcgttcgggaaattgaggtcgtcggccacaccgatcaatgcctcggtggtcagcagcgcattgaccggcaagttacgtttgcgcatagcgcgggtcagttcgtcgcggccttcctcaatagcctcggtacgacgttccttcgagaaccactggcggatcttgtttcgtgccttcgggctcttgacgaagctcagccagtcgcgcgaaggaccggcggtatcggacttggaagtcaggatctccacggtgtcgccgttgtcgagcgtggtgtcgagcggcaccaaacgcccgttgacgcgcgcgcccatcgtacggtggcccacttcggtatgcacggcataggcgaaatcgaccggtgtggcatgggccggcaaagagacgatcttgcccttcggcgtgaagacatagacttcggacgagccgaggtcttccttcagggaaccgaggaattcgttggaatctggggtttc

SEQ ID NO: 142 - DNA, 9736 bp, Unknown
  R206_24m  MAG No. k141_45040
acccacggacgaccagaactggccgtcctgcagcaggcgcgcgtagttctcgaccccgacgaacctcgtgccgccgatcatctgcttcttgaagaagctgatgtaaacggcgtacacgatcgggataatgaacacgaacaccaccgtgaacggccacatgaacttccatccacgccaatcggccttatgcttgttgacgcgggcctcggccgtgtgcagatccgcctcctcaggcaggattcccaccgttggctgcgaggctgcggccattgtttgatcggacataatcgattgctttcttggaatacggattgctgtgctgcgcccgctatcaggggggccgctcgattggagcggtcacgtcaggtgagggcatgggaaagcggggacactggggagcatccccgctgtgggagatcgggcggctaggcggaaggagagtggcctagccgcaggttttgattgttggtcagtgccggatgtaccggcaatagaccggattgtgtcacttgacggtgacgttgtagccctgctgcttgccttgctcggccagcttcttggcgtagttctggagtgcttcctccagggtgatgtcgccggagtaggccttggagacttcgtcgccgtaagtggtctgggcgtacgggttgtacggcaggtactggaacttctcggtcgggcgctgagccgcggcggaaaggacttcgttgacgttctgaccgccgaagtagtcgttggtcttcttgttggacccggtggtcgggtcggtgaaggagtcggacttcaggatcttcttcagggacgggaaggtaccggtgtcggccatggtctgagcgccctcgccatgagtcatgtactcaacgagcttgtaggcagcggcctggttcttggactgcgaggtgacggcaagtgcggagccaccgtcttcggcggagacttccttgccgtcctcccactgtggcagctgggcgacgcgccagttgccggcctgatcgggggcgccggtcatgaggttgatcggcatccaagcgccgatggtcagggaggcgagggtgccatcgttgagctcgcggttccaatcgtcggaccagttcggggtcttggtgtccacgaggtcttcgtcgatgagcttctggacgaattggatatagcgctgcatgccctcgtccttggtcatgttgatagtgatgttctcgccatcgaccttccacggctgggcgccggcctgccaaatctgggcggtgaagggctggtagtcgttggacgtgccggcaaagttggtgatgtaggagccgatggcgcgaatcttcttggcggcctcgtagtagtcatcccaagtcttgatggactcgccgtccacgccggccttgtcgaacactgccttgttgtagaagaacatttcagggccggaatcaatcggaagagcgtacggcttgttgttgtactggagcttgttccacgggccggcggcgaagtcgtcggcgagcttgtcggcaccgaaccggctcagatccacgaggccatcggtgacggcgaactgagtgacggtcggatcttcgagcatcacgacatccggggcgccattgccggcggcgatggcgttggagagcgcggtggaggtcttctcggcggtgccggtgttgttgaacttgacggtgatgccggggttggccttctcgaagtcagcgaggatttccttcatcgagttgccggaatcccagccccagaacacgagttcggccttgtcggcgtcacccttgttgacgctgttgtcgttgctgctgccgcaggcggcgagaccgacgagcgtggccacggctgccgttgccgcgatgaccttcttggtgttgcgcatgttatctcctcctggaccattggagttggcttgcgggtggttggctttcttccgactggcttccggttttcgtccggttacttctcggttatcttccggctgtctttggctgccttccgattgccaaaaacgaatcgactgctgcgttggatttcaattcgtttggccgcttgcgaagtctcctctggccacctttccttggggtgttttctttggtacacccgtgtaccaatacctaagatgatacacctgtgtaccaatttgtcaaaatcacccaacacgcctgattttttcgccttttccacgctttccacgtgagcaaatctccagtcgaacagcgactcatctcagaggctcttcatcccctcccccaacgtgagtaggtcccgactctcagcacaccaccaaataacgcgtagcatgctcgtgagtctccaacaccacacaccacggcgcgattccaccgctcagccgcctcaccaatgcccacatttgtagatattcaacgccacatgacaagaatctgaccagtatgaacaggcacccccatagctgtattgagaggaagagcacatggcggtcctgtttcaagctgcttccaagcagcgcaatcccttgggaacaaccatacgtactcacggatcaggcaaatatacgttcggtctggccttaagcgccggccaatatccgcggtctgcctgcctttccctatcagctcctcacggtatgcggcatcttcctgaccaatgtcatcaactacatcatcgcctcctacgattccagaagctgggatgtcaacaccggttggcgttggatgctggggctgggtgcgattccggccgccgcgttcctgctctccatggtgcgagcaccggaaaacccacgattcctcattcaagccggcagaaccgaagagggattcgcggtgctcgagcacatcatcggccccgaacaggcacgccttcgcactgacgacatccatgcatcggtcaaactcgaaaccgaaatgtcgcatgaatttcacgacctgttccgcccggggctgcggaaggcgctcgccatcggcgctttgatcaaggcgtgaatgctgcgttgcgttactgcattgccatgttgccatgttgccgcgttattgcattgctacgtcgccacgttgccacatcacattgcattgccgcattgctgcgttgccacatcacatatcgcaacacaaacgcagcaacgcaatgacaaccggagatggcatcgccgccacccgcgaggaaccgcaatgcaacgcggtaacgtaacgcaatgcgatgtgattcccgcgtagttacaggcagttacagattgagtaccgcatcagcaatgcgcatggcggattcgcggtgggagaccagcaccacagccgcgccgcgctccttgtctgcatgctgctcacccacggccatagcgtgaatggaacgtagaataatagcctcgttcaaagcatccaaacggctggtcggctcgtcgaaaagcaccagatcagcattgcgcaggaacacacgagccaaaccgatacgctggcgttcaccttcggatagacggtcgcccagctcgcctacctgagtatcaaggccatcgggcaaggaatcgatgaggtcaagcacggaggccttggcgagagcctgacgcaaacgagcgtcgagaccgtcagatgctgccacctgaacggcatcgccctctgccgattgcgccgccaaccgctgctgtcgggaatcaacggtcttggcacccacttccccattgcctgcaacatttgcagcttcaacctcggactcaggcaaagcaatcagcagattgtctcggatagagccatcaaacaggtgggtttcctggctcatcatggcctgaatacgtcggcgagcatgcacatcgacctcgggcaacggcgtgccggacaacgtcacctgaccgcgctgcggatcccagtagcgcagcagcagcttgagcatggtggacttgcctcggccggacggcccctggatacccagcacgccatgctgcggcacgtcaagcgagaagtcggacaggacttcatgctcccccgcatatgcaaaggtgacgtcatcaagacgcatgcccatatactcctgcggcacaacagtgccgttctcggttacagcgggcacctcgtccatcagtccgaacagtcggctagcggacgcgaaggtctgagtcaggttagcgggcaaggcggcgagcgccaaagtcggttcgaacgagctggcgaacagcacgaaggcggcaatcagagccggaatgctctgcgggttcgcgccggcacaggcaatagccacggcgaccgaagccgctgtgagcacagccaccaagagtccgctgattccggtgaaacggccgttgaccttgctgagtttggcgtgatccttccacaacgcatgggtacggtcctcgatggcctgcgcacgttcctcgccgcggccaaatcggatgatttcgtccaggccgcgcatgtcatcgagtatcacatcgtcgagttctccggcagcgccacggatggcagggccaaggttacgtacgccggtggcaaagaatcgcggcacaaggatgccgataaccaggtgggcggcaatcaacgccagcgccatccatgggcttagggtggcggccacaatcgtgtagatgatggtggaggttaccgcgatggccaccggactgatggtgtgggcaaagaagatctcaagcagttccacatcggtggtcagcatggcgataaggttgcccttacctttgcccgcgagcttggccggcgccagtctgcgcaacgcggcgaacgccttggaacggaagagtgcgagcagatggaatgccacattgtggttcagatattgttcaatgtatcgggtgatgccacgcagaagagcacagataatcatcatgatgacggcgggcgcaacacccatgccccacaccggattaccggtaagtgcaaatgccgcgataatgccgaacacgggcaggaaagtggccgaaagatggccgatggtgccggcggtggaggccgctgccatcagtcctgccagaggtcgggcttccttaagcagtcgcctgatcacttggaatgtgctcattttggaagacgaatcgctatttgcaacaccagccggagtctcagccgaggcctgctcactcccgccaacggaagccgtcggcaaagctgactgcaggcggtcaaccgtcatacccgcctctgcgcttacgcgcgttgcgccaccctcagtccgactgtcgtcggacagctcctgcttgcgggaaccaacctgcagcacacgccgagcatggccttctccgaagttctcaatatctgcctgcgtggtaaacagcttggcgtagacgccgtccgccgtcatcagctcggtatgggtgcccctctcaaccgacttgccgtattcgagcaccaccacttgatcagcgtgttcggcgttggccatgcgatgggtgatcataataaccgtcttgccgcgggattgcgccaattcgcgaattgtatccaggatcagctcttcggattccatgtcaacgctgctggtcgcctcatcgaacacaaataccggcgaatcatgcaggagcgcgcgggcgatggcgatgcgctggcgttggccgccggacaggttggcggcatcggactcaatcggcatgcccaagtccgttcggctgtgcgtgcacgaagtcggcaatgcgcgcctgctcgagcgcggaccacagacgggagtccacggaatccggcgaatcaggaatctcgtcatcgggcaaggccatcagaagattctcgcgcaatgcgcccgcaaacagatggctgctggcaccaatcacagtgacggctccggccagtgtttcgcctgacaaatcggatacctcgacgccgttcagcgtgagcgaacctcggtaaccggccagtgtaccggcgagcagcgaggcggccgtggacttgccggaaccggagatgccaacaatggcggtgaactgaccgggccgtgcggcgaaggtgatgttggtgagcgcaggagcgacggcggaattggggctggtttcaccttgcttatcggtctttgcggatgcggacttggagtcgccgtgcccggcatcatcataggaatagccgacgtggtcgaagcggaccgtcagaccgtcgtcagcggaatcggaatcgttggccggcagggtcgccgtgccatgctcgggctccggggtgtccagcagagcgaagatgcgcttggtggaggtcatgccgttcatcgccacgtggaagaacgagccaagctgacgcatgggaataaagaattcggcggacagcagcacaatcagcagcagtccggcgagggtgagcgggaagcccgcaccgaacggcatcaggtattgcaggccgtaggccaggtaggcgaatgcgccgggcaggtgggcggcgagcatgatcggcgaccagccggcggtgctggctcctgcggcggctgcggtggtatgcgcatactgctgcggtggtatgcgcgtattgccataacgccacaccaatgccggccgccgcaccgccgtaggccacgatatccatggcggtcagcgagcgcagctggatctgcagcacgcgcatggtcatgaccctgcgctccacattccgcgcaatcccattcaccttaagcgaacgccctcgcacatgccagacttttaaagtgagagaggccacagaattttcgattgcggagtgcgcatgctagacgcgccaaccagaagaaatatgcttcgatatcaggggctgaagcatcaactacacccaatacgtgcatttatccgtttcgaggaagctaatttttgcgtttgccggaggtctacttccgtttcaaggggctgatttcgcatttgccggaagtctatctccgcttcgaggggctcctcatccatgtaatcggaagtataaacagctacacgtcaacgtcattccgccgttttagggccgcgtctacttgggcatcagcccctcgaagtggaagtagacttccggataaggcaaaatcagcccctcgaagccgagaaagcacgtttctacggtgtcagaagccgacggaacgcaaaagggtcgtctgcacgcagacgacccatatgatcaattcgccaatagacgcagcaaacgcggcctagtgctgcttttgcgcggcgaccagtgcttcggcggcgaccgtacttatcggacaggaagccggaggagccggcgccgatcacgccgccgatcatgatggagctgatgaccagaccctgcagggccgggctcagcgcgtacttgtcctgcaggaagtcgatggctcccgaaatggacacggtcataaccgtagagcaaaccggttagacacggtgttgtatacaatccacaaaaccagacagacaacttctccattgcccacaacgcgcgcaaccttacgccagcgtaacctaacttgtcagaatggctcgattttgtcaacagccatcacgcaacgcacgtaaggacacggcccgcttatgcttgaccactacaccacgcctggcgaatccatcgaaatccgcgacaaccagaccatctactccctacttaccgatcgccttgcccgcaccggcgcggacacggtaatcgccgccaagaaaatcggccccggccgctggcagaacgtcaccaccggcgaattccacgagcgcgtggtctcggccgccaagggcctgatcgcgctcggcatcgccaagggcgacgcggtgaccatcttttcctccacccgtctagaatggggcattctcgatttcgcactggccgcggtgggcgcggtaagcgtgccgatctatgacaccgactccgccccgcaggcccagcgcatcatgaacgattcggtggtcaagctggcctttgccgacaatcgcgagcgcttcgaccggctcgactcggtcaaggaccactgccctgccttgaagcagattctcatgctcgagggcaacgcactgggcgcgctcgaaggtctgggcgtggctgtttcggacgaggaactgaacgagcgcgtggccaccgtgcgcgccgacgatctggccaccatcgtctacacctcgggctccaccggcaacccgaagggtgccgaactgacccataagaacttcgtgtccatcaccatcaccgcttcgcaggcgcttcatgaagtggtgcttgacgaccatccacgcctgctgctcttcctgccgctggcccactgcttcgcacgatttatccagtacgcctccatcgcctccgatgacggcgtggtcggttatctgccggataccaagtccctgctgccggacctgcgttcgtttgaaccgacctacctgctgggcgtgccgcgcgtgttcgagaaggtgtacaacgccgcctcgcataaggccggtgccggctggaagggccgcctgtttgtcaaagccgccgaggccgcgcgcgtctggagccgcaaggagcaggccggcgagcagcacacatttgccgaaatcgccgagcgcgccaagtacgaaacgctcgtctaccgcacggtgcgcggcgctctgggcccgaagatcaagtacgtggcctgcggcggcgcaccgctgtcgctcgatctagcgcatttctacaacggcatcggtctgccgatgattcagggttacggcatgaccgaaaccgccgccccgttcgccgccacgcgcgtgaccgacaatgtgatcggcaccgtaggccagcccgcgcccggctcctcgattcgcatttccgacgaaggcgaactgcaggtcaagggcccgaacgtgttccgcggctatcacaatctgccggagaagacggccgaggcgttcaccgccgacggctggctcaggaccggcgacttggccgagatcgatgacgccggccgcatcatcatcaccggtcgaatcaaggacattattattaccgccggcggcaagaacgtctcccccattccgctggaggaggagatcgccaagtgcccgatcgtggagcactgcgtggtggtgggcgaccagcgcccgttcatcggcgcgctggtgacacttgacccggagtcgctggccatttggctgcccgcgcacggcctgtccacggagacgccggtcgaccggctcgccacgaacgccgcggtgcgcgaggagatccagcagtacgtggacaaggcgaatgcgacggtctcgcgtgccgaatccgtgcgcaagttcgccgtgctgggcacgcagttcacgcaggagaacaagtgcctgacgccgtcgctgaaggtagtgcgcccggccgtcaaccgcgtgttcgccgatgtgatcgacaacgagatctacaacggcaagcggtgaaacgcgcggttcgtaatccgacacaaaaaagggccttttgaaccgcacctccgagcatcgaatctggattactccagtccaacaatcggggtgcggttcaacctcgccgggcacttcatcattcatcactggcatggttccattatcacgcacattatggcgcagagcgaatacggcaccccggcaacgcgagtgggtcgccgggataccggagtgcccggtcgccggggtgccgaaatgccgaagcggtgtatgggtgccgcccggcccaggtgggtcacgcccgggtcagtttcttgctcctgagacgcagcacgacatcggcggagtcggcgacacgcttggaatgcgtcaccacgattacgcatttgccgagctgatgggcggcatgctgcagcagatgaatcacctcgtcggtcatctccgggtcgaggctgcccgtcggctcgtccgcgaggatcgcgcggcccggggcgaccagcgcgcggccgaccgccacccgttgacgctggccgcccgacaggt

SEQ ID NO: 143 - DNA, 13212 bp, Unknown
  R206_24m  MAG No. k141_45476
agacctatcaaaagggtgtggagattaccgatcaggccactcaggagttcctgaacgaactggatgcgctggataagcccgtcaccgtagtgttctacggcgatcacttgccgggcatctactcgtccgccagcgaggatggcaacaactccttggccctgcacctgaccgattacttcatctggtcgaataaggcttccagctcccaaggcaataaggcaagcgatgcagcctactcttcgccgaacttcttcgtggcacaggccgccgatcacatgaacgccaaggtcagcccgtatctggcgttcctgaccgaaatgcattccaagattgccgctatggaaccgcctgtggtcaacaaggtccaaggctgggatcgtattcccgaaggccagaacatctatctcgaccaaaacggcaacccgatgtccaccgatgacttcgacaaggaaaccaagcagttgcttgccgactacaagctcatccaatacgacatcaccgccggcaaaaactacctcaaagacacagattttatgacgttgccgtaaagcagacagcccggccgaaccgtaaagcggatagctcagtgggctatccgtaggtgaggggagcggctgtgccgcgacggaaaatccggaggattttcggtctgtaggcaacgtgcgagccgacaggcgagccagcaaaacgcgggcgaagcccgtccaaaattgctgtaccgttgccatagtgctgtgagctccctctgatgagggagctgtcgaacgaagtgagactgagggagagatcccacagaccaatcactcccgccttacaataaagccatgaagcgcatcgatgtgaatcatggctggcggttccgttcaattggcaaggaccgcgatacggcagcgcggcagccagtcacgctcccgcacgatgcgatgattcacgagtcgcgcgaccctcgcgggccgcacctcgcgattcatcgaacgaggacatgacggcgtggccagctggtcatgggcgggctatgagggccgcgacgccatcgtgcatgtcaccgatgaccgccgcattgtggttgatgcaggcgggcatatcgccgtcggaccttctgccgaagctgtggatgtggaggtacaagtggactctgtggccgcacaacacgacctgcctgccaatgccgaactgctcggcgtggccagcgccaatcccatcaccgtcgatgaactcgccgacaatacctgcaccacctacttcggccgagcccaagctatttggcgaataccagccgaaacgtctggtattgcctgcagcacaaacgccctcatgccatcgtcatgacggtacgataggtacagtcgatgcccggaaaaccgacccgggcatcctgcgggaaggatgtgccatggtcaatgcggatttcgctcagttgcgtcacgcctacgaatccgggtgtacgcggccattggcttggcgacgggcgcaattggatgcgctatgccgtctggtagcggacaatcgtgatgctttcgtggctgcggccatggccgatttgggcaaacccgcggcggaaaccatactgatggagctgaatctggtggccggcgaggcgcagttcgtccgcaaccggctcggactgtgggccgcgcgccatcccaaggcgatgcattggatgctgcaacccgccgccggctggacgatcgccgagcccaagggcgtggtactcatcatctcgccatggaattacccggtgctgttggctctggagccaatggccgacgcgctcgccgcaggcaacgccatctgcctgaagccctccgagctttcgcccaacacctcgcgcctcatcgccgaactcgtgccgcaatatcttgaccccgagtccgtgtgcgtggtcggaggcgggcccaaggaaaccggcgaactgctgaaatgtccgttcaaccatatcttctacaccggcggcgggcacgtcggcaaaatcgtcatgcgtgcggcggccgagcacctgacaccggtcacgttggaactcggcggcaaatcaccgtgcttcgtggaccgtacggtggatatcaatgtggccgcacgacgtatcgcatggggcaagttcaccaatgccggacagacctgcgtggcacccgactatgtgctcgccacgccggatgtggccgaggctctggccgagcgcatcgccgtagccatcaccgaattctatggcgaagatccgaaggcctcgcctgattttggtcgtattatcaacgatcgtcattttgaacgattgtgcaagctattgccggtcggcaccgtgccgtctgaggagccgagctcgccgctggtacaggtggcatcggcggtaggcgcggccatggatatggtcgggcggcgcttcaatgtcgcggctgccggacgcggaagcgcgggggagacagccggtggtggcaccggtagcgcgaacaatgcggcgaagccggcggccggttcgaatacggcagccgctgatagtgatgcgactgcctcggccgctgttgagccgagcgagattcacaaggtgcccggcgtattcgatccggccgggcgaatcgtttgcggaggcaaggtcgatcgcgccgcccgatatatcgcgcctaccgtgctatacggcacgtcaccggatgcgccggtaatgaaggaggagatcttcggcccgattctgccgatcctggtggttgaggatgccgagtccgcaatccgattcatcaacaagcggtcccggccgttggctgcatatgtgttctcgcgcgatcacgaggttcggctgactttcgaacgtcagaccagctccggagctttgggatattcgttgccgttgggtcacctgctgtccagccgactgccgttcggtggcgtgggcgcgtccggcatcgacgcctaccacggtaaagcaggcttcctcaccttcagccacgtcaaaaccgtggttaccaagccgcagttccccgacactctgcgcctcgtgtacccgcccttcaatgaagccaaggccaaactgttcaacatcatcgccaaattcagctagcgtgatatcgctcgctgatattgggtgatggcgttgtcatagtgacgttcgctgtcccggcagccacgtcaatcgattgattcgtataccgggccagatttttctgtcctggtatttgatttcgagtcattttctgcttaccgggacaaaactgacgccgaaagtatcgtccacgtattacgaaaatggcggaatagtgcggttttgcatggaagggaattccaaatattcctatattcgaggtgttcaactgtcctggtttgcgaaaaagagccgaaatcagctaccgggacagaaaaatctggcccggtagccacgtcaatcgattgacatggctaccgggccaaaaatatgcggcagatgcgccgcttctgttacttcagggctttgaagccgatgtcgtggcggtagaacagtccgcgcagctcgagcttgtcgatgatcgcgtagaccttgtcctgagcggacttgatgtccggggcggaggtttcgatgagcaggacacggccggagttggcaatcagaccacccttgtcgtcggaggcgacgccggcatagtagacatgcgaatcctcgtcgacctcgatctcgggcacacgggcacccttgatgacgttctccgggtagccgttggaggcgatgaccacgccgagggtggcgttggactcatcccagatgaattcgggggtttcgccgtcgagaatggcggagatgccggcaccgaggtcggaggtgagcttcgggagcacgacttcggtttccgggtcgccgaaacgagcgttgaattcgatgaccttcggtccgtcggcggtggcgatcaggccggcgtacaggataccggtgaacggcgtgccttcctcggccatgccttcgacggtggggcgcacgattttctcgatggcctcgtcgaccacggactgcggaatctgcggcaccgggctgtaggcacccatgccaccggtgttcgggccttcgtcgccatcgtgggcgcgcttgtgatcctgggagatcggcatcggccagaaatcagtgccgttgacgaagctcatcagggagaattcctggccgtcaaggaagtcctcgataacgaccttggcaccggcggagccgaagcgatgatcgatgaagatgtcttcaagcgcacgctgggcggtgtgctcgtccatggccacggtcacgcccttgccggcggccagaccatcggccttgatgacgatcggcgcgccatgctcgtgcacgtaagcctgagccatgtccaggtcgccgaacgtctgatatttggcggtcggaatgttgtgacggtccatgagctgcttggcgaaatccttggaaccctcgatctgggcggcggccttggacgggccgaacgccttgatgccggcggcggcgaaatcgtccacgatgccttcgatcagcgggacttccgggcccacgaacacccagtcatagccattgttcttcacgaattcgataagtgcggcgtggttcgactggctcagctgcgtggtgtggatgccgtccttgagcatgcccgggttgccgggagccacggtgacttcgtcaatgctcggtgccttgagcagcgtgtaggcaatggtatgctcacgcgcaccggagccgatgaccaatactttctgacccatgtttttccttcctaaagtctttggctcccctctttgaggggagccggtatctggagctacttcagtacgatttgcgtgtcggtggtgtcggtggtgatctggccgagcacgtaggcgggttcgttgttgtcggcgagcagctttagcgcctcgtccttgcgggcggggtcgatggccagcaccatgccgatgcccatgttgaagatgttgtacatctccttgtgatcgatgttgccggccttctcaagcacgtcgaagatcgggagcacaggccaggtgccaagctcgatctcggcggccagaccgtccggaatcatgcgcgggatgttctcgatgaagccaccaccggtgatgtgggccacgcccttgaccacgcccgccttgaacagcggggagagggccttgacgtagatcttggtgggggtgagcagcacgtcgccgagctttgcgccgcccagctcggcgagctcagtgtccacggtatagccagcctgctcgaacagggccttgcgcaccagggagaagccgttggagtgcacgccggtggaaggcagaccgataagcacgtcgccctcagtgatggtggaaccgtccacaatggcggacttttcggcaacgccgaccgagaaaccggccagatcgtactcgtcctcgtcgtacatgcccggcatttcagcggtctcaccgccgaccagtgcggaaccggcctgcacgcagccgtcggccacaccggccacgacctgctcaagccgggccgggtcgtacttgccgcaagcgatgtagtcaaggaagaacagcggctcggcaccctgggcggcgatgtcgttgacgcacatggccacgcagtcgatgccgatggtgtcgtgcttgttggccagcttggcgaccatgagcttggtgcctacgccgtcggtgccggagatgaggaccggctccttgtagcccagggaggctaggtcgaacaggccgccgaagccaccgatgccgccgaccacgccgggacggttcgtgcgggccacgtgcgacttgatgcgcttgacgacttcgtacccggcttcgacgctcacgccggcgttctcatatgcttttggcatttggtggggcctttctgttctattttcaagctcccttgccggggagccacctgcaaaaagcggattttcgtttgtactaagctccccttgtcaggggagctgtcagcgaagctgactgaggggtagtcgtaaagaccaatgactgaggtgtagtcgaaggaccggccgaacctactgcacgtccggctgcacggtgttgtactcgttgccgatgtacttgctcttgtacagcgcgaattcaggcagacgcacacggtcctcgggcgtgagggacttcaggaagtcggcctcgtagtcgtcgagcgcagtggggtagtcgccgttgaagtaggcgacgcacaggccaccgtatggggcgtcggcgttcagtccgatggattcgaccagaccgtcgagcgaaaggtaggccaaggaatccgcgccgatgtattcgcggatttcctccacgctcatcttggctgcgatgagttccttggtggtggagatatcaatgccatagaagcaagggtacttcagcggcggggagctgatgcgcatatgcacttcagcggcgccggcttccttgagcagctgcacgatgcgcttggacgtggtgccgcgcacgatggaatcatcgataacgataacgcgcttgcctttaaccacgctgcgcacagcagagagcttcatacgcacaccctgctcgcgcagttcctgcgtgggctgaatgaaggtgcgggccacatactggtttttgattaggcccatttcgttgggcaggcctgctgcttccgcatagccggatgcggcggacaatgaggagttcggcacgccgataaccatatcggcctccaccggggattcggcggcgagacgtgcgcccatgcgcttgcgggcggagtgcacgttgacgccatagatatcggaatccgggcgtgcgaagtagatgtattccatcgagcagatggccagctgcgtgttgttggtgtactgcacgatcttgtagccgtgatcgttgaccaccacgatttcgcccgggcgaatgttgcgcaccagctcggcgccgacgacatccagtgcgcaggtttcggaggcgagcacgtaggcgccgttcttcatcttgccgagggagagcgggcggaagccgttcgggtcgagtgcgccgatcatggcgtcttcggtcatcagcaggtaggcgaaaccgccatgcaccgtgttgagcgcttccttgagcttgtccataaaggtgcgctgcatcgaacggcgaatcaagtgcatcagcacttcggtgtcggagttcgaatggaagatggcgccttcgtcttcaagcttgcggcgcagtgacgggcagttcgtcaggttgccgttatggcacagagccacgtcgccgtcatggaagcggaagatgaacggctggatgttgtccgtggtgcccgagccggccgttgcgtaacgcacgtggccgatggcgcaattgcccttcagtcgttcgatttcgcgctcatcgccgaacacctgggtgagcaggccgagtccgcgatgaccgatgagatgaccgttatcgttggagacgatgccggcaccttcctgaccgcgatgctgcagcgcgtgcaggccaaaataggtgagtcgtgaggcgtcggggtggccccatacgccgaagatgccacattcctcatgaatgtcttcgagttcagccgacaagccaaagctcctttttcaaacaggggattaactatctgccaaccctaccaatcggcggctacatcgcgtgttgtggggtggtgggggcatggggctgcccatggtcttgcccctggccgcatgagcagagccgtcaggtcggaccctgttcgccgatggcgccggaatatggactgttgcttaaatcctgttgtcttatagtccgatgttttgtattctcaactgaaatgaaggatagttttttacccggctgggggcactgttgattactgaggaagtcggcaagagaatcagagaattacggaataagacgggcctgagccaggaaaagttcgctgcaaaaatcggtatggatcgcacatatttcgccagtatcgaactaggcaagcgtaatgtagccttgaaaaacattgaaaagatagcgaatgggttggatgtgcccctttccgatctgttcaaagggatctaagactagtgcgtcgagtaaaaaggtgatgggggataagcgagaatgggattcaagggtaaattgtataaaacaacgttgattaacaatcgcagatacctgggcaacaaatacaagctcctgccttttatcaccaaggtggtcgatgaggagtgcacggggatcgatgtcgtcgccgatatctttgccggcactggcgcggtttcttccgctttccccgggaagacggtaatcacgaacgacataatgtacagcaattacgtgtgcaattacgcctggttcggtgcggagacttatgatccgcaaaagatcgtgaattatgtagtcgaatataatgccatctcgcaatatgacgacaactacatgaccgataatttcgcggatacctacttcagctataacgattgttccaaaatcggtttcatcaggcaggatatcgaggacaactatcaagctggcgacctcaacgacagggaacatgcgatacttatcgcctccctgctctatgcgatggacaaaatcgcaaagacctgcgggcattacgatgcctatcgtaaaggagccaagttcgataaaccgcttgagcttcgtgttccgcttgccgaggtgcataacaatgccgggaaccaatgtttcaatgaggatgccaatgaactggtcaaggacattcatgcggatctgatatatatagacccgccgtataactcccgccaatattccgatgcctatcatctgctcgaaaacgtcgcccactgggagaagcccgaagtattcggagtcgccaggaagatggagcgaaaggccatcaaaagcaagtattgcactcgcagtgcgacggagacgttcgaggatctgatcggcaacatcaacgcgaggtatatcctgttgtcctacaacaatatggccactaaaggagacggccgttcgaacgccaagatagctgatgaggatatcgtaagaatattgcggaataaaggcgagttgaagattttctcggaagactacaagccattttccgcgggcaagtcaagtattaccggcaatgccgaaagactgttcctatgcacctgcaatgagggataagaaaaccatgattcaatcccctctgaattacactggtggcaagtttaaactactcccacagatattgcctctcttccccgggaagattgatcagttcgttgatttgttttgtggtggctgcaatgttggcctcaatgtcacagcaaataaggtgatctataacgatttagatgagaatgtaattaatctgtacaagaccttattgcgtttagggcatgacatgacgttcgagtacattcatcagataatcgatgattatgagctgtctcttgcaagccagaaggggtatgcatattacggctgcgatagcagcaaaggactaagtaggtataataaaccccattttttgcaacttcgtagcgatttcaatgcaaggcagaagaaagatagctacaactacataatgctctatgtactcatagtctatgccttcaataatcaaatacgattcaacagcaaaggtgaatacaatcttcctgccgggaaaagggatttcaatgagagcatgtcccacaagttatctgcctttatagagaaaatccaatcccagaattgccttttcacttgcagtgatttcaaggattttgatattgctcaacttacgagtggagatttcgtttatgccgatcctccatatcttattacttgtgcaacctataatgagcaaggcggatggaacgaagacgacgaatgtgccttactgtcttttctagaccgtctggatgaaagtgatatacgattcgccctctccaatgttctacgaagtaaaggcagagaaaatcaagtcctcattcaatggttgaaggaacgaaaagacaaatatcaagttattccattgaataaaagctattcaaactcaaattaccaagttaaagacagagtttccaatagtgaagaagtactgatagtaaactattaatgaaaagtggcaattccagctgcggagagttttgcgactgcatatcgctgattgtaagggaggatcctcatgaaagtatccaaggggcatattttcaacctttttgacaccaatggtcgtagaaatgatgtgattgctgccatgcgggggtatctcagtatcctaaacaccattcgtgccaatcaggatttgccgtggagagcaatgccaaacagtccggcacaggtcttgttctatcgtcatgcgattggcatgtttccggatgttttcaaggaccaccccaaatatgatgagctcatatccacgatacacgaatatcctgcattggaagcagcaattgatagagccgatatggaatggctcgaatctcacggtgacgagtatgcgaatgtggatatcaactttgacgaaggcgtggaggatcgcgcacgtcactataccagtaatcttgtcaaactagggtttgcggatgggcggcggaacatctcgccggttggcaatattttgctcgatcgtattcctctacatgaagacggtttggaacgattgctatcgttgaataaggagaatatcctctatctgcggcagttgctcaagttgcgaatttttgataaggccggggaacgatactatgccccattcgttatgggcgtctacgcgttgctgcgcaagtctcgcctatcagaagatgattttttcggcatggtgcaaggaagcagtccgtacagcaacattgacgacgtcgatcggtatattgataatttttcggtagaggggcagctccacaaccatgctgtctccactcccgatgaaatcaatattgatcagcagttaacgtatgacgtgtttaaacaatattttctgaaccggaaatcagcaagaacggtaaatatctattatgggttttatcagtgtatattcgaatttaccgttgaccggactcctgaaaaattagaccttctacttacgtattatgagtcaaatcgttctgtgctgaacaaggcattcggattcgggcgaaatgtatttgatactcgaaccggtgatcgtccagatgtccaggatttccttgatgagaacgaggacatgttttcctccgatatcaacgactatttataccgacaatttgcgatttcaaaattctgggatacgttgcgcgaatattcagataccacgaagcgtattttcaaagcctcgggtctcatcagctttgaaaacggatacgtcgaactggcttatcacgaactgtgcgcatgtattttcaacgcagccgatttgaagcccaaaatcttcggtagcatggatgacgaggttgttccgtactacgaaagttatgatgaatacgaagaggaagtgagtagttacttttgtagtaatttcagtctttgcgacattcttggtctgcaggagtcgcttgacgagattaaagagcacatcagtgaagcatttggcggagctgcgcctgaggacatccctgatattacccgtcgtagacggtgggaggaattcgaagttttcgttgcgaaccaatatcctgtcgaaagagtgaaagagctgcttgccctatttggcgacagaaataatgacaagcgcatcaagcaggaggtctgtgaagatgcaactgtcccgaccatttacgagttcatcgttgggctggcttggtattacttctcaggcaaacgtttcaatctcctttccagctataatctcacgttatcggctgacttcgagccgctcaaccatgcgggaggcggacagggcgatatcgtgattgaaagtaagcatgatgtcaccatgcttgaagctacgctaatgaatgtaaacagccaaaagcgaggcgagtgggaaccggtattacggcattccgtgaacctgaaggtggatgaggaggctcgtaagacggaccggcgggtcacgacattcttcatcgccgatgtatttgatgccaataccattaacatctggaaggccgttgcctcggtgccgctgcaatcgaccactgctggcgcggcatatacagacaacgtggtgatcatgcccattagcagtctggaactctgtggcttgatggatagaagttcgcaatatgacacggtaatgcagcgtgtccacgatctgttcgaggtcgacaaaagcaatttcgaccttcaatggagggacaagttcattgatgaaatagtgtgaacccgctattgcgcctttcgcgcatgaaacgagagggcatcggtctcgccggctatcgctatggccggtgagaccgactttgagcgagtcatccgggtttagcgctgccgagccttgtgtcggagatctgagacgggatgtctgagcttcgctgaagtttatatcgaacaaatgttcgactgttctggtatgctggtcgggctggtttcgatagggaggtgatggcgatggctggcgagagggcatcggcgcaacgtgaacatacctatatcgccattgacctcaagtccttctatgcctcggtggagtgcgcggcgcgtgggcttgacccgctgaccacgcatctggtggtggccgatgaaacccgcaccgataagacaatctgtctggcggtctcaccttcgctgaagagctatggcattcctggccgtgcgcggctcttcgaggtgaagcagcgcctgaatggagtcaatgccgagcgcgcggtccatgctcccggcggccgattaatcggggagtcctgcgatgcgcgcgacctggaacactcgccgagactcaaagcctcgatggtcatcgccaagccgcgcatggcgcactatctggaaatcagcgggcggatctacggcatctatctcaggtatgccgctcccgaacacattcatgtgtattcgattgatgaggtgttcatcgacgccacgccgtatctgcgctcgctgggtatgggggcgcatgcgatggcgcgaaccatcgtgcgcgaaatccttgccgaaaccggcatcaccgccactgccggcatcggctccaacatgtatctggccaaagtcgccatggatatcgtcgccaagcacatgcccgccgacaaggacggcgtgcgcgtggccgaactgaatgaaatgtcatatcgtcggctgctttgggatcatcgtccgctcaccgatttttggcgggttgggcgcggctatgccaagaagctcgagcatgccggactgatgaccatgggcgatatcgcccgatgctcggtgggtcgtgcttcggattactacaacgaagacctgctgtatcgcatgttcggcgtgaatgccgaactgctcatcgac

SEQ ID NO: 144 - DNA, 7790 bp, Unknown
  R206_24m  MAG No. k141_45961
gatgatttgaggctctaggccccctcgtcagagggagcttatgaagctatttcagatggaacggagacggtaggtgccgttgcggttggaggcgatgatcatctggtcgttctccagcacgttccagccttcctgctcatagccggaagaggagaccaccacaccggcggagtcgccgttgtcgtcgcgcagctcacggtagcgcatcacacggtagtcggcggcctgcgcgccacggccgtactcatcgtagatttccacgatgcgcgggctggtcttctcacgaccggcggcgcacagggcgatgagctggtcctcggactgaatcatgcagttgtagctggacttcgggtaggcttggcgcagttcgcgcacggcctgggccacggcctcgtcgagcgggaagccgaaaccgatgtattccagaatcaccgcgaagaagatagcggagtcggaacggccgccggtggagaggagcacgctgtggttcaccgggtatgagcggttggtgacgatgttgcggccattggcgtccgagatatcgccgttgtggatgaagctcaggccgttcgcatagaacgggtgctggttctccatgatgagcggcagattggagcttgccaagcgcaggtgccagatggcaccgcgagacggttcgtcggccagcgtctcaaacgtgctgtcatgacgggccgcgatggtcgacttgtagattcgggtgccggtttccggggtgggtgcgccaccgtcgcgcacgtgcggcgcttcggtgggatcggaaagctgggctacaccccagccatcattgtggatttcagacagttcacggaaatcctcgacattgtcttgccccaacacggcgttgagactcaggttgaagcctgccgtcgcgtatcccagtaatctgcacatggtatttcaacttaccgaaaccgtgtggcgacgtgcggcgactgttataggcattctttatagagcgcatcagcgccgctgcaaactggtatgttatcgcttctgtttggcggagcgctgaggcttggcggcgggtttgccgttcttggccttgcccttatcgccctgctcagcgaccgcagcggcggcagcggtctcagcgatcttccgctcctcggccgatacggcggcatcgagctcctgtaccaatcgcccgagcccggacgtggtgtccatcgggtcggggacggcggccgggtcggccactgcacgagtcggcgtgggcgtcgtgatggtcttggccgtatcggtgcgcttcagacgcggtgggcggcgggtggagacgaacagcggctgcacctcgaccagcgggttgtaaggtgccagaccgaaccacttaaccggcgagccggccatgcggcggattgcgtacttggcttgcaacgacagggcaccgcgtgcggaaaccttggattccggcatcagggccttgtgaatcagcacgtaacggatggtgccgatgtccggatcggcgtcgaccttggggtaaatcgacttctgcttaggcagttcgccggttttggacaggtcgtgcatgatctggtggatgtacgccgggatggactgcgaaaccttgaagcccaaacggaagcgcacgcggtagatgtagttcgtgccgaagtcctccaccgagtattcacgggtgaacggctcgtcggtggtttccacgctgactgcccaccaagcacgggcacgcttggggtggtcggcgaagatggagaagaagatgtccgtgtcgagtcgcttggtttccgagtcggaggtcaggtacacgatgttgtccgcaaaatacgggatgcggaaatcaccgtgcagcttgtcgagcgcgggtaggaagtcgttgggccgcatgtgacggcgttgcgcacgttcgagcttggtgccctcattccacgtgtacatgacgaacagaatcgcggcggtcagcaacatggtgaaccaaccaccgtgcaggaatttggccatagacgcgatgaagaacatagcctgaatcgccaagaacagcacggtgaacacgatggcaccgacccgcttgccggaatgccataagtagacgccgagcaacacggtggtggtgatcatcgtaatggtcaacgccaggccgtacgcggcggagatgtgttcggaatccttgaagatggcgagcacggcgagcgtggccacgcacaacacgccgttgaccaccggaatgtacagctggccgcgcgtacgggccgggtaacgcacctgcagatggggcatccagttgaggcgggtggcctcggaaaccatggtgaacgcgcccgtgatcagggcctgggaggcgatcacgccggccgaaacagacagaatcacggccaggtaccgcacgttcggggtcatcatctggaagaacgggttgagcgacttcatcgcggtgtattgcgggttatcgctattggccaacatccacgcgccttggccgaagtagttgagcaccagcgcaaccttgatgaatggccaggtgaagtagatgttgccgcgccccacgtggcccatgtcggagtacagcgcctcggcaccggtggtcgagaggaacacggtgcccatcagggcgatgccggcagcattgtccgggctgaacaggaatttgatgccgtacaccgggttcagggccgcgaacacagaccagtcgttagagagattcgtgacgcctacgatggcgaggaagctgaaccagaccagcaccatcgagccgaatactttgccgatgctttcggtgccgcgcgactgcacggagaagagaatcacgatgatcacgacggtaatcatcagggtcaggcttgggttttcgtcgaacaacccttccaatggcggcagggtctgcaagccttcgactgcggaactgatggaaaccgccggggtaagtaccgaatccgcaaggaatgccgcgccgccgagcatggcgggactcgcgagccatgcgccgtacttgcgaatcaacgagtacagtgcgaagatgccgccttcgccattgttgtcgatgcgcatggcgatgagcacatatttgacggtggtgatcagcgtaatcgaccagaagaccagcgacagcatgccgagcacggcctctcggtttacgctgccaagccctccctgaccggcaaggaaggtctgcgcggtgtagaggggcgaggtgccgatgtcgccgtacaccacgccgagcgccacgatcgccatgccccaggtaaccttgtctgggctggattgcaagcgggcccaccatcggccgaggccgcctttcgaccatgcgctggcgattttctcggcttccttggtttcggcttccctctgcttggcgagtgcctcgcgctcctccttggtgagagtgcggcgggacaccttgggagcgttggtaaaggtgtcggccctcagcagtgcttcttcttcctgtcgggccttggctttggcggcgccagcctgggctgtctgggcctttgaggctttttgggcgcgtgcggtcctttggttcgactcagccatacgttcagtcctccattgaggtggagatcatccccctcgcttatgtcaggtacatcatggtagacctcgttcacaattctgacaaattttacaagtcaacacatcgccgcgacggccgcacacccggccctcacagtccgtatacggcgcgggcggtatcgcgggtgccgcgcgccacatccgcgatggacaggtcgagcgtatcggccatggcccgcaaggtgtaggggatcatgtacggcgcgttggtgcggccacggtacggcatgggcgtcagatacggcgcgtcggtttcgaccatcgcatggcccagacccacaatccgcagcgattcgcggataccgtcattgcccttgtagctcacggtgccggagaagctcagataccagccatgttcgcgcgcaatctcggccatctcacggtcgccggaatacgagtggaatacggtgcgttcgggcgcgccgtcggccagcagagtctcgatgacttcgcgatgagagtcgcggtcgtgaatctgcatgggcaggcccagttccttggccagggcaatatgcgcgcggaaagcctcgcgctgcagttccttggcaccttcgccggtgcggaagaggtccatgccggtctcgccgatagccaccacttgctcggggtatgtggtggcgaggcgatgtacttcggcgagcgcgtcctcgaaagacgtgtcatggtaaggcctgtatttgagaggcagaccatccggccccggcacaccgcgatgcccgtggagcacggactcattggggtgtattgcgagcgccgcgtgcacgttacctggatgatcgagggccatctggacggcggtcatcaggtgcggcagctcgcaaccgcagtcgatgatacccccaatgccgacagattgcgcctgcgccagcaattggtcgacgtcgtacaccgggacttcgggctgccccttctcctgcgcctcatggctcatagcgcgcgcgaaagggattacggaggccacgtgagtgtggttgtcgatggtctgggcgtcgtccggcaatgcttcaggtgccggggcccagctacggtcgcgatggtggtgcttgctcatggtttctcagtgtaggctgtttctcagtgtaggctaccgtcagcaacgctcgtaaggcagtccggtaaggcgttcgactacacgacgggtatcgccaatctcggccgcctgaacttgccgtctcttgccacgagcgcaacattcccgggaaagtagcgcaaccggcaagcgagatggccgccatcctgccgccttttctgcctcatcagcccattttctgcctcattttgataaaatatgatgcagaaaagttcgtatgatgcagaaaatgaggcggtatgagatcattcgactacatcgaatactgatcgaacgcgcgtgttccgcctacacgcaagcaatccgagatggacataccgatccattgcttgccatcgccatgttcatcctcgatttcacctgcatacatccgttcaatgacggcaacggccgcatgagtcggctactcacgctcctgatgttgtaccgcaatggctatatggtcggcaaatacatcagtatcgaacaccttatcgagcaaagtaaaagcacttattatgaggcactggccgcaagcacccaaggatgggacgacaacgccaatgattatgcgccattcacgaactacctgcttggcatcatactgtccgcgtgcaaggaattcgacgaacgcatcaatctcacggcaggcggcagagcgcagggagcaccgcgagtagccaccaagggaatgcggattgaagcactgcttgatcgatccctagttccactctccaaggccgatattctcgctcgcatgcccgataccagcaccaccaccattgagcgcacgctgaaatcactgttggactccggtacgatcatcaaaatcggtgccggtcgcagcacccgctatgtgaaacgccgctaaacgcatccttgtgcgcaacatctcgtcactcttccggcgctccgctggccacgcgaatcatcgcgtactgggactcgtagaggcggtagtacgcgcccttggcggcgagcagctgcgcgtgcgagccgtgctcgacgatctggccgtgatcgatgtagaagatctcgtccgcgttctcgatcgtcgacaggcggtgcgcgatgatgaagctcgtgcgccccttgagcagatgctgcaggccggcctgcatcgcctcctcggtgcgcgtgtcgatgttgctcgtcgcctcgtccaggatcaggatacgcgggtcggcgagcagcacgcgcgcgaaggcgatgagctggcgctggccggccgacagggtcgatccgcgctcctccaccaccgtgtcgtacccgtcgggcagttccatgatgaactcgtgcgcgtgcacggccttcgccgccgcctcgatttcctcgtcggtggcgtcgagcttgccgtagcggatgttctcgcgcacgttgccggagaagatgaaggtgtcctgtagcatcacgcccatctgccggcgcagcgatgcgagcgtcacgtcgcgcacgtcgtggccgtcgatcgtcaccgagccctcggacacgtcgtagaagcgcgacagcaggttgatgatcgtcgtcttgccggcgcccgtcgggccgaccagcgcgatcgtgcgccccggttcgacgtggaagtccacgaggttgaggatgttacggccgtccttctcgtagcggaacaccacgtcgttgaagtcgacgcgcccgcgaatctgcggcaggtccgccgcgtcgggcttgttgcggatctccggcgtgacgtcgagcgtctcgaagatgcgctcgaggtacgccgagcaggtgatgagctggttgtagaagttgccgatgttgatcaccggattccagaagttgttcgcgtagccgacaaacgcgatgagcacgccggtggtcacgttcacgcccccgaagcccatcacgccgacgaagtagatgaacgagatggtcatcacggagatggtctgcacgcccggccacatgaggaactggatgtgcacggcgtgcatccacgcggaacgcacctcgccctgctgctcctggaaggtcctgaactgggcctgctcctgcgcgaaggtctgcgtggtcttcacgccggcgatcgactcgtggatgtaggcgttcaggttgctctgcttgttggagagcttctggaaggcgcgccgctggaagatctgcagcacgcgcacccagatgatgagcaccgggaacaggatcaagctccacagggccagctgccagtcgatcacgaacatcacgatcagagtgatcacgaaggtgaacacgtcggagatcacgttgatcagaccggagctcagcgtgtccgaaagcgtgttcacatagttgaccacgcggatcaggatcttgccgtgcgggcgcgaatcgaagtagctgaagggcagcgtctggatatgcgtgaagatatcgcggcgcatgtccttgagcatgagctggccgacgcgcgtgatcgccaccgtgcggtagcgcagcccgaactcgtacagcacgatcagcgcggcgaggattacggcgaggatgccgagcttgccgaggtccttgttcgggatcgcctcgtcgatcatgatcttggtcaggtacggcacggcgacgacgatgcagctcatcgagatgacgacgacgagaatgcgcgccacctgtgccatatacggtttgagatatttgccgacgcgagcgatgtcgtggaggttgatggactcctccagctcctcatcctcgcggaatgtattgcgttgtgccataagtcctcttctaaaacccctgtgcggcgccggactggagtccgagctgcttgtggtagatgtcccagtagcggccgtgtgcggccacgagttcggcgtgggtgccgcgttcgacgatacgtccgtgctcgagcaccagaatcaggtcggaatccttgaccgacgagatgcggtgggcgatggcgacgatggtcttgccgccgtccatctccttgaggtgcttctggatctccgcctcggtctccatatcgacggccgaggtcgtatcgtccataatcaggatcgacggattgtccgcgagcgcgcgggccagcgacaggcgctgcttctgcccgccggacaggcccacgccgcgttcgcccacgacggtgtcataaccctgcggcatcgacctgatgaaattgtccgcgccggcgatctgggccattttctggatatatcggtcgtcgctatcatcgctggcacca

SEQ ID NO: 145 - DNA, 4088 bp, Unknown
  R206_24m  MAG No. k141_47048
catgatggacggcatcgtcatgtgtgcgcacacttcgcatcccggcgattattggacgtcgattcatcgcccgatcgtcgcgttcgaccgtgtgcttggagacggtatttcgtcgatcggatccgaccacgagcagggtgggcgattgattgcgcagatgctgatccgcaatggtgccaaacatgtggtgatgattggcggtccgcgagatcaattcttcgatttggctgcgcgcggagaagtcgaggaaggatcgttcgatttgggaaagaccacgttcccgacggtgcgctactacctcacgttggaacaggaattgacctccgcaggcgtgaaatacgagtatgttgaagctggcgaagtgatggattttgccggctgtcatcgtgcggtcagcaatgcgctcgacaaggtggcgaccgacggcgtcgatgccgtggtcagttccgatattggcgcgtcgttctgcgtgcgcgaagcgttgagccgcggaatttccattcctgacgagctgcagatcgttgcctacgatggcacgtatttgactgatttggccggcatgaagctgaccgcggtcgcgcaggatttctcggcgatcgcacagtcggcagccgaccatattgtgcaggctattgccaatgaggaagtggctgcggctaacgcttcacgcaggaacattcccaagccgttcgagccgaacgtgcttattcccatgacgctggtgccaggcgataccacgcgttgatgctgcgcgttggaacgctgagtggggatcggacaggctgggctgcatagaacaccgcatcgaaccggttcgacacgcgcgttccgctgtgtgactggacattgactcccctctcgaggtaatatcgaaccggttcgatgcatacgtgagtatgcaaatacgtaaacaacaaacaggcagacgcgtacacattgcacctgcatccatgaaccaagggaggtcccatgaaaaacaaagtgcagctcatcgcttacgccgatcgtctcggcgatggcactcttagctcgatgaccgacatcctgcgcacccgcttcgacggcgtgtatgacggcgtgcatatcctgccgttcttcactccgttcgatggtgcggatgcaggctttgacccgatcgaccacaccaaagtcgacccgcgtctcggcagctgggacgacgtcgctgaactttccaagacccacggcatcatggtcgatgccatcgtcaaccacatgagctgggaatccaagcagttccaagacgtgcttgaaaaaggtgaggaatccgagtattacccgatgtttctgaccatgagctccgtcttcccgaacggcgccaccgaagaggaactggccggcatctaccgcccgcgcccgggcctgccgttcacccactacaagttcgccggcaagacccgcctggtctgggtcagcttcactccgcagcaggttgatattgacaccgattccgacaagggctgggaatacctcatgtccatcttcgatcagatggccgcatcccacgtcagctacatccgtctcgacgccgtgggctacggcgccaaggaggccggcaccagctgcttcatgacccccaagacctttaagctcatctcacgcctacgcgaggaaggcgtcaagcgaggcctcgaaattctcattgaggtgcatagctactacaagaagcaggttgaaatcgcctccaaggtggaccgcgtctacgacttcgccctgcctccgctgctcctgcactcgctgttcaccggtcacgtggaacccgtggtccactggaccgaaatccgcccgaacaacgccgtcaccgtgctcgatacgcacgacggcatcggcgtgatcgacatcggctccgatcagctcgaccgcagcctcaagggcctcgtgcccgacgaggacgtcgataatctggtcaacaccatccacgccaacacccacggcgaatcccaggccgccaccggtgccgccgccagcaacctcgacctctatcaggtcaacagcacgtactactccgcgctcggctgcaacgaccagcactatctggccgcccgcgcagtccagttcttcctgcccggagtgccgcaggtctactacgtgggcgcgctcgccggccgcaacgacatggaactgctgcgcaagaccaacaacggccgtgacatcaatcgccattactactccaccgccgaaatcgacgaaaacctcgagcgcccggtggtgaaggccctgaacgccctggccaagttccgcaacgaactgcctgcattcaatggcgagttcagctacgaagccgacggcgacacatccatcaccttccgctggatcgctgccgacggcaagaccaaggccgccctcatcttcgagcccggccgcggactcggcacggataacaccactccggtcgccagcctcgcctggaccgatgccgccggtgaccacgagactgatgatctgctgagcaacccgccgattgccgatatcgactaaccgttggcctataaacgccactccgctgtgcgcgctccaagtagtgcgtccggcgtaagctgggtccatggaaaacaaaccgcccgcagtgcactgaagctagtgcgctcgggcggttttgcatgtgccggggttgcgggtcatgctcagtcggagctggccggtacctcccgccggtgatgagagcaaagaaagagcagcaacatgttggaaccgtacgtgcgaccgggtattgacgaccgcccggatctcgacaaggcattgagtcccgaagacaaggatgccgtggcccgactggccatcaaagatcgtcggcgtcctcccgaggcatccgccgatcagcccgaggcccaggccgtgcgtctggcggccgccggttcgtcggctgctgccgctgccgcggccagcgtggatgcccctgcgcctgatctgtcgtctgcatatctcgatatgcgcgatccgatggtcgccgccaatggtcagcgacccaccacgggccaggtatcccgtctcaactgggggttcttcgccgcttccattctggtcggcgcaccttggatagcattgaataccatcgccatgcccaacgcggtggctcgtctgttcggctacgacaccgcttctgccatatcggtcaccatcaatccgtccaccagccgtccgctgcccgtcgccactgacttggtggtgcctctggccgtgctggtggtcgttggcgtggtggcctccatgttcgcgatgcccttggtctccgcgctgtccgaccgcacacgtattcctctgggccgccgtaccccgtggatggtggcgggtggcgtgctgtgcgcgctgatcacgctggttctggggcggaacacaggcctcgtagtgctgtgtttcttctgggcgctcatgcagtttgcctatgcgatgatttccgtgccgttggccagcgccatcagcgaacgggttccggacaaattccgtccgcgcattgagcgctggcacggtatcggcgtgatgcttggccaagcgcttggtgtatgcatgggtgcgctcggcgtgatgttcgactccttcacgccgtttgcctacaccgccgtgctgtttgcggtttccggcatcctgaccgtgatcatgctgcccaaggagccttccagccaggagcagccacatcaacgattcgagtcgagccaggtgtttgaccagctgcgtccgccggcacatgcgcctgcattcgcccgtgtgttcgccgctcgcgtgtgcatgatgacgggcgttggactgaccggggtctttctgtggtatctcgtgcgcttttgggtgtatggcaaggctgtggtgttcacttccgcgccattgaccattcccgcgggcctcctcatcgccggcatggccgtggcaacgctcatcggtgctgcgctcgcgtcctgggccgctgggccgatctccgagaagatcgaggaacggaacatcgccaccactgcagtggtggcggcatcctgcctgctgtatgccatcggcgtggcggtggcatgggggctcggcgtctggtccaccggcacggcacgcgaaaacggcatgctgctcttcgcgctgatctccggattcgc

SEQ ID NO: 146 - DNA, 13625 bp, Unknown
  R206_24m  MAG No. k141_47392
catcctcgctggcggacgagtagatgcccggcaagtgatcgccgtagaacactacggtgacgggcttatccagcgcatccagttcgttcaggaactcctgagtggcctgatcggtaatctccacacccttttgataggtctcaatcgactgctgttcatcatcacccagcggcgtacccgtggtggattcagcggtgtagtcgttgttctcataccactcgtggtagggcatgtggttctgcatggtgatgatctgaatgaacttgttcgtcttgccggacctgatgccttccagcgcagaatcataggaagacttatcagagacgtacggcgactcgtcaatcttgtcctgatacttgatcacgtccggaccggtcagcgtgtagaagtgcgagaacccgaacttcttgtagttcgtagcgcgcgagtacatgctggactcgtacggatggtagccgagcgagttggcgggcgcaccccacatctggttgatggtgggggtccaatgctggctcgggaccagctgctggtacgggctggacagggaggaatcgaaattggccatgctcagaccggaaagtcccatgtattcgaggttggccgtaccgccgccgtagccggaggagagcatcaggccggaggtggtgcccgccttgatcttgcggatgttgggcatcgaatccttattggtcttcagtcccggcacgcggctcgggtcggagaaggattcggacagcacgtacaccactgtcgaatcagtgaggttgttggtgcgggaggcgttgattgtctccgcttccttctggtagcgagcggcgaccttcttcatggtctcctcggagtagttgctcggcttgtccatgatcttcgggttgagctgacgggtaaaggccacgagcggaccgttgcgctgcgcgtcatacacggaatcccacatggatggcgtgtcccccaaggcgcgggagaacttgttggccagcgaatcggtggtgctcacatgaatgcagtacaacgcgaacaccagaatcggcagcagcagcagaatcagacgggaggtgaggttcaggctcaggttgtccgtacggatcatgcgacctttgcgcccgtcgaagtggcgcagcaccagaatcagggcgagcagcgcggcgaacgcgccaagtgccacgagaatggtcacgtgcgcgccggccggaatgaaggtgagcatattgccggtgttcgagccaaggaagccgaggtcggcgggcagaatggcctcgtaacggatctcgaccttgaaatgttcgatggcggccacgatgattccgaccgcaagaatcacgatgcttgccgtccagaatctgttgaacagcatcagcaacatgaggtacagcaacgcgacaagtatcacgttgagtacgaatacgaaattgccgtcggtccacatcttgctcacgaagccgaatccgacggtcggactggacagttgcacacgggtggagctggacgaaacgcccacttcgagcgccgtcacaacaataatgtcgaagataacgaagagcacgccgtacgcccagccggggaagggcttgtgggggtgctggggcgtgacttcattggcttcggcttttttgacccaaagcttgaaatggggtttcactgtggtgatactactagtgttctcgctcattcgcctgtttccgtatgtgacttttcaagggcatattgttgccgctgaaccttggaaaatccatagttccactatttttcttaccgtttcctaactattcaccctaacgcaaagggtgcctcgggacatccccgaagcaccctgatatataaggagccttccctgatagcgaagcgttctgttctcccctaggcaacgcctcgctatctgacttgattattccccttattgctgttgcggattgccggctaccgccgcattacttcacggcggcggcgaactggtcgaccagtgcgctcatccagtcgagcaggttggtgtactgcttcggcatctgctcggtgagctccacgatcggcacgttgacgtccttggcggcaccggtgatctggtcggtggtggagttggcttcctggctgttgaagacgagcatcttgatggagccgcccttcagggtgtcctggaagtccttgatgtcggccggggtcggctcgctctcgttggcggaagcctgcgcgtagcccttcggggtggcgtcggtcatcttgaggtcgtcggccaagtgccaggccacggattcggtggcggcgtacggcaggttctcggtcttggcggaagtctccttgatcttggactcaagctggtcttccttggcgtgccattctttgttgagcttggcgtagtcgtccttgtgactcgggtcggccttctggtaggcggcggtgatggcgtcggcagcgttggaacgcaccttggcggagaaccagacgtgcgggttgtcgccttccttgatgccggcggtttcggcggcggtgaccagcgtggccttggtcgactgggcggccttggtggcccacgggtcgtaatcggcgccgttgaccacggccaccttggcagtgccgaacttggcaacatcctggctggtgggctcgtaatcgtgcgcctcaacgttggtcttggtcatgatgttggtgacttcgacgttgctgccgccgaggtcttcggccacggaaccccactggttgatggaggcgacgacctcgatcttgccggaagacgcggcgctgctggaatcggacttgttgccggcggcattgctggaaccgcaggcggccatcgagaacagggtcgccgcggcggccgcgatggcgagcgcgcgcttggcgttggacatgatggacatgattggattttcctctctaattcggctgtttggccgggcgatgctgctgtgctgcatcatcgcccggcccccaacacgacagaataacatgtattgagaattattatcatttgcatttacgtcggcgtgttgcacgcgcacacccgcgctgccggcggaaatcccgcgccccgacgatgacaacgcgggatcccgccgttttcggcagacgaaacggcagtatccccgcgtccgaacgatacccgcgcgggggttctgccatttaaggcctcggaaacgacagaaatcccgcgccaccttcgttcggacgcgggggttctgccgtttgccgcacatgtcacaacggcatcgcggcacagaccgacgcctgcaccaggtcgacgagccccacggtgtgggcatcctcacagaccagcgcatcacgcaaggcgattgcacggatgatgtcgcggcaggcgcactccccgtctgtatccaaatggcgtgccaggcaaccggcaccaatgaccggcaattcgagcacgcacgaggcctcacggatcaggcgggagaccactacgccggtcgaacgctcgtcatagacgccgttctcctcgcccatgccgcacaggcacaaacggtcgtcgtcaaagaatcgctcttcgaattcgtcaaggcctacggcattggccaccgcacccacgaacatcgactcaccccactcgttgagacggaaggaatcggccagatactgcgcgaccggcgtggcctcaaggcccacaggcagcgagaccagaaacgcgccggcccgcccttgcagcgatccgagcgtccgttcaaggtcatgtttgaccgtgcagctcatgcagcacccctcgagcccgaacgaatcggactcgccgaacaccaccccgcttgactggggcttcgcgacgttgcgcacgatatcgagaccggattccacggcttcgttcgggcgcacgtcataagcaatcgagcatacggacgggaaggaatcgaccaacgagaacgccacggagtccaggctcaggcggtcggcgccggtgagcagcaccacgggcgtgcgcccctccgcgtttccctgtgattgcaatgccggatgaatcatgacagcctttcttatttgataatggttatcattatgatatagttgcaggcatgtccaaaacatgtcaaattctgggaacacgcgccggggtcggcaaccgcgtctcccactcgcacaggaaaacacgccgaaccttcgccccgaacctgcagtccaagcggtactgggtgccgtccttgcagcggcacgtcacgcttaccgtgagcgccaagggcatcaagaccatcgaccgcatcggcatcgaggcggcgatcgcccgcatccgccgcgatcagaacgtcaactgaaccggccacggcatcacccccatgctcgggcagtcagtaggcccgccactgtgccggcgcgtaaccgcgcaacaaaccgcgctaacgagctgcatcacccacatggcaccgcgacgtacgcgacatacgtgacataacagcgtgacacccacacatagaaagcaccactcatggcaagcaaatcctccgcaatccgcccggtcatcaccctgaagtccacggccggcaccggattcacctacaccaccaccaagaatcgtcgtaatacgccggaccgtcttgagctcaccaagttcgatccggtagtccgcaaacgggtgctcttccgagagacccgctaatccatctgttcgttcattggacaccagtcgcgaggcgaggaagaggcttaagcacccgccgaaatcgtttccttgttggcattccggcggtttcctctatcaccatttcatgaactcatcttccgaaccttgcggcatgcgcccaatgaacgaatgcactcgtcccagctccggccggcgcgattcccgcgccccggagccttatcaaggagccggacatggccaaaaccagtaagatcaaccgacaattgcagcgcgaacgcatggtcgccaagtatgccgaacgccgcgccgaacacaagcgcgacagcgtcaaccctcatctgaccgccgaagaacgcgccgaggcgatgcgcaagctgcaggccctcccccgcgacgccagccccacccgtctgcgcaaccgcgattccatcgacggccgcccgcgcgcctacaaccgcaagttcggcctgtcacgtatcaatctgcgtgagaaggcacacaagggcaaactgcccggcgtggtgaaatccagctggtgatcgggccggcacaaccggccgtcaggccgtctcaggccatctcaattcaccggattccacccgcgcgtccgacgccattctcatccatatcaccacacaacaccacacaaccaaaggtccataaccatgcaagagggcatccaccccgaatacggccccgtggtcttctatgaccgctccgccgacaagtacttcctcaccaagtccacactggtggccaaggccgtaaacctgccgaccatcgactgggaggacggcaacacctacccgctcgtcaatgtggaggtgtccagctacagccacccgttctacaccggcaagaatgtggtgatcgacgccgccggtcaggtgcagaagttcaacgctcattacgggcgcaagtgattcgccgcacattccgcaaagaccgtaagacaagaagaaaggaacggacatgaaggtcaaggcatcggtccgctcattggcccgcaaggatggctcctatgtcgtccgccggcgcggccatctgtatgtaatcaacaagaagaacccccactggaaggcgaggcaaggctgatggcactgcccaagtacaaggcatcccgagcaaacacgcattcgcgccgagccaactggaaggccaaggtgcctcagctggccacggtcagaacgcctgaaggcgaagtggttcaggttccgcagaatctggccgcagccgtacgaaaggggtatatgaagccataaccaacatcgtggattccgcaatccatcaagtctcgtaacaacaactcgacggtccgctccacaggccggcgacgtacgttctttctcccatttccttccgtatgccgtcacctgccggggcgaaccgccgttttatgaggccaccgcatccgatctggccaagctcgccaaggcagacatcgtggtgctcaacggcgccggctacgacggctgggcggaaaaggcgcagcttgacaagaaacgccagaccatcgtgaacgtgggcggcctcatgggcgtcaccgccaccgacgagcacgagcattcccacgaccacgccgagggcgaagaaggccgccatcaccaccatggtgctacgaacccgcacctgtggttcagcccggaagccgtgctgaaggccgccgaagccatcaacgccgtctacgcggacaaggccggggccggttctgccaccgccgccaccgcgcaacgtcacttcaacgacaggaagaaaccctcaaggaaatggacaactggcccacgtattacccggcatccatgagcaaggaggaagtggccaccgagatgctggcccaccgattcgccatcggcccaggcaaccatgtgcaaagttccccgcatatcgatgtgtaccatcggtatgcggggaactcgcatattatctcgaccactatcatgcgtacggtgctaatatgacggcgatatggcaggtgatattcgcatgaaagaacctcgcacgcagcgcacggaacaggtgaacaccgcgcaacaggaccattcggcgaactatctgtttctgattatcggcacgccgctggtggcgttcctgattgcggcttccgcgatgctcgagtcgcgtgggtttccggttccgctggtgcgtatcggcaccggtgccgcggggcttatcctgcaggcgattccgttcatgctgctgggcgcgatgatgtcggccgtggtcagcacgttcgtcagcaccgattctctggcccgccacataccgaaatcgttggccggcggactggccgcggcattggcggccggcctgtgcctaccggtgtgcgattgcatggtggtgcccacgttcgcgaatctgatgcgcaaacgcctgccgctgccgtgtgcggtgacgtttctgtgcgcagtgccggtgatgaatccgatggcgatatggtccacatggttcgcattcaccgacaaaccaggaatggtggcggcccgcgcggggttgggcatggtagtggcgatagtcgcgggggtgtcgttcgcggtgtggccgccccgctcccctgcggtgcgtgagaggccgctgacgattgggcggtcgttggtttgcgaggattgtgcaggggcgacgggtgattcgcctgagagccaccccccagtcgggctttgtcgacagccccgccggcggggcacggggcgtggattggagcggttcacgcatttcattcggcatacgcatgacgactttatgcggatgatgccgattctgctgttcggcacgatcattgcctccatcatgcgcaccgcattgtcgtcgttgaccaacggttcaagcacgctcgatgacgctggtgccatcgtactgattctggcggcgatgggactggcgttcctgtgttcgctgtgctctacgtccgatgcggtgatcgccgccagcatgattggcgcgctgccggtctccgccatgcttgccttcctggtcttcggcccgatgctcgacctcaagaacacgctgatgctggccacggaatgccggccacggttcatcatccggttcatcgcgaccgtggcggcggcctgcttcctcgccgcgattgccgcccatctggtgatgggagcgtagccatgaagcgcaaagtcacactccccgaccgcgtggaggcgctgtgtttcgcggcgctgggcgcggccatcgcctatgcggcggtgggcggatcatacaccacgctgaccacgccgcgctcgctgccgtatctcatcatcggtgcggtactgctgttcgtgctggcgaccgcagcatggctcggactgttccacgccacggagcgttcggttttacggttcctgatcgccttgattattccggcgctgctgatcgccgtgccgttccagcccagcagcggcagcggcggcttcgacgagtacgccggcggccgcgctatcgccattccccgcagctcgcacaagcctgatggcgcctcgcagctgcacggactcgacacggcgaacaagaccctgaccatcagcgacgacgaattcggctcatggttcgagcagatcgaccataatccgcagcgttacgtcggttaccatgtgcaggtcaccgggtttgtgagcaagtcgcgtacgttcggcgcggacgagttcgagctgtcccgccagttcatgtcctgctgcattctcgacatgaccccattcgggttcatagccagctccggcaaggccggcaccccgcacaatcacgactgggtcaccgtcgacgccgtcatcaagcagggcgtctacggctccgccggccacgagcgccaaggcctgatactgcaggtccggtcggccagcaaagccgcagccgccccgaccggctacttctactggcagtaaatgacgcgtctcccgaaatggaaagcactgcgctgcgccatgactcggcgcgtgacgcgaccccgactcctcatcacccaggtcctggcgaaactatcccgattcgccacggcccaggaaatcaccgacatcctgcgcgagcgcggcacgcgcatcggcacggccaccgcctaccgcaatgtgcagatgatggcctcccaaggcgagctcgacgtaatccacgtcaacggcgaggccctctaccgcgagtgctcggaccagcatcaccaccatcacatcgtatgccacgaatgcgggcggaccatcgaaatcgagattcccggacttgaacagtggatcgacaaagccaccaagcagttgaagtaccagaccatcgcccacgaactggagattttcgacctgtgccccaagtgtgcggcgaagcatgccatcgaaccgcctctcagcgtcggcacctcaccaaaggatggaccactgacgacgccagacgatactggccgtcggcgctcgaacaaataatggcgcagtcccgacgctactggccttcagcatcggtgcccttccaatccttggcgcaatagcgacgatataagctccacttgcatcgttagattgccaacgcttggcgcagcaccgacgccagacacgctcatcgtcgtcgttccaccaatatttggattggtaccgccaccacctataccaggcgtcgacactcggccaacaatcggcccgttaccgacacaaaactgcataaggtctcattgctcttaatagcagcaatgggcctgataatcactttcaccaactttcgccgctgccgtctgccgccctacagtcgcagacgaacaaacgctgaaaggaacaacaatgactatcaagaccatcgatgagcatgcttacgagatcgttaccgaagagggcaccttcgccgtctgcaaggacacgctggccaagttcgacgccaccaagcacgagcacggcgtggccgcctgtggccgctgcggctgctgcttcaccggcgactgctgcgacgacaccggctgcgagcacaaccacaccgaagagtgcgggggcaaggcttgcctgcacgcttgccacgagaaccgcgaaggccacgagtgcgccttctgccaccttgccttcgacaccaacgagaagtgccacgatgagatcctggccgacctcaaggaactcaaggccgagctggctgtctgagttttaggtttccgatttctcctgcggattgactcctctcagggaggggagccagattccgacacgaaccaccgcgcttaccgtatgatgtctacgggcgcggtggttttgtttttctcgatgatggcgcagatttgctcgggcgcctccttgcagccgcgccggacccatagccagataatcgatgagacggcggagaccagaatttccagcgcataggcgcgcggaatgccgccgtagctcagctcggcacccacacgggccgcctgcccaagcagcatctgcttcaacacatccttgacccggtcatacatctgcatatcgttgcccgaacgggacagtgcgtcgaagaacgcatactcacgcttgacatagcgcaacgcctcggcttcgtgttccagtcctacaatctggtggccaacctcacggccaaggagaacgtggagctcgcctccgaaatcatgaaagacgcgcaggaaccgacccaagcgcttatcgacgtggggcttcaggaccgtatcaacaacttccccgcgcagctttcgggcggcggacagcggcgcgcggccatcgcccgagcggtggccacgaacccgaagattctgctgtgcgacgagccgactggcgctctggactacaacaccggcaagcaggtgctgcagattctgcaggatcagagccgtaagaagggtgcgaccgtggtcattgtgacgcacaattccgccatcgcgccgattgccgaccgcgtgatccacatgcatgacgcgcgcgtcaaatcgatcgaagtgaacgagcacccgatggatatcaaggatctggagtggtaagcagtatgaccgatctcaatgatttcaccgaaacgaccaaccttacgcccgcgaccgactccgcagccgattccgccgcaaattcagcaaacgactcctataccgcgcccggcagaacgccccacgcgcacaaggccaagcgcaaccgccgacgcaacgggtcattccataagcgcatgctatggaaagacgcccgcgtcaccatggccaaatccaagggtcgattcgcctccatcgtgagcctgatgacgcttggctcctttgcgctcgtaggcctgttcgtcaccggcccggacatgcaaataaccggcaccgacttctttaatcagaacaatctcgctgacataaccgtcatcagcgattatggcctgaccaaagctgacgaaaacattattcgcagcgcgccgaagtggccaaggcgatgaggggcggggccgtctccgagtccgcgccgatctactacgaggagatgtcgaaagtggccggcaaggagaacgacaaacagtcgattaccctgatcgccactgatgacgcctacaatttcggcgactacatcaccctgcgttcgcgcaccgggcacaagccgcaggtgctcaccgaccgtggtgcgatcatctccgaacgtatggcggggatgatggacgccaaggtaggcgacacgattaccgtcaccgattcgagcggcaccgagcgcaaggtgcgcgtggacggcatcaccgaaatgcatatcgggcatttcatgttcatgacttcgggtggctataagcacgtgttcggcgaacagtaccagtcgaacgcctatatggtgaggctcaagaaccatgagacctccaatgtggagtcgcgtagcgccaagctcataaagttggacggcgcgaagggcattgtgcagaacacgacttcgaagaaacaggtggccacaatcgtcgacttgccggatcagatcatggaagtgctgattctcgcggctgagctgctggccgtggtgatcctctacaatctgacgaatctcaacgtctccgaacgtatccacgaactgccgaccatcaaggtgctcggcggactcggcgtgctggtctaccggcggttgaagacggtcgacatgctcggcgccctgaagtcggtggaatagcagcggaatagcaaatgggatcggctttgaagccgatcccattcaattattcgctcactgctttctgagccttctgcgctttctgctccttttggcaatcagggcatagtccgaagacctccagggtgtgggattcgacggtgaagccgtggccgtcggccactttgcgcagccaagcctcgctgggcggatcgatttccacggttttgccgcaccgcttgcacaccaagtggtggtgatgtccgtcgtcgccgcataggcggaacagctgctggccgtccaggcggatcgtgtcggcggcaccggcatcggccaaggcgttgagctggcggtacacggtggccaagccgattttcgagccttcgtcctccagcctgcggtgcaggtcctgagcggagatgaactcctcacagtcggccaaggcggcgcgaatcgcgtccttctgcttggtctggcgttcgatatgttcaaccatcgataaggtcacgccttctttttcaggtcgtcccagcagccggtggcctcaaggtcagcaaccgtggcatcagggttgtcggtgagcacggtgatgtggcccatcttgcggtcgtggcgcacttcggccttgccgtagtcgtgcacattccactccgggtgggtggcgatcagcgcgcgcgtcggctccacatgctggccgagtacgttgaccatcacggccggcgagagcagcttgggcttgggcatgggccagccggcgatgccgcggatgtgggcgtcgaactggtccatcgagcaggcctcgatggtgtagtggccggagttgtgcgggcgcggggcgagctcgttgacgatgacctgatcgtccttggtgatgaacagttcgatggccagcgtgccagccagttcgaagcccttggccaagcgaatcgccagttcatgcgcttcgcgagccacatgttcggacacttcggcgggggcgatggtcatgtgcaggatgttgttgcggtgctcgttacgcacgatggggaaggtgacgaagtccttgccgttgccggagaccaggatcgaagcctcgaatgcgaagtcgacgaagccttccaggatgctcggcgggaagccgccaccacggtcggaacgggagcggatcttctccaagtcggcgtcggaacgcagcacgagctgaccgtggccgtcgtagccgccggacacggtcttcagcacggccggataatgaatatcatccaatgcggcgtcaagctcatcgaagttgttgacggcgcgccacggtgcggtggcggtgccgtggtcgttgatgaaccgcttctcatgcacgcggtgctgggtcacgcgcagcaagtcagtgccctgcggggtggcggtgatgccgcgcacctcgtcgatggcatcggcgtccacgttctcgaactcgtaggtgagcacgtcggactgcacggccagatcatggatggcggttttgtcatcgtattcggcggtgatctggaagtcggccacctgaccggtcgggcagttcggcgtcgggtcaagcacgccgacgcggaagcccatgtagcgggcggacaaagccatcatgcggccgagctggccgccgccgatgatgccgatggtcgatcccggcatcagcatcgaaacacgaccgcctgtttcctcagacaagctgggcattggattcagccaccttttctttcagttcgttacggtaatcctcaagcttgtcggccagttcgggctcgaaggcggagagcatctgcacggcgagcaggccggcgttggtggcaccggagttgccgacggcggtggtggccaccggaatgccgccgggcatctgcacgatggacagcagcgaatcccagccggacagggcgtgggagcgcacgggcacgccgattacgggcagtgtggtctgcgcggcgatcatgcccggcaggtgggcggcaccgccggcaccggcgataatgaccttcaggccattggcgcgggcgttgtgcgcgaactcggccatgagctcgggc

SEQ ID NO: 147 - DNA, 3384 bp, Unknown
  R206_24m  MAG No. k141_47616
gcagcaggtcggtgctccgaccgagctgtatgatcgtccggccaacgtcttcgtcgccggcttcatcggctccccgtcgatgaacctgaacacccacccggtggtcaacggcaaggcgaagatcggtgaggacaccgtggacctgccggctgaggccgtcaacaagctcaccgccgaagacaacggccagatcgtggtcggcttccgtcctgaggacgctggcctggccccggctgacgacccgaacgccttctccctgaaggttgtgaacgtcgaggatctgggctccgatggctacatctacggcaacatcgtcaccgatggctccgccgctgaggcttcccaggtcatgtccgaccagaacaagctcaccacgattcgtgtgaatccgcgtgcgctgccgaaggttggcgcgaccgtcaagatcaagatcgacccggccaagatgcacctgttcgctccgtcgactgagctgcgtctgaactaatagatacttggcgaggtctaatcgcttcgtcaaccattaaacgaggttattctcttcctctcttatggcctcgttggaaaagccctgcatagctgcggggcttttctttttgccttctagacggtctgagggagagaccaaacggtgttttcccgtaaacataacgcgccgaagtcgtggccaaggagcacacatcgcgaacgacacgtaaaatcgaacacatggagttgaacgaattgccccagatggatccgcgtgcgctgaaggccacgtctgtcaaagccgaagacgaacatgccagttcagctgagccgcaagcactgaaaatcaccgccgccagctcgaacccgaagatgttcacgctgccctggcacaagcccttggccacctggcctgaggacctgctggccaacctgccgcgaggcatctcccgccacgtcgtgcgattcgtgcacgtgggcgacgaggtgtacgccatgaaggagatcacgcgccaggtggccgagcgagagtacgagatcctgcgtcgactgcagaagctcgaactgccgaccgtcaccccgatcgccgtggtcaccggccgtcacacccgtgaaggggagccgctggaggcgattctggtcacccggcacttgaagttctcgctgccgtaccgtgcgttgttcgcccgcaacctgcgcccggacaccgccgaacgactgattgacgccctcgccgtgctgctggtgcgcctgcacctggccggcttctactggggcgatgtgtccctgtcgaacgtcctgttcctgcgcgacgccgacgctttctccgccttcctggtggacgccgagaccggtgacctgcaagtccagctcaccgacggccagcgcgaatacgatatcgacttggcccgcaccaacatcatcggcgaacttatggatttggcgtccggcaagctactgcccggcgacgtggatgagatcgaggtgggcaaccgcctagtcgaccgctaccactcgctgtggagcgccctgaccgacaccgacaagttcaacccggacgaaatgtggaagatcgagcagcgcgtcaacaagctcaacgagctgggcttcgacgtggacgagctggaaatgaagaccgccgaggacggcaagcgtgtgctggtccgcccgcgcgtggtggacgccggctacgccaaccgcaagctgctgcgcctcaccggccttgacgtgcaggagaaccaggcccgtcgtctgctcaacgaccttgacgcctaccgtgcctccacgtggcgtgagggcgaggatctggaaatcgtggccaccgattggatgcgcgaggtgttcgagccgaccgtgcgtatgattccgcgcgaatatcgctcccagatcgagcctgctcagttcttccatgaggtgcttgaccatcgctggttcctggcggagaaggccggccacgacgtgccgatgggcgaggccgtgaccagctacatcgacaacgttctgccgagctacaaccttgattccaaggcactcgccgaacttaacgaagaggccgattccggcgtcattgacgacgaatccacctacagcgacccggacgacgacggctacaaccccgatgacgatccggatgcggcagtgtggagtcattaagcggacaatccggtggactgtctgtaggtgagcccatcacacaaagaagcccctcaaatagaggggcttctttgtgtgtacaacctattacggcctcaagcgacaatcactccgccgcagccttgcgccgtgcgttggacaccgcgtacaggctgatacccgccgccactgaagcgttcagcgactcaacagacgagctgatcgggatgccggcaatcgcgtcgcaggtttcgcgcaccagtcggcccaaaccgctgccttccgaaccgagcactacaacgagcggatcggattcaaagccagtctcgccgacgagcttatcgccgccaccgtcaaggccgacaacgtagtatccacgctccttcaagccctcaagtgccttagtcaggttcaccacgcgcgccaccggcatatgcgcggccgcaccggcagacaccttccaagcggcggcgttcactgaagcggaacggcgttccggcagaatcacaccattggcaccgaatgcggccgccgaacgaatcacggcacccaggttctgcggatcggtcacgccgtccaatgcaatgaacagcggtcgcgcagcaatacgggcggccgccgaattcgcggcctccattgccttggccttcttctcagcacgatcggccagctcgttcagcgaggagtactggaacggatcgaccttcagaatcacgccctgatggttgccggagcgggcgatacgatccatctccagacgatcggcctccagcatgtgcaggccgttcataccagcgattttcacgatttcgcgagtacgatcgtcatgttcaatacgagacatgatgtacagcgtggaagaaggtacgcctacgcgcagtgcttccagcacggaattacggccgtacaccagatccgaagtatccgccgaagcgaacttgtccactcgacggcgggctgccagacgcgggtcggccatctgccgacgttcggccgctttcttggccttatacgccttgtgatagacgcggtcctcggctttgggagtggggccgtaacccttcagtttgttgcgatgcttgccacccgaccccttggtcggtccttttttgatagccataggtgctattgtcccagcaccccgcgccaaaacgcggctattccgccgtcggtagccggtaaggtattgagagtgaagaagcagcgcatgatattcggactgtccctgctgtattggggattatggttggcgattctgattctgtggatgggtcgcttcgtgac

SEQ ID NO: 148 - DNA, 19429 bp, Unknown
  R206_24m  MAG No. k141_48076
cacgccgattacgggcagtgtggtctgcgcggcgatcatgcccggcaggtgggcggcaccgccggcaccggcgataatgaccttcaggccattggcgcgggcgttgtgcgcgaactcggccatgagctcgggcgtgcggtgcgcggagatgacctgcttgtggtaggcgacgccgaactggtcgagaatatcgcaggcgcgcttcatggtctcccagtcgctggccgatcccatgaccactgcgacttcgggcttggattcatttgccattatcatttactccctagttattgagaataaggcccactgtacgcttgggcgcttacttcggcaacgccttgcggtttttcccgggtcagccccgccgacccgctcccccggcccgtggagccgggctcctacaatgcgatgacgatcttgccgaacatgtcgccggcgatcattctggcgaacgcctcgggggcggcgtccaacccgctgaccacggaatcgatcaccggatgcaggtcggcgtgctccacgaagcgcagcagccgggcgaaatcctcgcgcgaacccatggtgcagccctgcacgcgaatgtcctggaagaacagtcgcgtgagctccgcaccgggctggtcgccggtggtggcgccgcagatggcgatggtgccgccgggacgcaccgaccgcaccgaatggccccatgtggccgcccccacggactcgatcaccgcatcgaccttgcgcggcaaccgcgcaccggtctccagcgcggcgttcgcgccaagtttcagcgctttggcgcgcttgtccgcgtcacgcgaggcgacgaacacctccagaccggcggcatgggcgagctggatggccgcagtggacacgccgccgcccgcgccctggatgagcacggagtcgcccggcttgatgccggcggcctcgaacaacagcgagtaggcggtcagccagctggtgccgagtgcggccgcctcggccgtggtgaggtttgcgggcttggcgaacacgttggcggacggcacggcagttttctcggccatcgtgccggggtatttctcggagaggatcgtacggcgctcgcccggggccacgcccgccccatcggtgccgacgaacgtgtacagcaccacttcgctgccggccttgagcccatgcttgccggggatgtcctcgtccagaatgcccacggcatcggtgcccaggatcatcggcgtctgttcggcggcgagacccacaccctgtagcgaccagacgtcgtgatggttcacgctcaccgcgcgcaccgaaacggtcgaccagaacgggcgggcctggggttcgggctgctcgcccaccgccaacgcggcaagcggatcgtcatggttgacggtggatgcgtatacggccttcattgcgcgctccttggtatcaaaaggaattaccgcattcattgtcccacatcgcgcagcgaacgaatcacccatttacggagatgttgggggcattgattcgtcatgtggacctcggacaatgccgggcgttagcattcaacttcggaaagactagcgaagggagattcgagggtatgcgcaacgcgtcaggaaacggatttgattcaagcgattccttcgccgtctccggtgccgccgagggggccgcgcgccttcacgacatccccccgagcattaccccttcccatggcgacgactcccatctgctgagccgcattgccagcccggccgacgtcaaggcccttgcccccgacgagctcgccgaactctgccgtgagattcgcgccacgctgctggcatatggccaccaacacggcggtcatatcggctccaatctgggcatggtggaggccacggtggccctgcatcgcgtattcgattcgccgcgtgaccgtatcgtgttcgatgtatcccaccaaagctacgtgcataagatgctcacgggccgcgccgacgcctatctggacccggaccgtttcggcgaggtgactggcttcaccaatccggatgaaagcaaacacgaccagttcgtgctcggccacaccggtacctcgatttcactggcttgcggtttggcgaaaacccgcgatatggaaggcccgaacagcggcatcggcaatgtggtcgccgtgatcggggacggttcgctcagttctggcgtggcgttcgaggggctgaacaacgcggccgagcaaggcggcaacctcatcatcgtgttcaacgacaacgagatgtcgatcgccggcgatttcggcggcatgtacggcccgctcgcccgcctgcgcgcgtccggcggcaccgcccagccgaacctgttcaacgcgttcggcctagactatcggtatgtggaggccggcaacgatgtttccgcgctggtcgcggctttcgaggaagtgcgcgatatcgaccatccggtggtggtccatattcatacgttgaagggcgcgggatacgacggcgccgattacgtggccggcgcaccctcggcctcggccggtaacgtccatgagctggatccggcagtctccgacaccggcgtgcgccccacgagcaacgtgctgcacagcgaaccgtggcattcggatcactgcaacctgtccgaccatgaaccacatgaaggccagtgcgaggcctcgcattggcagaatccggatgccgcaatcggcaagccggacgatccgcgcaagcattacggcaaaatggcgatggccgcgctcgaaccgcgtttcgccgccgagccaggactcgtggtcatctcccccgccacgccgggctccaacggcatcacccacgaattccgcgaacgcgcgggttcgcattacgtggacacgggcatcaccgaatcgcatgccgtggcgtatgctgccggcatcgcacgggcgggcggcacccccgtggtggccaccacggcgtccttcttccagcgcgcgtacgaccagttcttccaggagatgagcctgaaccgttcgcgagtcacggtacttgattttctgggcggcttgtccggttcggacaatacgcattccggcgcatatgacgtgacgatgttctccaatattccaggggttacgatgctggtgccgacttcggctcgcgactatctggctgatttggcatgggctaccgcgccggccggttcggcggacgcccctgctggtccggcggtgattcgggtgccgggcgaggcgattctggcggcggaacgggatgcgacgctgctgccggtgacgggtgggcagattgctgaccgcccccagtcagcttcgctgccagcctccgccagctccgccagcgggggcatatctgccgcaacagtccgcgggaccgttagcgtaacggctcagcatgccggtgcgcgtcacatgctggattggcgggtcaatcagacgggctcgcaagtcgcgatcatcggactgggcaatgcgtatccgttggcggagcagacggccgccgcattgtctgacgattatggcatcacggcaacggttatcgacccgcgccagtgcacgtcgctggattcagacgtactggagtcgttgcgtgatggccaccagcaggtcatcacccttgaagacgggcagcttgaaggcggctggggcgagaaagtgaccgcatactatgcgaatcatcatgtctcggacggcagccgtaatcctcgtgtgctgaacttcggcgcagccaaggaatttaccgaccgcgtgtcgctgggcgaactgaacgaacgttatggactaacggtggagcaggtgacagaggcgatcactcgttgtttttgatggcgtctagggccgggattttaacggctttattggccgggccgaagccgaatagcaagccgatcagcgtggaaaacagcacggcgaacaggaacagccaccacggaatcaccgaataacgggtcacattctcgccaccaactatcgcctgccagagtatggtccagatagatgttccgccaccggtaccgtcgccggagcccccgccggcaccgctgaccataccgccagacatgtcgccgctcatgccgcccgcatacaacgcgccgacaacgttgatgcccagcgatatcagtccgctcagcacgcagccgatcaatccgccgaagaatccgatcgcgccggcctccgcaagaaacatgacgcgaatgtcacgaacgtagcagccaagcgccttcataatgccgatctcgcgcgtgcgctcggttacggacataaccattgtgttggcgatgccgatggccgcaaccaacagcgaaaccgcaccgataccgcccagaatcagctgaatcgcgcgcgactgttcttccaacgacttacgcatgtcttcataggaggaggtctcgtagcccaacgctttgatctgtgattcgacttcgggcacggacttgaggtcggcggccttgaccagcacttgatcataggcggtggcttttttggcggcggctggatcgactttggcggccagttccttcaacgcctgcaaatccatgaccagaccgtcggaggtggcatagcccttgttgtagtcgcccgccacaatgccggaagcccgcacatcgagggtgacgttttccgactgacccgcggcgctgccgcttgcgccgcccgcgccgccaccgccgcccgcgccgcctgtgccgccgccaccgccgccgtacatgttcatgctgtactggtcgccctgataattggtgccggtggtcagactgatttgcgtggcgagcgggtcgaagaacggatcttcgtcctgatctttctcgcactggccggtggcctggttaaacgtgcatgaggaatactgaccgccacgtgtgctggtgcgttgttcgccgttcttcagggtgtccatgaaaccataggcgaaccattcgccggcaagcacctggccttttttgaccggtttctcgccaccgacgagcttgtagcccatctggtcgagctgggtcatgtcgatgcccatgatctgcacgtaatcatagatgtaacggccgcccgcgccggctctggccgtcacgttataagggaagttcatcatcggcgtcacgccggatacgccgctcatcgcgcggaaggattccacggccttgtcgtcgagcttggtatcgcccatcttggacgagccgccatcgtccatcggaccggcataaccgttggtgtacacggtgacgatggacagatcgcccatcgatttgagcatcttctcgttctgctcgttaatgccttggcccaaagagaccatgagcacaatcgagcagcagccgacgataacgcccagcacggtcagaatcgtacgggatttacgccgccataggttttgtctgcagagccgcagtatgtcgccgaatcgcatggtcgggcctttcaggccttgtgggatgagccggctggtgcgactgatgaggctggggtgactggtgtgataggagcggtgtctgccgcagcaccatccgtcacgccggtatcggtcttatcatccttgccttcggaccaatcatcccagtcctcatcaatatcgttcttcttggccttctgcttgcgccggcgacgcaccagcagcacaatcaccacgataatgaccacggcgatcacgacgatgaccacatacaccagcaccggcaatccctgattggcgttctggtccatgttcggatcggccatgccggaatcatccatcggctgcatatcggttacgggtatggtgagcgggaattccttggtcttggtctgtccgtcggaatcctcgtacgtgactttgagcgtggtcttcagctcgcctgacgcgtgcggtgtgaaggcgtaaccaatcgtgccggtggcgccggaagccacattgcccacgtactgggttttcatcgtggcatcgaaaccttcgccctccatcgtggcctcgacgttggcgatatcgcctttgcccttgttcacatattccatcgtgaccgtgttttcctggccggcgatcacctggtcgggcactacgggatcactgatttcgaaccggtcaggctgactgatcggcacggaaatcttgacgtcggactggcttgaggagcgggcgctggcgtccacatactcgtatcggaagttcacggtcacggactgggcaccgcttttcgcggaggcgagcgcctgcatcggcacgctttgcgtcatggcgtaaccggcccacagcgcgtcgacgtagaacgtgttcgtgcctcccgcgatggcgaagctctcgccgccgtccacggtgacgaccatgttcgtcaccgccacctgccccttgttctggaaggtgaagtcgagattgaatttggatccggcggccacggaatcacctccatacgcgaagttggtgatgatgatgttgggcaccggtccggcgatcggcgcggaatcgccgtcgcttccctgagacgtactgttcgtgccgcttgtgccgtctgtgccgtcgaccgcgtacgcctgatgcggaagggagatgacggcaagtgccagtgacagcgtggaaagcaacgcgacgatgatggcgatggtgtggtgggagaggtgcttcatcggtcagttccttgggttctatgggcggacggcgtggacggtgtagttggtgtggttggggcggacggcgtggacggaacagttgggcgggaaaggtcggtgttgagccgatcgctggtgatgcggccatcgagcaaggtgacaatgcggtcggcgtatgaggccatctgcggatcgtgtgtgaccagcacgatggtctggttgaagtcatgggcgaatgcgcagatcatcgtcatgacttcggttttggttttggagtcaaggttgccggtcggctcatcggcgaacaccacctcgggcttggtcacaaacgcccgggcgatgccgacgcgctgctgttggccgcccgacatctggcgcgggtaatggctgagacgatggccgagcccgactcgtttgagtacgccacgcgccgcacgttcgcgctgttccttgggcacgccgcggaacatcagcggcattgccacgttttcgagcgcggtcagattgggtagcaggttgtacgactggaatacgaagccgagatgcttctggcggaaggccgccagctcacgctcgtcgagtttgctgacgggtacgccgccgatgcgcacgccgccgcgcgtcggtttttccatgccggccaactggttgagcagcgtggatttgccggagccggattcgccgaaaatgcagcagatctggccttgcgggatactgagattgacacggtcaagcgccaccaccgtctcatcctcgacggggtattccttgcgtaggtttcttacctcgatgattgctcgcggcacgggcccttcttccttcgttcgtcgccattggcggacgcgcgatagctggttattatccagcacatctcaagtcagtgtataaccgttatgcaggagccgcaccccttaagggtgttcccggatggtgatgatgagcatgtgacttctaatctcaaggtcgacagttcaggctccagacggacccagaccggcataatactcaaaagcccctggcccccacagacgatgagggaccaagggtttattgcatcgtgaccccggacgggctcgaaccgtcgaccttgagattagaagtcacatgctctatccagctgagctacggggccaaactcgtgtaagtctagccgtaggggtgtaaaacacctcggcgtaacgtcggcttgcaccggtaccatcggcgatatggggacaacggagagcaacgtagatcacgccgcatcgggccagaccgtcgcaggcgatagtggtgagctcactttcacatacgcacagggtcgttttgccagtgaaggcagggattgggaaagcccggttgtgaccaacatggctgcatccgtctctgccgatgccggcaatacccccgccggcagcatcatcaacaccggcgccaacaacactttgaccagcaccaccgaatcgtcgcttgtcaccctgctgtccgaccaatgcccgttcgttatcaaggccaccattttcgagggcaatggcaaaaacgccattcgcgaacgtcacacattcaccggctcggtgctgcgccagctcgaccaagccagcgccctgctaaacggcatcaacgaatccggccaacacccggccatagccctgcgcgaagcattggtcaacgcactggaacatcgcgattacacgtactccggccccacactgatcaatatcttcgattcccgcctggaaatcgtctcgctcggcggcctgaccgatggtttggaaatcaacgatctgctcaacggcgtatgccagccacgcaccccgcgtttggctgaattgttcgccgatctgggcctctgcgagaactgcggtaccggtattcaacgcattatggacgcctacgcgcagagcgcggtcagtccgcaactgcgcgtgggccccacttcggtggcgatggtgctgcccatcccggtctcggccgaggccgcatccttgcatcggaccgataccgatgcttccgccgcgcccagcaccactgacgaagcgcagcgcgccaaaatgtattcattccccacgattcagcgcatgacggataacgccgcagatgccttggccggcgcacgcatcatcggctgcgcgccattgcagacgctgattctcggcagtggattcggcgagcgcccggacggtgacgaccaggtcagtacccgcccgctcgatacggcgacgctggaaccgtcgcctcaaacgttggagcagttcacgctcaatttcctcgcgttccgcggcgtgaagctcagccgtaaaaccatgcagaaagcgcttggcctgaacaaggatcagatgacgcagctcttggaccagctggagttgagcggcaagatcgaacgtcatacgcacgccaagtccactacgtattcgctggcacatgcctcaggacggtaacgaccagagcggcaacaaagcggcaacgaccagagcaatacagcccaaagcacgataaagcagcagctcagttctcgaatacgcgatcgcgaatcatgcgaccggattcgtcgagcgcggtggagaaacggccgtagtcggacagaatcacgcccatgtacagcatgtccacgagcgcggtatcggccacgcgcgagaaaatcgcattgccatagatcgtgtgcgagtcacgacccgtcagcaacgtcacgtcggcccagctggccagcggcgcgccgatggcattggttatggcgatggttttcgcgccatgcgatttcgccaatcgcaacgctttgaccgtatccgccgaactgcccgaatgggagaaggcgacggccacagcgccgtggggcaggtgcccggcaccgatctgctgcaggtaagcgtcggtattgagacggcatgtcagtcccaggtagccgagcttggtgaacagatccatcgccggtgtcaacgagttctccacgccgaaaatatcgatgaactccgattcggcgagtagggcgaccgccttgcgataggccttggggtccaacgcactgtgcagctcatcgatcagcgccttcgcgccataggccgctttgccgggaacctcatcttcgccatcccacggattcagatcgaatccagccaacggattgaaggtcactttgtgctcggcggccggatggcgcaacacgtaccgcagttcacggtaaccgccgaaaccgagcttgcgggcgaaacgaatcaccgtcggctggctgacgtgggcgatgtcggccatctggccgacggtcaggtcggccgcctcctcgatatgatcccgaatatactgggccacggcgcgctccgccggacgcagcgacggatacacgtggtcgatgcgctcacgtattcccaccgaggattgcacagccgcgctcctagtcgtccgtattttccattcctgtttcgagggtaccggctgtataccggcgaacagtcgacttggattgaccgcaacatgaacggtgagcgaactcttccgtttacctttccgctccattccctctacaatcaaaaccatggtgcggattagcgtgggaagccccacccatcacacaagcgggcggctgtacggcgtgttcttcgaggacatcaaccatggtgcggatggcgggctgaacgccaacatggtgaacaactacagttttgacggcgtctatctcgaccatcacacgtggcgtatggccggcgccgaacgatggcgtacacaggccgattccctgcgtttctgggatttcatcaactgttccgccgccagcctcggcagtgagatacgcgggattcacggccagcgggtgaccaccgactgccccgccccgccaattcacgcacatagccgatacgctcgcatcacgtccgatgttccttccgaaaccggccctgcatatctggaaaacctcggctataacggaggcggcgacaacgggggcgagcccgcgttctccatcgtcgccgaccacacctattccgtcagtctcgcggtacgtccggttcatgggcgggccaagctgtccgtcggcgtggtcgataggtacggtctgccgctcaccagcaccactcgattgtcgtatatcgtggacgcagatccgcttgacgatacggaagagaccggtctgaggcaggacgatggtgccaatgcgcaggattccggcgtttcgatcagtccggattcgtcggatggtgccatcgccatcggccgtgacggctggtaccggttcaacgccgacgtaaccggcctgaacaccgattacggcaagctgcgtatcaccattgacgccggcgaacgcaccacgttcgatctggatctggtgcagttcatggatgcggactattggggcgcgggcgacccgaaatggcgttacggcaagctgcgccgcgatctggtggaaaccattcaggcgttgcatccagcgtttctgcgattccccggcggctgcatcgtcgaaggtgtgacgcccggcaatgaatatcgctggaaggataccgtcggctccctggccgcgcgacgccaacagtattcgatgtggtcgttcaagatgccggatggttccagctattcgcagagctatcagatcggcttctacgagtatttctgcctgtgcgaggacctcaaggccaagccgctgcccactctgttcgccggcatcgcatgccagtcgcccggccgcgatccgcgccacatggatatcaattcggccactttccgcaacaatgtgattcaggactacctggacctcatcgaattcgcgaatggcgatccggagtccagctcgtgggccgcggtccggcgtgatatgggccatccagaaccgttcggcctggacatgatcggcgtgggcaacgaaaacttcggggctgactacgtggccaagtttgacatgatcagcgaggccattcacgaacgatacccggatatgctgtgtgtgatgggcgccggactgttccccttccagccgacgatgaaacgcagctgggaccatgcgcgagcgttggccgcaaccgattccggggcacatgattccgccaccggtgacgcgattatcgtcgacgaacattcttaccactcccccgaatggtttgcataccaagcgtcacgattcgacgcttacccgcgttgcggcgccggcgtctatttcggcgaatattcagccaacggctattttgccggccaaccgcagaccgaacagggcgcgaacacgtggaagtcggcactcggcgaggccgcgttcctgaccggttgcgagcgcaattccgacgtggtgcgcatgacctcctatgcaccgctgctcgcgcatatcccggctaaggggtgggcgcagaatcttatcgaactcaatccggcgcatgtgaaccccacggtgaattatgaggtggagcggctgttttccacgcatctgggcgacacgacatatgccgtgtccatcgagcagaccgcgtcacgccccgccaaacatctgtatgtcagtgccaccgggcatgacggggatgacgcctgccgttacatcaaaatcgtcaatacctccgattccccggtggatgtgacgttggaaatcgcgcgcggactggccgggctgggcgcctcgccatcgcgaccggtgcgtttggaggtgacgacgttaagcgccagtccgacggcgaaaaccactatcggataccgcggcgaggcttcgggggcgattgtgccggaacgtcgggcttacacattgccgtcgccgtcttcattgctggcgatgaagatcaagccgtacagcgtcacgctggtggcttcgcgctgattgacatcggccattaggccgattcctttgccgttagaatcaccctcaaggatgagggggaatcgtgcagattcagggaataataggggctatcccccatagcgaatacaagcacgggagggcaggatggaaaccacggcggccagaagaccgccggccaacgatgaaggagtatgcggtatgtttatcaatctgttccgcaggcagcgccctgcgctcgcccggctggcccgcaactccaacgcctatcgtcagccgatggttgcggccgtatcatcgtccgcagtcggcgtatccagcatcacctctgcatccaacacagccaacacagacggcgtatccggcgtatccacgctggatgccaccatcggccgcatccacgacatcccgcagtcggccatgagccgactgaccggctcccccaccgtatacgcgcggtagaccaccccagtcggcttcgccgacagcccccgtcagcggggtggagatggctgggctcagagactcggctcgatgatccagctcaaggtcagcaatacggccaaaaacagaacgttgacggcggagtagacggccagataccggcctttcttgtgcgggtattggcgcacgacgttcttgtaagaaataagcgaggccatcgaggcgatgagcgtacccatgccgcccaaattggtgccaatgatcagatcgcgccattggtcgcagaagccggaaagcagaatcgtggtgggcacattgctgatgacctggctggagccgaccgccacctccagcggatggccgccgaccagcgagcgcgccagttcgtagaattcgggcacgcgcttcatgttgccgatgaagatgaagaacatgcagaaggtgagcggcagtccccaatccacgtatttgaatacgcgccgatcggtgaacaggaacacgacgaccacgatcacgcacatcacccacaggggaatcacgtcggagacggccagtaggcagacgatgaacagcagcgagtagacgatggtgcgccagccgccataaccggcgccgtagccggtgatacgaatctcgtcgggctggtgtttgttgcgctcgggagccagcacgccggtttcgaggtcgcccaggtcgccgaccggtttgccgccaaacaccacggaaatcacgatgaccagcaacacggccgccgtgccggaatacggtgccatgatgccgaggaattccatggtcggcatgccggtcagggctttgagatacaggttgtgcgcgttgccgatcggggtgagcatactgcccacgttcgcgccaatggtcatcagcgtgaccacgaggatggtcttatcctcttgcccagccatgatgagcacggccaccgcgaacggcacaaacgtgaccagcgcaacgtcattggtgatgaacatcgcggaaaagaacgtcaaagcgacaagcgtaatgaccagtccgcgcatggtgctgaccttctccagcaatcgcgaaccgatgatgcggaacacgccgatacgctggaatccgcacaccacaatcatcaggcagatgagctggctgatggtgctggcgtgaatgtagcttttgtaatcggcgtccggcggcacaatgaaacacgaaatcagggcgagtattgcggcgacgatgagaatcgtctcatttttggctacattgatcagccagcgtcgcatccattcctccgtgaataacccaatatcgcagccgttctattctacgcgcagaccggcataaggtacgtagtcgcgttgcgctggcggacatgagtttttggaccggtgccgcacatcagccgcgctcgtttttttatttggacaaggaaacattgagtttgcatgccttccatacaatgaactgccgcgcaatgctgtgcccgtatatacggctgcatcattgtgtggcaggccagacacgaataccgtacgtggctggctcataccaatggaacatagtttcattcgaggaagaggagcgatgaagttgcgtattaccccagtattcccggtcaaacgtttcgccgccgtgtctgcacagaacgtgaagaacgtgcagttcgattacacgaacatgcccacgtacaacacgatcaccaagtagcgcgcactgccgcactgatcggcggcacttgccgcatacatgaatggccggtgtgctgcggattccttaccaagaatccgcagcacaccggccattatgatatatgccgcaatacaggggggcaatcagccctgcaccttaccgccttgcgcgctacggtatccgaagttcatcatctcgctgttgtaggcgaccacgccacggccgaccgccggcagaacgatcatgccaccatcgccatgatgcgcggcgacttcgtccaaagtggccgtcgcggcatcctcgacgttctcgccggcgaaacgcacacgatccgacacctgatgggcggcgaccaccttgatgaatgcctcgccgatgccggtgcaggacaccgccaccgtggactggttggcgaacgtgccgcaaccgggcagcggcgaatcgcccacacgaccgtgcatctggttggtgatgccgccagtggacgtgccggcggcgatattgccttcggcatcgcgcgccacggcgccgatggtgccatgcttctcccactcatcgccaccggactgagcctcggccaaggactgacgacgctgttcggtgatgaagtactcgttgctttcggtcgcgacgccccaatcggcgatctcggcatcggtcgggtccgcgaacagcacatgcttggtctgctctttgacggcgcgcgccgcatcgatcgggttcttcacggtgcttacgccggtgaccgcaccgacctcgccatcgccggtcatcaggcaggcgtccatctgggcgatgccatcgctggtcagggcggcaccacggccggcgttgaattcgggagcgtcttccatgacgtggatggcggcgaccacagcctcatgcgccggcgctccggattccaacaactggtatccggcatcgagggcgcgctgcagatcaagttcgacctgggcgatgcgttcaggcgtgctgcgcttgccacgactgcccgctccggcgtgaatgataagcgtgatgccggtttcgctgcccgctagttcagtggtcaccggcgaaacggaggatgtggtcatatcgtgtccctttctggagtcagatggatgtgctgacgccaacgtatcgttgcttccgcatgtatgatagccgttgatggccgcgaccggttccgcatttcgcatcatcggctcgcgatggcgtgactcgttactgcgccacctcgccactacgccaggggcaatgcgatgccggctcgatcggccaggtcacgcaacgaccacgtggtctgccccgttcgcccgacaacgctatgcgcatgccacagcgaactgatgatggcttcctcgcttatttattcgtcgaatgcacccatcgatgtgggtatgcagccatcaaaaaactcgacaaccgcaatgagccagtcacttggctacatctgtgctatcgtctcgccaatgattcgaatgccggtatcaatgtcagcagcatccgggcgcacaaagttgagacgaatatgggaatcatccatttcgtcaacgtcgaacacgctgcccggcatgaacgtgacgccttgggaacggcaggattccaatacatccagagagcgcacgccgtccggtaaggaaacccaaatatagtagccgcctgcaggcacggtccaatacacttcatccggcgcataccgctccaatgctgcgattgctgcatctcgtcgaatgcggtaagtcttgatcaaaccgcgcaaatgttcggcgatgcggccttctttaagcagttccaggcagatgcgctgcgatgacgtgctcgtatgctggtcgaccatgcgccgcagagccgccagccggttaatcacatgcgggtcggccacaacccatcccgtgcgcaggcccgaagtgacggttttcgagaacgtcgacaaatacatcacatatcccgcattctccatgcctttgagcggtatggggcgatgtacgtcggacgattccccgccgtaccacaaatcgccgtaagcatcgtcttccacgatcagacactgatagcgccgcgccacgtcgatgagttcgctgcgtcgttcgggcggcagcgtggtaccggtggggttttggaatgtcgggacggtgtaaatgagcttgggccggaatcgcgcgcaatacccatccaacaggtctgtacgcataccgtgctcgtccactggaacgccgatgatgcgcgcatccgccgaacggaaggtctgcaatgccgggaagaacgtggattgttcgaccagcacgcagtcgccggggttgatgaacgcgcgcacgatgaggtcgatgccctgctcggaaccggagagcaccatcacgttgcggacgccgcattgtacgcctcgtgtgcgcatatgttcggcaagcagcgcacgcaactcttcgaatccctcgataggtgattccggttggccgtcgaattcccgcgattcgaacgcctcgatgctcaccttgcgcagcagatcgtccgggatatccaccgggttcggcgaaccggtggcgaagtcaataatggtgtcgccgcgctgcgcccgctcggccgaggcgatgtcatggtaggtaaaccggttggaataatcagagaacaacaccgaccatggcggacgcacgacggttggctccgggccctgaaccgagcggctttcacgaatcgtatggaccgccgcagagctgctgccctggtccgtcgtcaagaaatcagtggaggtagcacgttctacgtcgccggaagaggaggcttgcgatgttcccatttctgccgacgatcgtgttgttcgcgttattgcattcccgaagtcactgtttgacgtgtgcggtgttcggcttgcggaggcagccggcagcacgaacgtgcctttgccgactttggaggcgataagaccttcgtccttgagctgctgatacgcctgcaacaccgtggtgcgattgacttcgagacgcgaggacagctcgcgttcgggaggcaggcggtagccctcggccatcgcgccggagacgatctgttcacgcagctcggcagccagctgccggtacatcggcaccttgctgcgtcgattcagctcaagctgcatggcagatcgtctccttgattcgtcagtcggataccagtctaacggcagacgaatcgactacagcgacaggaagagctcgtggatgcgggtatcgtccgtgagttccgggtggaaggcggtggccaggatattgccttgacgcaagcccaccacgtggccatcgacttcggtttcgaccgtggcctcagggctgaccgacaccacgtacggtccgcggatgaataccagtgggaagtccgtgatacgctgcggatcatccgctgcaccaaaatcggcggtggcctggaaactaccgagctgacgaccataggcgttgcggcgtacgacggcgtcgagcgcgccaaagtagacattgtcgtcattgtcgagctttttagccagcagaatcatgccggcgcaagtgccgaataccggtttgcctgccttgatgtgggcggcgatcggctcgaacagtccggtcgaatgcaggagcttgccctgtgtagtggattcgccgccaggcagaatcacgcggtcgatggattcatcgaaatcctcggccgcgcgcagcagtttccacggcgcaccgagcttgtccagcaccgccgcatgttcggcgaatgcgccttgtacggccaggatgccggtcacgccgtgcttgacgttttcgacgtccgcggactcttctttggaaatatattcaacagctacaaccatgttgtctccttgggccttgactcccgctggcgggagcgtcaccctttcttggctcccctcaaagaggggagccaaggtaatgcactcactcgccgcgagcggccatgatggtctgaatctcgtcctcgttgatgccgaccatggcttcgccgaggttttcggacagcttggcgagcagatcggcgtcctgccagttggcggtggccttgacgatggcggcggcgcgcttggccgggtcgccggacttgaagatgccggagcccacgaacacgccttcggcaccgagctccatcatcagggcggcgtcggccggggtggccacgccaccggcggcgaagttcacgacgggcagacggccgttgtcgtgcacgtacttggccaggtcgtagggcacggccagctgcttggcggcctcgtagacctcgtcgtcgcgcaaggccacgagctcgcggatctgcttgttcatggtgcgcatgtggcgcacggcctgaatcacgtcgccggtgccgggctcgcccttggtacgaatcatggcagcaccctcggcgatgcggcgcagcgcctcgcccaggttcttcgcgccgcacacgaacggcacgtcgaactggttcttgtcgatgtggtacacgtcgtcggccggggaaagcacttcggattcgtcgatgtagtcgatgtcgatggcctgcagaatgcgggcttcggcgatgtggccgatacgcaccttggccatgaccggaatcgagacagcttcctgaatgcccttgatcatggccggatcgctcatacgggagacgccgccggcggcacgaatgtcagcggggatgcgctccagcgccatcaccgcgcacgcgccggcatcctgcgcgattttcgcctgttcgggcgtggtgacgtccatgatcacgccacccttgagcatctgggccagattacggttgagttccgcacgattctgcgtcatgagtttcccttcgttcgacgctgcttggtatcgcgcttcattattgaacggattggattggcccacccaaaccagtccaatttggatggggccaatccgcaacttctgcacccatccaatccggcaaccggttgtatggccttatgcatccggcacgtattcgaagatgcgcgcaatcagtgggaggtattagccgacggtgttgccgtagatttgggcttggaggtctttacgggcggtttccatgcgggtgatctggccgaggagggttatcttctcttcgccgtcgggcagctgggccatgcggcgtttggccaa

SEQ ID NO: 149 - DNA, 21005 bp, Unknown
  R206_24m  MAG No. k141_48411
aggtttcaggaacatctgctgttcactccccttatctctgccgcttgtgcggccacatcattgtgctgcccgttcatgggaaacatatcgacatgcgccctcgcccgcagaagactaaagcgctttagtaacatattggagggaacgggatatgatgtcaaattactatcgcaattcagcgtgttccgtcaggcatgtcatgctcggtgtcgatgacgatggtcaccggcccgtcattgaccagtccgacccgcatatgcgcaccgaaacgaccttccttcaccggcactcccccggagcgcaacgcctcgtcgaacttgatccacatgaaatcggcatgctcgggcttgccggccttgatgaagctcgggcgattgcccttgtgcacgtcggcgaacagcgtgaactgcgagatggagagaatctcgccgccgatgtcctggatcgaacggttcatcttgccctgcgcatcctcgaacaccctgagattcagaatcttatgggccagccaggcgatctgcttgccgccgtccccatcggtgacgcccaccagaatcatgaatcccgggccaatctgctgcggctcgaacgtgggatccagcgtgcccaattcattgaccacgtccacggacgcttcggacactcgttgcaatacgactttcatggttccctacagtacaacgtgtgcagtcatcaccaccgaaccatgccaatactgcggcagccagcaggtcgaggcaccatggacgctctgccaaggttgaccgcaggccgcgcacccgcaggataatcggcgtctgccccgaatgcggacgcgaagtgatggccgcgaagggcaaggcgctgcgcctgtgcaaatgcggcgaccccgtcaacgtggccgagctgcgcaagcaaagccaagccgaggccgaatcaatccacctgaccaaaaccccggcaggcatgagccaatggctcaagggaaactacgggtacgaggtcagccgcaagcggatcagcaactggctcaaccggggcaaactccccagctcgagacccgtcgatgacggctactgggagttcaacatacgggagattcttgcgttggctatgggctccagcggccgttcggcttgacatgatgtagtctgtaggatacagtagaggtatggaaatcaagcaatccgccgaataccgcaagtggttcaagaaactcagggaccacaaagcgaaggccgccatccaagcccggctcgatgtctgcaagctcgcaggcaggccattcggcgacatcaaacccgtgggaggcccggtcagcgagatgcggttccacaccggggccggataccgcgtctacttcgccatgcagggcaacgtgctcatgctgctgctcgcaggcggcgacaaaagcacccagcagaccgacatcagacaagcccacgacatcctcaacgactacaaggaacaacgacaatgagcaccgaattcaccgactacgacaccagcgaatacctcgaaaacgaacaggacatcatcgcctacctcaacgccatagccgaatacgacgaccccgcactcatgcaggccgcgctcggcaacgtcgccaaggcccggggcatgacccagatcgccaaggacgcgggcgtggggcgcgaaagcctctacaagagcctcagcaaggacggcaaccccagcttccagaccatcgccaaggtaatccacgccctcggcggacgcctcaccatccaagccgcctgaaaaaacaaaacacaagcgggagtagggtgaatccaccccgtggcatactccgtatcaggattagtgtgaaagcctctgaatcaaccggttcaggggctttactcatatccacccaatggtcatgtgccatggcaatcaaccggcatgaccgcctatgcgcgtagctcagctggtagagcggcggtctccaaaaccgcaggtcgtcggatcgaagccaaccgcgcaatccccagccgcgtctacgacatcctcaaatggttgggcctcatcgtcctgcccgcactcgtcctgttcgtcagcacggtcggccccgcatggggctggactcacgtggacgcgatagtgaccacgctcaacgcgctcggcatcctcgccggcgcgctcatcggcgtcagcgccatcaaacagcgcctcgacctcgccgcatgaccaccacgcacagttcggccccgtccggcatcgcagacgactcaacccgagtcggcctacttgccggtcggggccgttctcgcgttgtggcagagggcttcgcgggctcgatttttgcccacattttgcccacattatcccgtgaaaccgagagaatacgagggaatcgacgggaataagaaaagccgctcagccttactttcgtaaagccaagcggcttgtttccgccgaggcggattggtggaggcgcggggaattgaaccccggtccgatgaccgagcccacagtcttctacgtgcgtagtctgctggccaagttggcgatttttctgcccccatcgatgtcgcagacaactgatggcgagcatatccgcagttaaagtcccgatgcagccctgaggctcaactgcatcagcaagtcttctaaacgacgctcagcatcctcccaaagacgaggaggagtgaacggagcggctgctcactggttaatcctgactaaaaatcaggcagcgagagcgaactcagtgcggttagatttagcacttattcttttgccggggtcatccacgagcggacccggcgttctcggcacgcttccctgcagcgaacaggtcaccgtcgaaaccgatcgcccccaatcttgagttatcaagcttccggcttttcggccggactttttagcatacaccctatggcgctactcgcgcaaatcgccggcagcgaacatcgccccggcattgacgggaccaacgttgtcagcagaaccaacggagcgaacgccgccccggaaccaacggaaccaacggaaccaactgaatcgccgtcacttgatgatgggcttctgggatgcggaaacatcaatctgatgtttgccggcaaagccagccgtgccagcggtgatgttcttgtcgatttcctcgacttccgccagcttcagcttcagttgcgaggagtctccccaaatgattacgcggtcaccgtcgttaagcgtggtggtcaccgaatcctgcgtctcagcggtgaccttggtaatggacttacgcatcgattccggcaatgcgcccagaatcgtcagcgcctccttcaccgaacggttcttgagactggcgtctatatccttgacctcaatcaccgggatgccatccacgttggcgttcttcaccgagttcaacacacgcgcctgggaatccaccgcggtcagggtatcgcctcttttcagcatggccgcaggccgttgcgccttgacttccacgctcatcgacttggggaactgtttggagaccttggcctcgctgacgccgggaatggacttgagttgctctgtgacctcatgggtggagaccaggaacaacgactttccagcctgcttatcggcgatggcatggatggtctgcgcgctcacccattcgttggcaccggatacgccgatctcgctggtttccagacgaaacgccgacgagaagagcagcagccacgttagccccgtcactacagccacgctgacgacagcaatcaacacgcgtaacgcaacgacacgtacgttcgcacgcttgcgttctttggcgcgttcggtgaaattcaccactttcgggcgtgatacgactcctagggagccggtggtctggtgcagcgtttcggcaacgtaatcctcgctgcgcaaccgtcgtgcatcgacgaaggcaccggcctggcccttggctaccgtcacatcgtcgatgatctccggctcgtcgatctcatgcccggaagacacggaccggggagcgcgagacttcgacgagtgacccgtgtttccgcgtgaaccgatggtgcgcggcttgcggggacttccggacgaacgacgtgagccgttgtcattgcccccggatctgaccgtgcgcccggacatcactcgcagctttcccgatgggcctcaagtgcggtgagcagcacctgatccatgtcggtgatgtcgcccgcgcccacggtgaagatcacgtcgccgtggtgggcacgcatggccatcatcttggcggccaggcacatatcctcgaccggctgaatccacgtgcctgcggaagcgtccttgagtccctcagccgcgtccacgatggtggaggggctgatgtccgggaaatcggtctgcttttcacgggccgggaagatgccggtgataatgacgtcatcggctttggccaaggattcggcgaactggtgcgcgaagaacttggtgcgggagaacaggtgtggctggaagatcacacgaatggtcgaatcggggtaccggcgtcgggccgcatccagcagggccgcgatttcggtgggatggtgggcgtaatcgtccactacagtgacctgcttgaccgtgccgcgcacctggaagcggcgtgccgcaccgaggaatgtgccggccgccttggccgcgtctgcggggctcacgcccagcagcacggcagcgctgatggcggcggccgcattgcgcgcattgtgcacgccaggaaccttcagggcaacgctctgagacaccggctcccccgccgtcaccgcggccggcagatgcagggtgagctgttcgacgccgctgcctgcggtctcgctttccgaagcgatccagacatacgcggcaccgcccaaatcgggcagggattcacgcgcggtagtgccgtaggcaacggtatgggatttcacgtcggcgggcatggcctccagcacggcaagtccgtcggggtcgtcgatactgatgatcacgtgaccggtggcccggccggcgtgggcaacgaacgcggcacggtagtgggcttcgtcgccgtaatggtcgagatgatcggcttcacagttggtgataatggcgatggtcggatggtatttggcgaagctgccgtccgattcgtcggcttcggccaccagaatatcgcctttgcccgcgtgtccaccgtccagcgtggtgccgtccgggccttggataaagccgccgatggcgtagcttggatcagcaccggcgttcaccagaatgtgggacagcatggagctggtggtggttttgccatgcgctccggccacggtgacggctcgtttgccgttcatgagcagggcgaggatgtcactgcgatgcacaatgcgcttgcctgccgcgtgcgctgcgacgatttccggattgtccggtttgatggcgctggagtagaccacggtctcggcctgggcgacattttcggctcgctgcccgaattcaacggtgatgcccagcgtttcaagtcggtcggttttggcgctgtgtgcgcgatcggagccgtccaccgcgactccttcggcgtgcagcatttcggccagaacgctcataccggcgccgccgataccgatgaaatgggtggcgccgagatccgcggggcgggccgcagcatcgaacgaggcatacgtggggtcaagcacgatgggctgatcttgagacaattcaaaactcctttggggattccagcaccctatattatgaccgtatctcgtgctgcgggacgggattggtctgtatcgcgcacgggatgatatctgaatactatttggatggttcggctaattgcagaacgtgccgggccatgatttcggcagcgtttctgatgccgtattcccatgccttgcggccgaattcggcaagtcgttcgtgatcggcgagcagatcgggcacatgctcatgcacccactgcggggtcaggtccttgtctgcgaccagcaggccgccgccggcgttcaccaccggttcggcattgaaacgctgttcgccgttgccgatgggcagcggcacgtagatggccggcagacccagtgcagccagctcggataccgatccggctccggcgcggcaaatcaccaagtcggcacaggcgaaggccagatcgattcgttccagatattcggcggtatggtagtcaccttgtccggccgattcggggccgatgccggtaagcacgtccgcgccggccgaggccgtgaccagttcgcgtacttcgctgattttgcctcgcccggtcaagtggatgatttgtgcgtgggccaacaggtctgcggcggaggaggcgatggcgcggttcaggctttgcgctcccagcgatccgccagtgaccagcaccagcggacggttcggatcgacgccaagctgcgcggccgattcacggcgtacggcggcacgatcgtcaccgatgcgtttggtcagggaggcgatggccgggcgcaacggcagaccgacacgctcgacgtcggctccggcacgcggtttgagaccggtgccttcgtacacggtaccgatgaaatcggcccaacgagcgcccagtttattggccatgccggcacgcgcattctgctcatggatggcaatcggaatgcccatcttgtgtgcggtggcgtagacgggggcggaagcatacccgccgaatccggccacgacatccgcatgccgcgtttcaagaatggagcgcaccttggcggtttctcgcttccattttgccgggaagcgaagcatgtacaggtcagggcgacgcgggaacggcactttttcgatggtgtcgagctcgtagccggcctcaggcaccaaatccttctccaaacccaccgcagtgccgatgacggtgacctgtgccgtgggttcgatgtcgcgaatcgccccggcgaccgcgagcagcggattgacatgtccggcggtaccgccgccagcaagaacgatatgtggtgtgccttgattcatgattaccgagtctacttacgcgctctgacgcgactgttttatctgcggttgagaacgcataagtcccacaaccagtccggccgccgtcaagcacatgatcattgatgagccacctgcggagacgaacggcataggcacgcccaataccgggaacacacccacgaccacgccgatgttgaccatggcctggcccacgatccaaatggtgacgcacatcagcaccatggcaacataacgatcggtgacctgcaatgcgatgacgatcatgcaccaggcgagaatcgcgaagaacagcaatacgatggcgcaaccgacgaatccggtctcctcgccgatgatcgcgaaaatgaaatcgttatgggcggccggcaggtaattccatttctcacgcgaattgccgatgcccaatcccagaaagcctccggaggcgatggcgtacttggcgtgaatggactggtagcatacgctctgcgcgtcagcggccgagcaatcaccatatgtggccagaatacgacgcatgcggttcgggctggaaaccgccaatgcaccgaccataaccaccgcgcccaatacgccgattcccatccatttgccggggaatccgacgatcaggaaggccacgcctccgatggagaccagaatcatggccgtgccgaggtccttgccgcccatcaccagcgccacgcctatcgcatacaacaccaacggcgcggcatatgctttgattcccttcttgtggtacatcttgctgcaggcatgcaacgacgagggcagccatatgcacatcgcgaacttcatgaattcggccggctggatagtggtgaagccgaggttcagccaacctttgttgccgtagacgtcgatacccagcggagtaaaggtcagcgcctgcaacaggcaggcacccaccacaaagaacacgccggtccgtttccagaacgtcaccggcatcgtcaatgccacgaagcccagcaccaagccgatcaggcaaaacgcgccctggttcagaagctgaaggaacggcgacttgcccagtgcggccatggtgaccgtggagctggagaacaccatgatcaggccgaagcatgtcagccccaccacggccatgcggaatccgtggtagcaccatagcgggttgagcaagcttcgccaacccgtgtagtcggtgatctcgagtgcgggcctgtcaggggctctgtatgccttacgcttatgggtatcagtggaggccatgcacctcgctccacgtcttggctgcggcggcgaatcgattgcctcgatccgcataggacttgaactggtccatggaggcgcaggccggagccataagcacgatgtcgccggcggcggcatacgtgccgcaggcttcgacggcacgatccatgacggtatcgttgtcttcgggatcgatgatggtcaccgggatgtccggagcttggctggcaaacgcttcgaccatcggctgctggtctttgccgatgatgacggccgctttgatggtatgtgcctggtccttgaccaggtcctcgaatcgactgcccttggccagacctccggcaatccagatcacagacttggccgggaagctggacagcgaggcgcgtgccgcatgaccgttggtggctttggaatcgtccacgaaacgaacggagccgccctcgactgcggcctcagccacggtttcgatgcgatggccgcccggcttgaacgaggtaagcgccttcaacgcggtatctcgatcagcgccaagtcccagcaccaacgccaatgccgtcaatgcatcggccaccagatgcgggtacagtgagccgtccggctctgccagatgcgtgaaatcggtgatggcggccagtctgaccggctcccccactgcgccgccggccacgccgctcctgtccacgatccagccatcttcaatgccgatctgaccggcctggggggcctcgagcgtgaatcccaccttgcggcatccttcggcggtttgggcctcggccgccagttcgctgactttggcgtcctgcgcattgtagacgatggcgcgtttggcgttgtggaacaccttggatttgtcggcggcgtaattctcgcgcccgccatgccagtcgaggtgatcgtcggcgatattggtgatcgccgcgcagtcaagtgccagcgaatcggtgaagtgcaattggaaggagctcagttccacgcacagtacgtcgtgctgaagattggtggcgcaacgagacaggctcatgctcatgtctccggaggcgatattaccggcggtcggcgcgtcgagtccgcaggcggtgagcatttccgaggtcatctcggtggtggaggttttgccgttggtgccggtgatgccgatccatggagccggagtaccggtgcgctcgttattcacacgcagctgccatgcgaattccacctcgctcatcacggggatgccacggcgttgggcttccagcacgaacggggtgcgggggttgaacaccggggacgacatgacgtagtccacatggtcccagtccacgtcatcaaaggagcggagaccggcctcgggcttcctctcgtcgacgccaatcacgtgggcgccgcattccctcaatacctccgccaacgaggtgccggacacacccagtccagcgatcaccactgtcttatccgctacttgcattgttcctcctgatataggaattccgtgggtgagcataatcccacccagatttccgctagctgaacagcaggccggagcgggtgacccagtcgccgtagaaaatcgtcagggcgagcagcacgaagatgagttcgatcatccagaaccgcaccaccaccttggtttcggtccaacccttcagttcgaaatgatggtggatcggtgccatcttgaatacacgtttgtgggtcatcttgaagtacccgacctggatgacgtcgctcatggcttccatgacgtacagtccacccagaaccaccgccaggaattcggtgtgcgtggcgatggacagggctgcgaacaggccgcccaaggccagggacccggtatcacccatgaaaatcgatgcggggttcgagttgtaccacaggaagccgaagcaggcgacggccgcgcatacggcgatgacggtcagatcgagaggatcggacacggcataggaatagccgccatggctgccgcccttgatgtggtagctttcccagaatgcgatgatgccaaaaccggtgaaggcgatcatcgacgaacctgccgccagaccgtcaagcccatccgtcagattcactgcgttggtccatgcggtcatcaggaagttcacccagatgacgaacaggatgatggttacggcacggccggcgaagtcgaagttgaagaacggctgttcgatgaagctgatgcccgcctgcgcactggggaatcccgatttggtgggaatcagcagcgcaagtaccgcgtagatggtggcgaagatgaactggccgatgaacttgccgcccaccgataggccttcgttctgcttcttacgcaccttggcgaagtcgtcgataaagcccagcagacccatcgacagcatggcgaacagtacgagcaccgcggaccaggagggcacgtcgcccgaacgcaggtatcggtacagtgcggaggatgcccaaccgagcagaatcgcgaagttgatgaccacgccgcccaacgtgggggtgccgcgcttgaccagatgcgactgcggcccatcctggcggatgtactggccatagtgcagcttgtggaccagccgaatcagcagcggggtgccgactaaggtgacgatgagcgacaccagcattccaatgatcagagcaatcacgtgcagcttctctttcttgtcggtttcttggggtggttatcgggtcagttctttgcccagcgttcagccaaagcgctcaggcctgacgcgtgcgatcccttgagcagtaccacagcgtcggaatggttgcgcgccaagtcgataaccagctgttcggccgcatcgatgtcgtgtacgcaatccaccgacgcggattggctctgacgggcaccgtccgccagagcctgtgccagtgcatcgagatgttggtcttgggcggaaccgaccgcgatgatcgcgtcgatgcccaattcggccgcatacgtgccgatagaggtgtgcaatgccgtctcatcggcgccgagttccagcatggcacccagcagcgccacgcggaacggatccttgccgtcatttgagttccaagccttcaacccgttcaggccggctttcatggagtcgggattggcattaaaggaatcatcgatcagtgtgaaggaagtcccctcgcgattcaccgtggacaatgccatgcgatgagggctgatggtgtgctgcgaggccagaatccgcgccaccgtttcgggtgccataccgtaacgcatcgccacggttgcggcggccaacgcgttcatcacgttgtgacgtccgggaatgcccagatgcaccggcgtatggttgccgtccgcatcgaccaacgtgaattcagcatgatcggaccggtcggcagtgacatcaatggcccgcacctcgggctcctgcgacgatcccaagccgaaccacagcacatcgccgctggccaagccggccatgggaaccacgtgtccgtcatcggcgttcagtaccgcggtgcctccgggaagcagtccctgcacgatttcgctttttgcctgtgcgatgcgttcgcgggagccgaattctccaaggtgagcgacgccgaccttcaatacgattgccgtgtttggcggtgcgatacgggtcagtcgcgcgatttcgccgatatggctggcacccatctcagccacgaagaaccgggtgtgctcatcgacccgcaacgcagtgagcggcaggccgatctcattgttgaacgatcccaccggagccacggtcgggcctacggtggcaagcagggaggagagcagatccttggtggtggtcttgcccaccgaaccggtcaatccgatgatgtcgaagtcgccgtccagctcgcggcggcgaacgatgttgtgtcgggcgagctcgccaagggcgtcgaccgtgtctttcactacgatctgcggcaggccatcggactccacctcatggtcgacgatggccaccgtggctccttgtccagcggctttcgccacaaagtcatgcccatcgacacgctcgcctcggatggccacaaacaccgatccggggccggcctgccgcgagtcactgaccgtattggtggatcgagactcagaatcggcgtcgccgatcaatcgaccatcgacggccttggcgatctcctccacgctcatcggaaccatggtgtttcaaactcctttacgattacgcttcgtcccgcatccacggacttaattgagattattggccacatgcagggcactgcgtatgttgtttttcctcacgccggcggccagtaccatggcgatggccaaggacatgtgcccgagtcggacgcggtcgtacatggccggtgaatccgcagccatttcatccgattcgggtgtcgacgaggtcatggacatgtcatgttccgcaacgaatgcgtagcgtgtcttcaattcgttcaagcttgcgcttgcgttgacatcctccgtgcccagtacatccacgttcaccgattccaacgcatgctcggccaacgtgcggtcatccatggcgatgatcacggccgccacaccgtcttcggcgcacacggacagcgcgcgctgcatatcgaggatgcccagaggatagttcaggttcatggtacgtgtcatcgacgtggacccggatgcggtgattaccgccaccggattgcccagcatgtgcaggaattcggagagctgggacacgcctgcgtcgacggcctgctcatccgcaccggtcaccgcgaacaccgccatggcattggacggtccgccggccagaccgctggccagatcgccgagtacgcgatcgtcgaaatcgccgtagagcaacggtatatcggcattggcgatctgccctttggacgcgcgtggcagcaacgccgcataggcaccggcctgtgcggcatgcagtacatcgggttcctgctcatgcgtgcagatgaacagcgagccgggaatcacggtgtccacggcatcgctgagtgaggtaatggtgacattggtggcgaagggtggatcgacttcaaaaccgtaccgttcgaccagcattcccagggtcacccgctgggcgatggattcgctcactgcactcatgggctatcgcctttctcccctgatccttaccacgtgactggaatagcatttttgcgtggactggagacaggcacctcgtatttctgcataaggaactcacaaatctgtgcggaaacagggccggccgtcagaccgccgaacacaccattcggatccttcatcaccacggtgaccgcatagcgcgggttgtccgcgggaatcaccacggaataatcggagataatggacgagagcgtaccatccgagccctgcacctctgcggtactggacttggcggccatgcggtaaccatcgaccttgacgaacttgttgtagccttccgccactgattccatcgcattcatcatgtccgatgcgaccttttcatccaccacgcgggtggcttcgcccttcttggtctcagtggtcttgccattggcatcggtggttgatttgatgatcgactgctgctgcttgacacccttgttcgcgatggtggccaccacgttgttgagctgcagggcgttgacggcgtagccctgaccaaacaggatggtgttgcgcgtacgcagatcccacgccgaagggttggtgagcagaccgctcgattcaccgggcaggttcagtccggtcggttgtccgatgccgaatttggtcaggtactcgtagcgttgctcatccggatagttctccccggccataatcatgccgacgttcgatgagttctgcagaatgccggcgagcgtccagcgctcagtgccatggtcgaatgagtccttgtaggtctggccctcctgtgtgatgtggtccgggaccgacaattgatcgctcatcttatgcagtcccatctgcagatagccggacatggagataaccttgcccaccgaaccaggctcgaaggtttcggacacggcccgagacgggctcatcttcgccgcatcggtaccagcctgtacttcatcgctatcggccagtgcgagaatctccccgctctggacatcctgcaccacggcgatcgcccacgctgcaccatacttggattcggcctccttcaagacctttttgacataccattgcacatcacggtcaatggtcagggtgacatcgtcgccatttttggccgccaccgattcggtcatggtgccgggaatctcttcgccgccattaccacgctggtaggtttcatggccatcggttccggtaagcgtcttgttctcgacctgctcgatgccggcgacgccatcgccgttgtcgttcacgccgccaagcagcgcgcccatgagatcgccatccgcatacagtcgttcactgctcagctcaccccagacaataccgcccaggtgcaacgcctcgatgctgcgcttgacctgcggagtcacatctttcttcagaatcacatactgcccggtaccggacagatcagcgcccagttccatggcgttcatatccaggactttggccagcagtcggcccacggccgccgctccggtagcgcccacgggtttgccgtcaatttcgtggcagtaatcacgggtgttgtcattgcaagtaatcggctcgaactcctgtgcagcctccggattggcgacgatagtataacgctccacgctttgagcgagcacggagccgttggcgtcgaggatacgcccacgcttggcgctcaacgtcacggtcagggtgcggttagccgtggccgcttgtgcggtttgacggccgccgatgagctgggtggaggccagctgaatcacgcatgccgacgccaccaacgccaatgcggcgccgatggcgatgcatttgaacgcgaaggtcttgaccttggcgaactctacgatgcgacgaatggtgttcactgggttccgcctttgttggactggtatccgcttaagtcgatggacactgatcccggctgcgggaccatgcccatgtcgctggccttgtcgggcaggttcgcgactaattgatcgagtttggcctgatcgtcttcgatatcttgggtaagtctgttgatattggtttcgatctgtgccgcctcaaacgagttctgcaccatctgggtacgcagcatcagcgcgccgaacaaggtgccgacgaggaagatcactgcgatggccacgtgcaccagcggtgcgcttcttgttctggtccattcgatgacccgtccgacgacattgccccgctcgtctccacgcgggttggagaccacccgcagctcaggtcgggaggaggactgatgcttggtgtgcggtcggttcgaggccggagccgcgttcgatcgaatgttacgtgcggttgccatatgccgttatcccctccttgtacgaattcgcgctgtgtttttggctctgcccggagacgcggagccttgtatcttgacgtcattcaggccctgcgcggtttgcgtaaagcgtttcctccatcgtgacggaatctcacggctgacttccaccgcccgcaaccgcaccgaagccgatctcgggttggctgcgatttcatgttcgtcggccttgatggcacctcgcgtgagatccgtgaaaaacggttgggcatccggcggtatgacaggcagaccagccggaacatccactcgcagcccttgtgccatgaacgatttgacggttttgtcttcgagcgaatgataggactccaccaccagtcgtcccccgacatgcagtcggttcgcggcttgcggcaatgtggaggcgagcttgtccaattcgccgttgacttcaatgcgcaacgcctggaagacgcgtttggcgggattgcccgccgggcggtgggcttgcggcaccacttcatcgaccagacggttgagctgtgcggtggtggtaaacggctccttgtctcgacgtgccacgatggcgcgggcgatctgacgcgagaaacgctcttcaccgtattccttgaatatacggaccagttccgccgcatcataggtggcaagaatccgttcggccgtcaacggctggctgacgtccatgcgcatatccagcggcgcatcatgcgaataggagaagccacgatcggtttcgtcgatctgcaggctggataatcccagatccatgaatacggcgtccacacgttctatgcctcggtccgtcaacacctgatcgagctgatcgaaggcggcatgcaccgggatgaatcgatcggcgagcccctcccgttccatgcgttcggtggccagccccagcgcttcactgtcacggtcaatgccgatgagccgagcctgcggcgcggctttgaggaaggcgatggaatggccggcaaggcccagggtgcaatccgctgcgatggcgttctcatgttccagggcaggcgccatcaggttcacgcaatcgtccagcaataccggcagatgaatattcgccacatcaaccatcagaattccacctccggcaacacatcgtcagcaatatcggaatatccctcttccttctcggcgaggtaggactcccacgtgtccttattccacagttcggcacgggtgccaacgccgatcaccacgacgtcggaacccagattggcgtaatcgcgcagcatctgcggcaccagcacgcggccctgcttgtccggctgctgatcgacggcaccggaaaggaacacacgcaggtattcgcgggcggctttgtttcccaccgacacacgctgaatctgcgaggcgatacggcgaaattcatcgaacggcagcaggtacacgcaccgttcctggcctcgggccatgaccaggccctgccccagctgggagcggaatttggccgggagcgccatacggcctttggcgtcgatcttcggcgtatatgtgccgagaagcagcggcggcagaccagccatgagatcagccatagtggtggagccttgtgcgttggcatcagcgtcgcgaatcgtctgatcggcaaccatggctccacctccttcatcgttacgtgggatacacttcggccaactggttcaccactctaccccacgattccccatttctccccactcatgcacgatttgctcacccttttagggcaattaccgatggattgcgcgtgtcggccacgactgtcgcacgaatgggcgctccgcacatccaatccacgttgcgcactccaccgaccgagcagcatggcgaattcacgctgaattcacctattccgggttgtccgcatcactgacgtagggggtgtgcggtaaatttgaatgccttaagttttttctgccccacggaaatggaacgaagagaacagcatgtcgagttacgcctcccagctgcatgaggagcagcaggccgtcgatcgcgcctatggacgattggatgatctgcgagccgaaatgtggcaacgcctggacaccgtacgcgccgccggctcccacggatcccccacgcaacgcagcgaacgagactcctttgccacaatgtacgaaaaccgcctcacgcaattgcgcagcgttgaggatcggctggtgtttggtcgtctcgacgccaagaacggcgaccgtcattacatcggccgcatcggcctgtcgagcccggaccatgagccgattctgaccgactggcgtgccgaagccgcacgtcctttctatgaggcgaccccctccaatcacggcgacatcgtgatgcgcaggcatatcaccttgagtttccgcgaagtcgtgggcgttgaggatgaggtgctcgacgtgcattccgaccaagtcggccaggcgtcttccgccggcacgttgaccggcgagggtgcgctgctggcttcgctgagctcacgccgcaccggcaagatgaccgatatcgtggccaccattcaggccgagcaggaccgcatcatccgctccgacatgaatcgtgccgtggtggtgcagggcggtcccggcaccggcaagacggccgtggcgctccatcgcgccgcctacctgctgtacacgcaccggcgcacgctggaacgttccggcgtgctggttgttggccccagctcggcgttcctgcactacatcgatcaggtgctgccctccttgggcgagaccggcgtggtctcacgcaccatcagcgatctgattcccggcatcaccgccacggcggtcgactccccttatgcagccaagctcaagggcgatcgacgcatgacctccgtagtggccaatgccatcgccgcgcgcgtgcgtgttcccgctgttctgccgacagtaaccattagcggcattcacgtaccaatgctggccactgatatcgagcaggcgcaggcggacgcgaagcgcacccggcaacctcataacaaggcccgcgagacctttatccgttcgatgctgaccagcatgcagaaccgttatgccgaacagcttgattacacgccggatcaggcggagctgaaccgcgcgatgtcgttgctgcgtatgaacgagcaggtgcgcaagaccctgaacctgtgctggctgccgatgaccgccccatggctcatcgatcagctgttcgcccatcccgaacgtctgaagtctctggctggttggctgaccgacaacgacatcgcggcacttgcccgccccaagggctccccgctgacccgctccgatattccgctgctcgacgaagcgatggatatgctgggccccgatcccaagacggtggcccgccagtccgccgccgacgcacgtcgtgccgccgaagagcagtatgccaaagacacgctggccgcgaccggtctgggtggaggcatcgtctccagtcagatgctgctcgaccagatgaacggggacgacgccgagctgaccgcgcagcgggccgcggccgaccgtgaatggacctacgggcacatcgtggtcgacgaagcgcaggaactgaccgccatggactggcgtatgttgatccgccgttgcccctcccgctcgttcaccatcgtgggcgatgtggcgcagacctcggcgctgggtggcacccgacgctggagcaaatcgatgaaccgcctgttcggcgaaagccactgggatctgaacgagttgaccatcaactaccgtaatccgcaggaagtttccgaactcgcctcacgatttgccgagaaggaaggcctctacatctccacggtcaatgcggtgcgcaccatccccgattcggtgtcccgcaatgtggtgcccgacatgtcgtccttgctggaaacgacggccgagcaggcggcgcagcttgccgaacaattcgtttcggcagacggcaccggccgcatcgccgtcatctgtccggatgatctcatcgccccggtgcgcgacgccgtgcgccgcaaactggccgccgttcttgacccggccgaatacgcaaggctcatcgagcagcccgaatgggatgagcaaatcagcgtctgcggcaccgaaacggtcaagggtctggagttcgatgccgtcgtggtggtcgagcccggtctcatcgaggatgacgcgccgagccgcctggtcgccgcctcggacctgtacgtggcaatgaccaggccgacccagaaactggttatagttcggacaagaacggacgaaaagtccctgaacatctaaggtatgaagcatgcccaaagcactgttattggaaaacattcaccccgacgcggccaaatcgctgcgtgatcacggtttcgaagtcgagaccatgaagggagccctgagcgaggacgaactcatcgacgcgctggatggcgtggacttggtgggcgtacgctccaagaccaacgtcacagcccgcgtgctggatgcgcgtcctacgctaagcgccatcggctgcttctgcatcggcaccaatcaggtcgatctggcacatgccggcaagcgtggcatcgccgtgttcaacgccccctactccaacacccgttccgtggtggaattggtgatttgcgacatcatctgcttgatgcgccgcattcccgcacacacgcatcacatcaagcatggcctgtgggacaagtccgcttccggctcgcatgaagtgcgcggcaagacccttggcatcatcggctacggcaacatcggctcccagctgtcggtactggccgaggccctcggcatgcgcgtggtgttctacgacattgaggagaaactggcactgggcaacgcccaccgttgcgataccctcaacgaactgctggaacagtccgatgccgtgaccctgcacgtggatggccgcaagtcgaacaccggcttcttcggcgaagaccaattcgcccacatgaagcaggacgcgattttcattaacctttcgcgcggtttcgtcgccgatctgggagctctgaagcagcacctcgattccggccatctgtctggcgcggcggtcgacgtgttccccgttgagccgaagaagagcggagatccgttcgagacctcactggccaacgaagacaatatgattctgactcctcatattggcggctccaccttggaggctcaggaatccatcggccatttcgtctctcagcgtcttgaggattactggttcaagggttctacctcattgtccgtgaacctaccgcagatcaacctaggtgaacgcaagggcgtgtgccgtatcgcccatctgcacgacaatcttcctggtgtgctggctcatgtcaatcgcgtgctcggcgaagagaacatcaacgtttccttccagtcgttggccaccgaaggcgaacttggctatgtggtcaccgacgtggctcagaagcccagcgccgccacgcttgaagcactacgcaacatcgagggcaccgttcgcatgcgtgtcatcagctgacgcagctcatcctcgattgatatgaaagagacccgtcgctgtgaactgcgccccgattgttggacgtggtttattaagggtacctgattaggctgtgagggacatgttccggaattcctccggggtgtgtccctccagtcgtatctggcggcgtttggtgttccagtggatgatgtacgc

SEQ ID NO: 150 - DNA, 29307 bp, Unknown
  R206_24m  MAG No. k141_48718
gaacggctggatggccttcctcatgagcttccagatggtgttcttcgcctatgagctgctcgagttcgtgggcgtcaccgtctccgagaccaagaatcctcgtgaggtgctgcccaaagccgtcaacgagatcatcgtgcgcgtgctcatcttctacgtgggcgcgctcgtggccatcatgtgcatcgtgccgtggacctcgttcaagccgaacgaggacggctccttcgcctccccgttcatcatggtgttccagtatgccggtttgaactgggcgtccgccctggtgttcttcgtggtgatcaccgccgcgtcctcgtcgctcaattcgctgttgtattccgccggccgccacctgtaccagctgtccgaggtgtcgccgaacccgatgctgaacaagctcggcaaggtgtccgaccgcaaggtgccggcccgcgccatcctggtgtccgcggcgctgatcctgctgtcgccgatcgtcaacgccatccccggcatctcgggggcgttcgtgctgttctcgtccgccagctccgcggtgttcctgttcatctacatcctgacgctgctggcgcatcgcaggtatcgccgttccgccgatttcatcgcggacgggttcgtcatgcccgcgtggaaggtgctcaatacggtggcaatcgtgttcttcgtgttcatctacctgacgttgttccttgcggacgatacgcgcaattccgcgattgccggcctggtgtggcttgtgggcttcggtggattctctatgctgcgcgaacgctaccgtagccgcgatttgaaggccgcactggaacacaaggagtgattggacgggctgattggttggcggctattagttgggtggctgttggctgttggcggctgactggctagcggccgatagccaatgactgggctgatcgtcagccaatcggctgcctataggtctcattgatacattcggtcatccgattagtgcatttgcgcggacaattagtgcattcgatcatcggattagtacatcagtgtgcaattattagtacaattagccgcctaattagtacattaggacataaaacaatgtcctaatgtactaattagatgctaaaatacgataagtgccatgtcctaatgtatgaattatcgctatgaagggcggaatgcgatgacgcaggatgaacttatgcaagtgctgcaggccggtgaatcatctatggtcgagttcaagcgctgcagcgaattgcctcatacggatacttttgagactgtatgctcattcgccaatcgttctggtggcagcatttatcttggcgttgacgatgacggtcaagtgctcggcgtcgattctaagcgcgttagtgagatagagcgcaacgttgtcaacgtagtgtctaatcgtaagatgttcgaaccggctccaatggtggaaacggaacatatcgagtacgacgaacggattattgttcgtatttgggtagctccgagttcttcggttgtgcggttcaagggcgcagtgtttgatcgcattgctgatgtggatacacacatcgaaagcgatatccagattagtcaaatgtatattcgcaagcagaactactattccgaacggcgaattttccgttacgtgactccgtttgatttgcgtcctgagctgattgcgcgaatgcggcagctggcggtcgctcagcgagctgggcacccttggggaactatgtctgacgaagaactgttccgcagcgccaagctatacgatcgtgattacacgaccggcgaagagggctttaatcttgctgcagtgctgctcttgggcaaggatgaagtcatttcctcggtttgcccagcgtatattactgatgccgtggttcggcgagacaatattgaccgatacgatgaccgacttatggtgcggaccaacttgttcgattcgtacgagcaactccgtgaatttactgagcggaatctgcctgaccgctttgtgttaaagggcgataagcgagtgagcccgcgtacgatgatcgcccgtgaattggtggcaaacagcctcatgcatcgggagtattccagtccggtggtggcgcgtgtcaccattgataatgaatccatccggacggttaatgcttcgcgctcattctttgaaggtcgaatgaagctgggcgagttcacgccaatgccaaagaatccgattatcgctaatgtgtttgtgcagaccggcatagccgagcagctgggtagcggactgcggaatctgataagagcgtcccggcaatatactgagcgagagcctgagttccgcgatggtgacatattcgaggcgacgattcctattgttcctgcgctgaagaccgtggatggttctggttttgctagcgtgagatctgtagttgagaaagatgccgaagagggtgcgaggctcattggcggggaacgtgtggatggtaagaaagcagatgcaaccgcatcgggtgaaattgattcgcgggcagcgatgctgtcggcgatgaatcgacgcttgacagaggttgactatgtgactgtacctgaactcgccaagataacagagctcgataacagaacagtccgcaaattcctaaacggtttagttgcgcaaggaaagctgattgctgaaggcaacacgcgtggtcggcgttatcggaagggatagcgggcgcgatatctcgatgcagtgggattcacttaagggctacggcaaatatgattcgtagcgattgggccagcgcaattcgaatggctcatgactttgtgcgtcgtttgtggtctctgaagttgtttgctgggtgacggttttgtgataaaatcgctcatatcaaaatgtttgcgtaaacattttggctgcgccgaaagaaggagtcgacgtaggtcatgtatcaggcaaagaggccggcgcagtgaagcaaaggccgatttttccggtataaggcggatagcaggaacactaaggagaccaatgaaggtactgagcaaatcgcttgctgcaatggttgcggcggcaacactggtgggaggaggggcgtttgcggttgccggcactgcgtatgcggctgataacgatgccattaccgtgaccccgaacccgtggtatgccaacagtttcgatggctggggcacctcgctggcttggttcgccaacgccaccggcagcctcggcgaggaatcggccatcaccaccaatctcggcgatgacgcttccaaggctaaggctgtggaatacggcaaacagctgcgcgaacagttctaccagtccatcttcggtgatgaaggactggacctgaacatggcccgctacaacgtgggcggcggcaatgcctccgatgttgcctacggctacccattcatgcgccaaggcgctgccgtgcctggcacgtggaaagatgacgccaccggctccggcacgtatggcaatggcgtaaccaccaagcaggccgacaaagacaagctggctgcggcattcgacccgactgacgacaaccagtatgacttctccaagtccgccgcccaagactggtggattgagcgcggtgccaccggcgataaccctgacgtcaccgacgtagaggccttcgccaactccgctccgtggttcctgaccaacagcggttacgccactggtggacgcaactccggtagcaataatcttgcaaaccctgagaaattcgctcagtacatggccaagaacgtcgagcacctcgaaagccttggcgcaaacgttgacacggtcgagccgttcaacgagtccgagaccagttactggggcactccgggcgacatggcttcgaagtacaccgatgagagcgatgacaacaccaagctcattaacaactactgggataagtactactccgacaaagataagtccgtcaccccatactccaacgcgctgaagaagccgcaggagggtatgcatgtcagcaacgcccagcagcagcagacgattaccgcactcgctgaggcgctcaaggacaatgatgacaccatcatcgcagccaccgatgccacgaactccgccgacttcgtcaagtcgtacaaccagtacccgcaggcgatcaaggaccttatcggccagtacaacgttcacgcctactccgacagcaaccagatgcagtcgcgcgatatcgctcaggcagacggcaagaagctgtcgatgagcgaggtggacggctcctggcagtctggctcctacaacccgtacggtttcgacaacgcgctgggcatgatgagcaagatcagctccaacgtcacccgcctgcagtccaaggacttcaccttctggcaggtggtcgaggacctctacaacatgcagatgggctcgaatgtgaatccggccggtgagaacaccaactggggcaccgtgctcatcgacttcgactgcaccgtggctggcatggacggcaagctctactccgagcgccgcgtgaacaacaacggcggtaccaccgatggacttgaaccgtgcacggttattgcaaacgccaagtacaacggcgtcaaggccatcacccacttcatccacgcgggcgacaaggtcatcgccaacaacgatgaagacaacaacatgactgccacctccgacgatggcaagacacagaccgtcatccaccgcaactccggcacctctgaccagaccttcgtcatcgacctgtcgaagtacggcgagattgccgacaacgcttacggtgagctctacctgaccaccgaaacctctgccgaagacaagaacgcgggtgtcgattccgccactccggaagtcttcgccaagaccagcaacgtcaagcaagctgaaggctctgtgatgattgacaaggctgccaagaccgctacggtcactgtgcccgcccgttctatcgcctccatccagctcactggcgtgaccggctacgccaaggatgctgccgtcgagaccggcgacacttaccagctcgttggtaagcagtccggcaaggccgtggctgataccacttctggtgattccgcgctgtccctggccaacgtcgcttccgatgccgagaacgccaagaagcagacttggacctttacccagatcgagcagcccgccgactccgagcgccctgatctcaaggcttatgtgattactaacgccgaaggcaaggtgctggtgtccaaggatggcacgaacgcgctttccaacgaaacggttgaggccgctaagtccgacccggctgccaagtggattctcaacacttccgatggttcgacctaccagctgctcaatgccgcgactaagacgaacctcgatgtggataactctggtaccacagtcggcacgaaggttggcttgtggcagtcaccgagcggcacttcgccgtccgccaaccagacatggactctacgcaatgtaacgccgaccagccagaagaccgtgaacgtgcagaccgccgttaacgagaaggccgcgctgccgaccgaagtcacgctctactacacctggggcgaaggcaaggccacggttgccaactgggatacttccaaggtcgatgtggccaaggaaggcacctacgaagccaccgctaccgccaccgatgtgtacggcaacgagttcaatgtcgccgctacggtctacgttggcgcgctcaccgtttccgatccggtatcggctacagtgctggccggcaccagtgcgagcgaggcgaaggccgcgcttgaggctgcgccggtgtatctgcacgtcaaggcatcgcctgcattcgagggcgatgcggctaaggttacgtggaacttcgatgggcttgataccaagctcgccgatgccaaggctggcgacaacattgccgtgaccggtacttaccagctggacgacgcgaccacgattgcgctgaagggcgcgatctatgtcaccgccgccacgcctgagaatgtggccgacactgcttccagcctgaccgtgaccaaccagcagacggaatacagcaagggcgatcagtggaagaagctcaccgatggtgacacgtcagctgaagcctgggtgacgtggaactctgctggtgactattccgccagcccgaccgccacgattgacttcggctctgagtgtgagcttagcagcgtgaccattacgtatggtgacaaggctccggcttccgccaaggccgagtacaccactgatggcgagacgtggatgcaattcggtagcgatgttaagcctgccgcaggccagacggtgacgttcaaggccgataagggcacagtgaatgccacgaaggtgcgcattgtgaacaccgtgaacaacgactacatgaacgccaccgaaattcaggcattcgtgacgccggttcagggtgctgcgaagaacatcgccgcggcctctggcacgaacttctcggtgaacttccaggagggtgcctccgcttccaaggccatcgatggtgacactacgtcaaagggttggtccacttgggcttccaccgcctcgacggtggacccggtcgccacgttcaccttcgacgaagctcagaccatcaccgaagtgaagaccttcttctactacgatggtcgtgcgtcttggccgaagagccagacgctggaataccaggatgaggctggcgaatggcatggagtcggtaccaaggatggctggaagatacaggccggcgatgccggctctggctccgacggcatcaccgccgccgacaccccgaccgttgacttcgtgctcggcaccccggtaaaggccaaggccatccgcctgactaacacattgcaggacaccaaggtgtacatcaacgtggctgagatccaggtgttcgcacaagacagcacggtactcaccccgcagccagcatccgatgccacgctgggcgacctgcgtcttgacggcgaaaccgttgaaggcttcgacccggccaagaccgactacacggttgatctgccggtcgacgccgaggcaaacccggtgctgcaggccttcgccaccgacaatgccgccgccgtcaaggtgactggcgacgcggttgagaacggcaagcttggcggcaaggccgccattacggtgacctcagccgacgagtctgagacgaagacctacacggtgaccttcaacgccttcactttggcttcgctcaaggtgatcggacccacgaagaccgagtacgccatcggcgacaagctcgataccgccggtctgaaggtgactgccgtctaccagagtggcgacaagaccaaggaagtgccggtcgctcttgacgacccgcagcttgcgattggctcgttcgactccaccaccgcaggcaagaaggcgattaccgtctcctaccgtggtgtgaccgcgaccttcaacgtcacggtcaaggccaacgcagtcgcccctggccctgaagaacagaagcccggcaacaccaacaagcccggtgccaccggcaacggcaacaagaacacggtggccaacaccggttccagtgttgccgccatcgctggcgctgtcgctctgctggccgctgccgcgggtgcactgttcatgctgcgcaagcgtgcatagcaccctcgcgcagtaatgggtgaaggaacaagccggcaatattgactattgccggccggttcctccgctctttgaccataattggtccgacaagttgaatactgagttttcagtatcggtatattgatttgtcgaaccttttctggcttcgcggatagcgacataactgtttgttcaaaaaaccgttatcatcaatcaaggaaccaaatcaatgaagataaacaataagggcaagggcgctcttatcgcggcaattaccgccgcggcaacgctattgtcatgcgggctggccgctgcaagtgccagtgcggcaggtgtggattacctgcctaccatcggccaagtgccgacatacaccaagttccagcccacagccgatccgggcaagaacgctagcgattacttccagccatattggtatgccaagaacgccaatgataatggcggcacacacatccaagcgcacggtggccaagtggtcaaggttggcgacgcctactactggtatggcgaagaccgttctaacggttacgacaacagccccggtgttcatgcttatatgtcgacagatctatacaactggaccgatcttggtgtggcgctgcgtgcggtgaccagcaaatctcagttgacggataagagcaatgccgattacgcctatttcgacaaggcctacaacctgaccaagtccgacggcagtgtggacgctgccaaggccgacgcaatcttcccgtacctcaacaccaaccccgatcaggatggtgatggcgcggttgattccgtacagggcattttcgagcgtccgaagatcatctacaacaagaagaacaagcaatacgtgctgtggtggcattccgatggaagcaccacgccgggcggttccaactatgcacgtgcacttgcgggcgtggctgtttccgacaatccggcgggcccgttcactatggtgggtgcctatcgtttgcctaaccagaacaattggaaagaagccgcaggtaaccccagctggggtgagaacggtgacagccgcgatatgactgtgttcgtggacccgaaggacgacagtgcctatgtactgtattcttccgaagccaatgccacgctgtacatcgccaagctcaacgatgattacaccaatgtagtcaagaccacgaatgtggaccagtccgagggacaaaagcagtactctgctgacgggcagtacccatacattcttgcagacgctactacggatgccccggtgcgtggcgaagatttccaaatcgtcaaacaaaatggttcgctggaagctcctgccgtattccaatatgacgggcgttacaacatcatcgcatctggtgcaaccggctgggccccgaacaagcagacctactacaccgccgactccatgctgggaagctggacccgtggcgtggaaaaggacgatgtcaacgagaacacgtggtacaacaacatgccggaaggcgcggatggtctgttgtccgtgggcgatacccgcggcaccacattcggttcgcagtcggctagtgtgctcgcagtagaccaggagaaaggtcacttcatctaccttggtgaccgttgggattccggtaaagccgattccacctatgtttggctgccgctgaccatcggtgagaacggcgccatcgaaatgcacaatcctgctcaagaaggcgagcccgacggttgggatctgagctattggggcaaccatggtagcgccaagggcaagctggtcaactggactgtggaaaccggcgatgatctcccgaagaccgtgaacacgggcggaaccgttactctgccggacaccgtcaacgtcaaggaaggcgacgataccattgctaccaaggtgacatggaatgtggaaggcggtacggcagtcagcaagtcgaccaaggctgctggtaacacctacgcattcaatgtgccgggaacctacaccattacgggcactcttgccgagagcagtaacttcaatccgggccgtacattccgtagaaccatcgatgtttcctgctccaacccgatttccggaagttggaaggaagctcattggaagggcggcagcgcgtgccaggtttctgcgtccggcggtgcttatgacttcacgattacggacaacgccaatcgtggcgtctggacggatcgcaacgagggcagtgcggtgtaccagcctgatgctctggacgtgaacgaaacgctggaaaccacggtcaagccgctcgacttgggcggtaatggcgatccgcgcgccggtctggcggtccgtaacggtcttactggcgctaacggcggcaagggatatgccacgttacttgccagcccaagcggcgtttacatgcagtacgattccaatgccgatggctacatcgataaggaaacatcgcatgttggtaccggcttcggcgaccaagtgcagctcaagctggagcgcacctcaaccgatactctgaaaggctactggcgtgcttccgcgaacgatgaatggcaggatgtcgctacggtaacgctgaccggtgcggacgtaaccgggctcgatgccggtgctttcgccacgtcgaacagcaatgccggcgcattcaccgtggccttcaacggcactgcgttcggttcgcagactgctgctgtggagtccatcgcggccaagggccctgaagccactatcgccaagaggcagacgctcgcgcataaggacgtgacggttaccgctacgctcaccaatggcaagacgcgtgtactggagccagatgaatacacgttggaaggcttcgacaccaccaaattgggcgagcaaaccgtgacggtacgccttgtcactgattcttcagtaactgccacgctcaccgtgactgtggaaagcaaccttgcccggttgttctgctcgtccgccgcagcctcgaagtatgagccggccagcagctgggcctccgcttctacggccgacctgacttgcgacaacaatctgagcaccaactggtcgaactggggcaccggcgacacctcgccgtggctcagctacaccttcgataaggcatatcagctgagcaagctcagcgttgcggtggataaggccaagggcgaggccgctccgaagagcttcactgtatcgtacctagctgaagacaacgccacgtggactgatgccacgctgccggcagtcactgtgaatggtgctgctggagccgtgacggaagccgatgtgagcgctctgcccgccaccaagggcattcgcctcaacttcacctacgccgatggcaatgactatgccaagatcgctgaagtacgcatcgccgaaggtgaagcaacgccaaagccgcagccgtctagtaacgccaatcttgctgatctgactgtggatggcaagacggttgacggattctccgcggatatcaccgaatatgccggtgcgctggccggagacgctgcttcttacccgacggtggaggcgactgctgctgacgcgaaggctacggtgcaggtggagcaggcttcgaccgagaacagcggcgtggccacggtgactgtaactgctgaggatggcacggcggaaacctacacagtgacattcggcgaactgcctcagttggccgagcttgctgtggaagtgaccaaggattcctatcaggtaggcgataagttcaacgctgccgatgtgaaggtatccgccatttacaaagtcggcgataccgaaacgctgcgcaagctgattgatccaactgatggtgatctgaagttcactggctttgattctgccaccgcaggcacgaagaccatcaccgtctcttatcgtggcgtgaacgcgacgttcgaagtcacggtcacggccacggaggtcactcccggccctggagagcagaagcccggcgataccaacaatcctggcaacactgctaagcccggtaacactgccacgaataagccggctgctaatggcgctgcgcccctttcgaatacgggtgttgccgtggctgccattgcggtcgtggttgtggtgctgacagctgcggctggtgccttgctcgtcatccgcaaacgccgcgcataaccatggcaactgctgagtggcgtggattgcgttgctattgagcaatctgcgattcacgccactcagcgagtgcacccgagtgcgcccgagcttgcgcaatgcaggcgcaatacagtgcaaacagtacaaagcaacaataatggccggtctgagccagctgctccatgcgagggcagctggctcagaccggccattgtgtctgcaagtacatgcaattagagcatgaacatgtggaagccgttgagcgttactggttgttttgctttgttgttgcgctcagcagtgcgacggacgtccgtccgcagtgtagtgcagcgctccgtgaaccagcgccgatgtgaaatgcatgttgcacatgcccgcttcttctgcttcgtgcgtgcagccggcgatgctgcataggttcataccccgaatcatggtcataccccctctttgggatggcatccgtgccgccatctgccttcagagcatagcggacaattgttgcattgcctaggcggtacaacgctttctgtggcctgtatcacatccttgccggcgttctgcggcgtggttgggcgtgtacatgtgctcttgtgtggttttgttgtgtgtgatttgggtatacggatagagtttcttctctgcagtggcaagggcctctcggccggcgagccggctgatttctcccatgcgttgctcaatgatttccgttttgcgagtctgaacggcaaaatagctctggagaagtgccacttcttctttctttggatcaccgttttgagcaatgagatagcaggcgtatcgggtgagcttgacgtccgcgatggagcgggtggcaccgctgccgagagtcacgtctcgcgtagtgtcacggaaatgggattcaacggatacgccggaattgtcgcaagcttgcttggctcgtgtaatagctttgctgaagttttcccatctgtcgtaccccatataggtcattagctcgcgtgcataccaatactcaactttggagtcctcggtggtgtgtgcgatagtgctgagttcgctggttttgcgtgtgatttcgtcgcggttcatgggtgtgtccttatgtttttcatgaccattttcgtgactccacgaaaatggtcaaagccaataattgcaatggttttgaggtatgggcgcgctccgcccaactggtctgtcttcgtccgccttttcgaccagatacctcatggagcacaatgccaacgtcgctaccgttggcccagcaaatattcttagacgacgccccgaagtgaatatctatgcggctttcagaatatcaaagagcgtggagtgtgtgcattatgcgttccaaaaatagtttctagtaatgaattgtttacggtgtgagatattcttggggtgtttgcggcgctctgccgtgtggcgaatgggaatggatggtgctcttatgggatttgagcaggaagcagttagtgaactgtatgccagcgtgtggggcaatcgttcgacaatgcagagggaattcactcgtggagcccatggtgagcagttcgtgctccgggagctgtccatgaaggggacgcaaacgccatcgcaattggcatcggcgctgcaggccagttccggccgcatctccactgtgctgtcgtctctggagaagaaaggctgggtcacgcgtgacattgattccaaggatcggcgcattattcgcgtgaatctcactgattccgggcgcgagcagtctcatcggatgatagaggaaatgcgttccgcaatttgctggattttctcgcaaatgggggagcggcgcacgcgcgaattcgttgacctggtgtctgagttcaccacatatatgtcgatttgccatccggggcggcctcggccgacggctgaacaagtgcgtgaggcattcgtggagcgggacaagcgcgtggctgaacacatggcagctaagcgcgcggaggctgagcgagactagcttcctcccgctggcgggtctctccctccgtcgctgctgcgcggtgacgcctccctcgtcagagggaggtaaaggtgattgaggacgctcacagcgaacatacagaagtgcgtataatatctcacagtgtaagtaatcaaacaatggaaactattaagacatcgtgaaccgataatcaccgataacccagccaccttaagaaccaatcgccaataaccaataaccaacccaaccaacacaaggggaaaccaatgtttcgcatcatgaaatacctctccaaagcggagatcggtcagatgctcatcgccctggtgaccatcgtcgggcaggtctacttcgacctgaaactgcccgactatatgtcagacatcaccacgctggtcgagacgccgggcagcgacatgaaggacatctggatcgcgggcggcaagatgctgctcatctcgctcggatccgtggcgtgtgccatcatcaccggctacatcgctgcgcgcgtggccgcctcgttcacccagcgtctgcgctcgctcgaattccgcaaggtcgagtccttcggcccggccgagatgagcaagttctccaccgccagcctcatcacccgttccaccaacgacgtcacgcaggtgcagatgttcatcaccatgggcctgcagctcatcgtcaagtcgccgatcatggccgtatgggccgtgtgcaagatcgccggcgaaggcttcgaatggacgctcgccaccggcatcgccgtggcggtcctgctggtgtccatcaccgtcatgatggccatggtcatgccgaagttcaaggtcatgcagaccctgaccgacaacatcaacctcgtggcccgcgagaacctcaccggcctgcgcgtggtgcgcgcctacaatgccgaggactaccaggaagccaaattcaccaaggccaacaaggacctcaccgagacccagctgttcaccaaccgcgtcatggcgttcatgatgccgttgatgaacaccgtcctgaacggcctgatgctcgccgtctactggatcggcgcttacctcatcgacgccgccgggctcaaggacaagctcaccgtgttctccaacatggtcgtgttctccaactactccgtgcaggtcatcatgagcttcctgctcatgagcatggtgttcgtgctctggccgcgcgccgacgtgtccgcgcagcgcatcatggaggtgctcgacactgagccaatcgtcgagaacggcaccaaaaccgccgccgacgtggccaaaaccggccagaggggcaccgtggaattccgcaacgtcagcttcacctacccggattcgcgcgaggcgatgctggaaggcatcaacttcaccgccgagcagggccagacggtggcgttcatcggctccaccggctccggcaagtcgtctcttatcaatctcgtgccgcgcttctatgacaccagccaaggccaggtgttggtcgacggcgtggacgtgcgcgactacgacctgaaggccctgcgcgacaagatcggctacgtgccgcagcagtccgtgctgttcaagggcaccgtggcctccaacgtgagctacggcgatcagccgggcgacccggcggaggtcgagatggccgatacctccaccccggccgggcgcaagcgcgaggccgcgttgatcgccgctggcgaggccgcggaaggtgccgatataccggccgagcagctgaatcgcgtcaaggccgccgccgacgtggcgcaggccagcgagttcgtggcgcgcatggacggcgggtattccgccgcgatcgcccaaggcggatcgaacgtgtccggcggccagaagcagcgcctgtcgattgcgcgcgcggtgtaccgtcacccggaaatcctgattttcgacgactcgttctccgcgctcgacttcaagaccgaccgcgaagtgcgcgacgcgctcgcccgcgaggccaaggattccaccaagctcatcgtggcccagcgcatcggcaccatcatgaacgccgaccgcatcgtcgtgctcgacgacggcaaggtcgtgggtcagggcacgcacaaggaactgctcgacaactgcgacgtataccgccagatcgccgaatcccagctcagccagtcggagcttacggcgtaggggggcggcagcggtagctccccatgtcaggggctgagccgtaaagggaacagcccagtgggctgttcccaggcgaagacgagctgataagcgagcgaataaaacagcacagctgactgaggggtagtcgcgtacggcttctctccctccggcgcttcgcgccacctccctcatcagagggaggtcaatacggacttttaaggagtaaaacaaatgccaagaggaccaatgggcggcaggcgtgccgtcgaaaagccccatgatttcggcaaagtcatgggcaaactcgtgaactactgccgcaactatcttcccgtcatcatcatcgcgctcatcctgggcgcggccggcaccgtctgccagatcgtcggcccggacaagctcaaggacatgaccaacgagatcgtcaaaggtctgcccgccatcgttaacggcagaccggtgatgaactcggtagatttcggcacggtgggccacatcgcctggactttggtggccctgtacgtgggctacgccgtgctcggctacgtgcaaagctggatgatggccaacgtcacccagcgcaccgcccagcgactgcgcgagtccatctcggtcaaaatcaacaaactgccgctcaaatacttcgacaaggttagctacggcgacgtgctgtcgcgcatcaccaacgatgtggacgccatcggccagacgctgggccagtcgctcggctcgctgattacctcggtgacgctgttcgtgggcgcgctggtgatgatgttctacaacaacgtgatcatgaccctgtgcgccatcggtgccagcctcatcggcctgatcatcatgatggccatcatgaagtcctcccagaagtacttcgcccggcagcagatggcgctgggtgacgtcaacggccacgtggaggagatgtacgccggtcacctcatcgtcaaggcatacaacggcgaggccgattcgattcgtcgcttcgagaagtacaactcggacctctacgagtccggctggaagtcgcagttcctctccggcctgatgatgccgctcatgaatttcgtgggcaacttcggctacgtggtggtgtgcgtggtgggcgcggcgctcgcgctcgacgggcagatcgagttcggcgtgatcgtggcgttcatgatgtatgtccgcctgttcacccagccgttggcgcagttcgcccaggccttccagaacctgcagcgttgcgcggcggccgccgaacgcgtgttcggcttccttgaggagccggagatggaggacgaatccggcaagtccgctttgcttgggaccaacggccacgaagtgaagggcgacgtggaattcagccacgtacagttcggttacgaaccgggcaagccgatcatccacgacttctccgcctccgtcaaggccgggcagaaggtcgccatcgtcggcccgaccggtgccggcaagaccaccatggtcaacctgctcatgcgcttctatgagatttccggcggctcgattgcgattgacggcgtggacaccaagtccgtgccgcgctggaacgtgcacgaccagttctccatggtgctgcaggatacgtgggtgttccgcggcactgtgcgcgagaacatcgcctactccaagcccggcgtgaccaacaagcagatcgaggatgcgtgcaaggccgtgggcctcgaccacttcatccgctcgctgccggacggctatgacaccgtgctcgacgacaagtcgtcgctctcccagggccagaagcagctgctgaccatcgcccgtgcgatggtgcaggacgcgccgattctgattctcgacgaggccacctcctcggtcgatacccgcaccgaagagctgatccagaaggccatggacgcgctgaccgtggggcgtacgagctttgtgatcgcgcaccgcctctccacgattcgcgacgccgacatgattctcgtcatgaaccacggcgacgtgatcgagcgcggcacgcacgacgagctgctggcggcgggcggtttttacgccgacctctacaacagccagttcgcactcgctgactgacggattgtttcctgcgttagcggattagctatactcggctcccctctccgaggggagctgtcagcgtagctgactgaggggagcaacccatcggtccacccgagggatgtgatactgatgatttcgtacattagtgtgtgaaaaagccgccgggaaaattgggggattgggcggcggtgcggttggcgttgagaatggcgcattcgaaggggaagtgagcgcgcagctgggtggccggggtggtgaacagggcggtggcgaggccgtcggccagtgtgacagggacgtgtgccgcaacggtgttcgacgaatcgtcggtatcgcggtttgccgttgtcgaggcattgctgccatgcgtcgatgtcttcgtggttatggcgctcgatggcggcgtgacggccacccatgtggcggctacatcgtcaaccggtagtccgtcgatggcgttgagcagatggtgaagttggtgacctgcggcgtcagaccagtggcggcggctgggggagctcgcgcagaatgcgccgtggctgatttcgaccgtacctacggcgttggccggatcggcaggatcttcaagggcgatggtgattggttcgtccgtgtgcactagcaaatcacccccggcgtcgatgacgtattgaatgggttgagggtgacccgcgccatcacccaacatccccgcaagcaaatccaccaaataccccttaccgcacgcgccgaaatcgagcgcgaccggtccgcgcgtcaccagtgttgtgccatgccgctcaacgtcggctgaccaaatggctcgtccgtggatcgcgcctgcatgttcagcggcatcgggcgcaggcgtaaacgaatacgactcgtcatagccaagccgaatcaaatcctcgcccacgcatgggtcgatggtcccattagtcgacacaaacagctggtcgtacaggccaaataaacccaatgcccagtcaggaaaatcgaacgtgccgccatgcgtggccgtgcgcatccggccgaccgtcgaatcatccttgaaccgggacaatgcggcttcataggtgctgatgaacatatcgatgcagttactgagcccgtcgtccagcgcgacatcggtatgcagcagcaacccggtgcccagcgcttcggggaaagcggcgacgtgcggtagtcgttcggccagaccagtcatggctctcatcgtagagcctgcggatggctgaggggaaggcggctcggggtgtggattgtggtgtgcggttttgccctgcagggaattgagtgtaaaaccccggtgtatactggtttttgacactgtgtcaatgttgattcggaggttatggggaatgggcaatacgactacagcaagtgtaacgggcgcgcaagttgcaccggcgaaatcagccatcaaagatctccccatcgccaaagtgtgggcgtttgcggtcggccagttcgggtgggcgctgctttccggcatcatctccaactggctcgtgtatttctaccaacctgaccaggagaccatctcccaaggtcagaccgtattcgtgccgcagggcctggtcgttctcggcatcgtgaccgtggtgggcggcatcaccgccttcgcccgattcttcgacgcgttcgtggacccggccgtggcgtccctctccgaccgttgcgacgccaaatccggccgccgtatgccgttcctgaaattcgccgccctgccgctcgcggtggtcaccgtactcgtgttctggagtccgatcaacggcaccggctgggtgaacgcggcgttcctgttcgtcaccgtgatcggctactacatcgtcctcacgttctactgcacgccgtacaacgcgctcatcgccgaactcggccacgactccaagcagcaactcaccatctccaccgccatctccttcacttgggtggccggcacggccatcgcgtacgtggcgccggtgatttggggcgcgttcgtgccgatgatggggcgtatcaccgccatccgcgtgaccttcaccatcatggccgccgtggcgttcgtgtgcatgctggtgccgccgctggccatccgcgagaaggactacgtcaactcccagcccacctccgaatcggccatcgaatccctgaagcagacgttcggcgacggcgaattccgcaagttcgtgtgttccgacgtggtctactgggtggccatcaccaccttccagaccggtctgccgttcttcgtgaccagcctgctcaagctgccggaaaccaccacgaccatctacttcgtgctcatgaccggcgtctccgtgctgttctatctgccggtcaatatcttggccaataaggtcggcaagaagcgcctgctgctggttgccttcgtgatcttcacctgtgcgttcgcatttgccggcgcccttggttcggccgcgctcggcttcattccggcgatggcccagggtttggcgctctcggtggtcggcgcgattccgatggccgcgttcggcattctgccgcaagccatcgtggcgaatatcgccgacgccagctccaagaccaccggccaggaccgtcagggcatgttctacgcggctcgcacctttgcgatgaagatggggcagtccgtggccatgctgctgttcaccggcgtctccaccatcggcatggcgtccggcgcgggctatcgcatcgccgccgtgtgcgcggccgtgctgtgcggcttgggcggcatcgtattcgcgttctacaacgaaaagaaggtgttgagcgtgttggaagcgtgattggggctgccgaagcttgattagcgggtatgcctactccgcctgctcgcccggctcctgctctgttgcgtcctgctgcaagatatccagcgttcgctcgtgcagtagctccttatggttgctgtcatgctgcaggaaatgcgcgtataggatgtccaggtaaatgagaatcggaaattgcggagagatgaccttgcccgcttcgatgttctcccgaagcgccagcagcaccacctcatcgcagtattcatgctgttctggagatttatgggaagtcatcagtactgtccttgctccggactccttggctttgcgcagtgccttgatcaccgccggtgtcttaccgctgatgctgatggcaatcaccaaacaggtgtcatccaacaggacggaattcatcatcatcacatcgctatcggtgatggcggtgatgatactgccgatacgcatgaaccgcagttgcatctcctgcgcggcaaggccggagctgcctcgcccatacacgtagatgcgctgataggtggacagcatgtcgctgagtgcgttgatctggcgctcgttgaccagcgcatagcttttgtccaacagttcctgataagagctgagcgcctgcatcgaccactggtcaggcactgtctgtgcagtgtcctcgcgcagatcttccttgtatttatagatgaattcgcgatacccggcaaatccgatcttcttggcgaaacgggagagcgacgccagggatacgtgcagaatatccgcgatattgggtgccccgaaatccatacgtcggcggttatggatgaagaagtccgcaacgactttctccgtaggcgacagtgtggcgtatacggcttcgatctgcggaatgacgtccttgtcaaaatgagccatgtttccgactttcttgcatgtaccggaaatgatagtacgcaccaagcataccagcgcggttccggtgatgtgcaaaacgaaggcttgtggctcgggccactggtttgcgtaggttatcgtcgagggcgcgcctgatgggaccgcccaaatagtcactttgggccatgatgccgccgccgaggatcacgacctcggggttaagcacatagcagatgttggctatgcccatgcccagataggtggtcatggtgttgatggcttcggcgcagtcggtgtctccctgctgggcaagttcgaatattcgtttgccggacagatcttcggcctgcatattcttgcgcgtggccaccctgcgcacgagggcggtggttgaggccaggtcttggaagtccccgcccggcaggtgaatgtagccgacttcgcaggcgctgccgcccgcgccgtgcagtacgcgcccgtgatcgatgtacgagcctccgataccggtaccaacggtcaggcacagcgctgttttggcgcctcgcgcattgccggcatgatattcggcgagacccgcacaattcacgtcgttttcgacttcgcagggcaggccggtctgctgttcgatcatcgatttcaatggggtcccggtgtagcgcggaatgagttcgctggagtaagcgatgctccccgtggcgcagtcgaccatgcccgctgtggatacgcagatgccgtataatggcgccgttgcagcatgggagaggtcctcgatgagccccaatacggtgattacgatgtgcggaccgccttgatccgcatgggtgggggtggaatcatgccgtacgaattgctgcgaagcgtcgtcgtagattccatatttgatggatgtcccgccgatgtcgatgcagatatagtgcgtcatgatttcacccctttccctctgattgcacagcttacagtgccgcgattgcctcgcggatacgggccgcagcctgctgggcgatgggcaggtcgtcttcggtaaggttctccagcggcttgcgcacgccgccgatgttcacgttttcgttgatgcgcagtacctccttcatcactgcgtacaggttcgcgtggccgctcaccatcagtgcgatgatgtcgttgacttggtactggatttcgcgtgcgcgctcaatctcgcccttgctcaccagctcgttgatcttgagaatcagctccggcataacggcgtaggtgccgccgataccgccatcggcacccatggcacggccgctgaccagctgctcgtcgggaccgttgaacacgatgaagtccttaccgcccatggccttgaagatctggatgtcctgggtgggcatggaggagttcttgacgcccgccactttcgggttcttcagcatagtggtcagcagcgagggcgtgagcgcggtgccggcgagctgcgggatgttgtagatgatgaagtcggtgttcggggcggcggcgctgatgtcgttccagtatccggcgatggaatattccggcaggcggaagtagatcggcgggatggatgcgatggcgtcgacgccctgcgcctcggcgtgcttggcgagttcgacgctgtccttggtgttgttgcatgccacgtgcgcgatgatggtggctttgccgcgcgcgactttcatgacgttctccagcgtgaccttgcggtcctcgacgctctggtagatgcactcgccggatgatccgccgacatacagtcctttgacgcccttgctgatgaggtgttcggtgagagcctgcacacgttcggggctgatctcgccgtcatcgtcatagcaagcatagaaggctgggaagatgccgcggtacttgttcggatcgatggtcatggtgttctcctttgttggtgggttggttgtggtgttggtgttggtaaacagtgttgttggcgtaggggcctattgataggggctacgcgggggcgagagccgcggcgaaccgtttggtgatgagctgcgggcgagtgatggcggaccccaccactacgctgtggcaaccaagctcaatgacgcgtttcgccttgtccggtgtatcgatgttgccttccgcgatgaccggatgcttgactctggctaggatgtcgcggatgatacggaagtcgtcctcatctacgcgatcgccttggctttcctcggtgtatccgatcatggtggtgccgatgaagtcgaaacccagctggtcggcgtgggcggcttcgtccactgtggagcagtccgccatcagtagctgatcggggtaggtgtgtcggatttgcacgacgagatcgtcaaggctttggccggcgggtcgggggcggtcggtggcgtccagggctatgatgtccggtttgactgcttcgagctcgtccacctcttccatcgtgggggtgatgaacaccggggagtccgggtagtcgcgcttgatgatgccgatgatgggcaagttgacgcgcagtttgatttcccgtatatcttccacggagttggcccgtatgcctttggcccctccctgagctgcggcgtaggccatttttcccatgatgtacggggaatgaagtggctcgtctttgagcgcttggcaggatacgatgagttgtcctttgatgttcggtggtggtttcattgcccctcctttcgtgtgccatcatcgtaaagcactggaaatcgatttgtaaagttcgaccagccaaaaaagagtaaatagaaaatacttaccatgtaggtcgtggtgtagtctggctttaaatggctgtttatgattatttttgggctgatctatgttgttgcagctgaaagttctacccacttcgttagtctaagtggaaattatttgcgctgacggataagctaaccgagtacggacgacatgatcgccgcccacagcacaaccgatgtgcacgcggcgaacataacagccctcgatggtgagggttcccatcacatcacagacgaacaggagggatggcggcatgaggagagaacgaagtgccataatgtccagggatacgcggttcgcgtatttgattaatatcccgttgattatctacttggtctgcatgttggcatggcctatttgctggggcttctacaccagccttaccaacaagaccatcggtggcggcaacggcgcattcgtgggattaaagaactacatcaatctgttgatggacccttcataccggtcatctatcgtgaacaccctggtgttcaccgcgatctccatcagccttaagctggtgctcggtctggcgatggccctcgcgctgaacaccaagttccgtggacgcaacatcgtgcgagcgctgctactcatcccctggaccctgcccaacatcgtggcggtattgaactggcgctggatcttcagctccacgggcggtatagccaactacatattgaccacgttgggcatcgcagaccatgatctggtgtggttcggcagtcccaaactggccatggccaccgtgatcatcgccaacgtgtggcgcggcaccccgttcttcgcgatatccattcttgcaagcctgcagaccatctccgccgacggttacgaggccgcgtccatcgatggcgcgaacatattccagcagttctggcacatcacgcttcccgagatccgtgacaccatcctgttgtcgacgctgatgtcgaccatctggacgctcaacgaattcgaatccgtgtggctgatgaccggcggcggcccaaacggctccaccgaagtcatgaacgtgttcagctaccagaccgcgatgaagagcatgatgctcggtaagggtattgcggtatccattctggcgatgccggtgcttattgcactgatcaccgtactcgcacgacacatggtgcccaaagacgggcgaaggtaaggagattacgatgagagaaaccaaaggcgtcaaaatcatcagccgcatctacatcattatttgtctgatcgtcgctctcggcccgatttactggatgatcaacacctccctgaaagggcagtcggagatttatagccaaaagccgaccttctacccgcataagccgacgttggaatcctacaaatacctcattcaggacaccaacttcctgcaggccgtgcttaacagccttatcatcgccgtggtggtatgtgcgttctccattttcgtggcgtacccggcggcctatgccatcgcccgcgtctcattcaggggcaagcgcacgttctccaaaaccatcctgttcacctacttgctacccacggccgtcatgtacatcccgctgtacctgatgaacgcgcgcatcggcgtgacgaacagcatctggggtcttgcgctgatctatccgaccttcactatcccctatgtggcgtgggtgctgatcccgcacatccaggcgattccctgcgacatcgacgaggcagcactggtggatggctgcggacgactgcgcatcatgtaccgcatcatcttccccctggcgttgcccggaatcatcgccaccacgatcttcgcgttcgccatgtgctggggtgaatacatgtacgcgttggtgaacatcacatccacctcccaacagaccttccccttggtgatagccggactcatattcggcgacatgtatccgtggggccagctgacggccggcgcgattctggcttgcgtgccagtggtcatcatctacatgctggcatcgggatccctggtcggaggccagaccgagggaggcgtcaagggatgatgaataggaaaggcacaaccatgaaaaccatgaagttcgcggccgcgggccttgccgcagccatgctgctgccacttggcgcatgtggttccgcttcggacgccaacacgctcaccatctgggtggagaaagtgttcagcgagaagtcgaacgaggagatgaagcagcgtatcgaaatcttctccaaggaaaccggcataaaagtcaattacgagttcatttccgccacggactatatgaccaagctcaacgccaccatcgaggcggggcgcggcattccggacatcaccacgtccgccgtgtccaaggtagtgaactattaccctggcaacccatacatggatatgaccgacatcgtggagcgcatcaataaggaccggccgtatctgaagtccgtgtacgagggcagcaagattgacggcaagctgtatttcgcgccattccgcagctcgtcgacgatgatgttcatccgcatggacaagctgtacgaggctgggatctacgaggtgcccactacctgggatgagctgttcgaagtagccgagaagatcagcgatccggcacagggcttctatggcctgggctggggctgcggttccacggatgaggacggcgacaacatcttccgcaacatcatgtggaaccaaggtggctacatgttcgataaggacggcaacgtcaccatcgacaacaaggtgagccgcaagctgatgcagcagtacaagacgatgtaccagaacaaggtgataccgccatcagccagcacttgggattccggcggcaacaacacctcgtacctcatgggcgaatccggcatcatcttcaacgcgccgaccctgtactactccatggcctcggacccatcatatgagacgctgctcggcaataccgccgtagtgaacctgcccaagggcgaggacaacgatgtgaagatgtcgttcgtcaccggactgtcgattatgaaggccagcaagaacgtcgacgcggccaccaagctcgtcgaatacctgctggacaaggactggtatgacggcttcctggaggagacggcccccgtgttcgcccccgtattccaggattccgagcaggtggacgtgtggcagaaggacgtcaacgccgaagtgctcaactacgtcaagacgtcggagggctactacggataccccgcacggtctaccgccgatcgcgccgtggcagccaagaacatgttcacctacccagaagcgaagatgctcaaccagatcgtcacggtgaataccagcatcgatgacgcgctgaaagacaacattcgcaagattgacgagcttaagtcgctgtttaccgagcagtgacgacagacgggcggcatcaatagtgccgccaccttgctcgcaccatcattcccatatcaatcatcacaagattcacaatataaaggagcaatcatgtcgaacatcaccatctggctggatctggaccccgacaaggtggacgtcagctacctgcagaacaagttcaaggaagacggctacaacctcatcgccgagcagatcgatttcgccgatgaagacaagaccatcgagatgggtatgaaggccgacgcagtgatcagctcgtccgaaccatggaacgagcgcacactgagcgccgtcaagggacaggtgaagtacatcgtgcgttacggcgccggattggataacatcgatctgccgttcgcggcctccgtgggtatccccgtgggcaatgtgccgggcgccaacgccgcggccgtggccgaaaccgcgctgctgcacatcctcaacctcgggcgtcgtttcaccacatgtgttgacggcgtcagcaacggcgtatggccgtcgaccgtgaccggcaacgagctggacggcaagaccgtgggcctgctgggctatggcaatattggccggcagctggtgcgcatgatgcagggatttgatgtgaacgtgttggtctacgatccttacctacgcgaccgctccgacgcgaacgaccgcctgcatttcgtgggcagcgccgaagaggtctttcgcgccagtgacatcatcagcctgcatatcccgctgaccgacgagacgcacggttccatcaacaaggagaagttcgcgctgatgaagccgactgcttatctggtcaacacatgccgtggtggcgtgattgatgaagctgatctgattgaggcggtcaccagcggcgagattgccggtgctgggcttgacgtgcttgtgcatgagccgcctgagaaggatgatccgctactacacctgccgaacgtgttcgtcacctcgcatatgggcgcggcctcgatggaatcggaatacaggtcccaagtcatcatcgccaagtgcattgaggaatactttgccggcaagatgccgtacaacgtgaaaaacatgtgagttgcgcctgcaccaccggtggtcaggttggcgggaggcctgccgttttgaggggcatcccattgtctgtgccactggtggtggcaggtctggtcggccttttgaggcgggccgtgacggtggatgacagacgactggtgaagatgagatgggtctgattgtggcgggtcgttgctgaagggctcgccacggaagaaaggatatgagcgtgtcggagatcattattgttagggatgaggctgaggccggtgagatctatggccgttgtgtggcggacctgatcaaagcaaagccgaatgcggtgctgggacttgcgacgggttcgagcccgctggccgcctatcaggcgctcgccaagatcgtgcatgacgagtcaatcgacgtctcccaagtgagtggctatgcgcttgacgaatacatcgggctgccgctgacccatcccgagtcctatcatgcgaccatccatcgcactgtggtcgagccgctcggcctggacccggccaaggtccatgtgcccggcgacgtactcaatggcactccgctcgaagacggcgacaaagtcgcgctggccggcccggcctatgatcgtgccatcgaagccgctggcggcatcgacgtgcagatcctcggcatcggcaccgacggccacgtcggcttcaacgagcccggttcctcgttggcctccggcactcgcgtcaagaccttggccgaacagacccgcgtcgacaacgcgcgcttcttcgacaacgacatcaaccaagtgcccacccactgcatcacgcagggtattggcacgatcatgaaggcccgtcacctcgtgctgctggcgttcggtgccggcaaggccgaagccatcgaggagacggtggaaggcggcgtgtccgcgttctgcccggcttcc

SEQ ID NO: 151 - DNA, 61955 bp, Unknown
  R206_24m  MAG No. k141_49236
gcgtacatcatccactggaacaccaaacgccgccagatacgactggagggacacaccccggaggaattccggaacatgtccctcacagcctaatcaggtacccttaataaaccacgtccaacaatcggggcgcagttcacaaagaggggagctctattgtttcgcacgcaaaaatcacagacagactattgccttgcgggaaatcatcgttagattggcgagaggaatattgtcaatgcatacgaaacggaaaacatcgtgaccgcaccgaacacgcccgccgaaacctctgaccagctcaacaagcccgccaaatccggcaaactggaggtctccgacctcatcaccatcggcgtgtttgcggccctgtacttcgtgatggtgtgcatcgccacactggtgagcaccgttgtagatgactttgttttagcttgtcgctagagcgaagtcatctgcatggcctcgttgccgaggccagctccaagactcacacggcttacgccgtcgcttggttcgcgtttcacaggatgccgcgttgcccgacgcgatgcgtcggtccgtcttccgcttcctccgcgcgcgtttaacgtctccggggcactcccggcgacttggatgttgatggccgcgttcagatcgcggtcgatgacaagcccgcactcctcgcagtggtagacacgtttggacagggacagtttggctttcaccgtcccgcagttcgaacatgtcttgctgcttggatgccagcggtcgatgacgtggagcctcgcgccggtgcgtgcggtcttgtattcgagctgtcggcggaactccgcgaacgcggcgtcctctaccgagcgggcgagcctatggtttctcaccatgcccgccacgttcaaatcctcgatgccgatgtccgcgtaggcgcgggcgagcatggtggtggtcttgtccagtaggtcgcggcgtaggtccgccacgcgggcgtgcagacgcgcgaccctcgttctcgccttgcgtcggcggttggagcctttccgtttgcggctcagattccgttgggctttcttcaatcgtccgaggttcgatttgagtgcgtgcgggttgtgtattatggtgccgtccgacaatgtggcgagttccttcacgcccaagtcgatgccgacgctcccgcctttcggcggcgatggaaccggcaggtcggcgcgttcgacggtcaggctggcctgccagcgtccaccacgcttggatacgctcatgcgcagcaccttcgcgccgttcactcgcttggacacgttctccatgcagtgcacgcggcctatcttcgggagccgcagcgcatgagggtcacagtcaatgagaccaaacgagcccgtcgtgtacgcgaatccgggaaccgccctgtccttggatttgaagcgcgggaagcccatcctgcggcctttccgctgccccttgcgggacttggagaagttcctcagcgcgtcggccaatgattcgaggccgctgttgtacgactccttgctgttctccggccaccacggcttgccggtctccatgctgacggcgagggcgtccttgttggcgttccaccacctgcgcagcgcgtagtacgaccattccggcttctcctgccgtccaagcatggccttgacgtgcgccagtcccgcgttgtacgcgaaccgcgccgcaccggcatgggactccaagagtcgttcctgccgtggcgtcgggtcgagcgccaccttgaccgcctcaagcatcacgcgccgccctcaacgccgcgtccgtcttatgcttggcggcacgacgcccgtacagtcgtgcgcagaacgaggtcagcacctcggtcatgtcgcgcaccaagtcgtcgtccggctccgtgtcgtccaccacgatgatccggcgtccctgcgccttcaacgcgctctccaccagtcccgcgttcatgcgggcgagcctgtccctgcgctccacgatcagcgtgcccacggtcgggtcggacaatagccggttgagcttgcgccgcttgtcgttcatgcccgagccggtctccgtgaccacctcggggctcttgacgcccatgttgatggcgaacgccttcaaccggtcggcctgacgtcgcaaatcgtccttttggtcggacgagctgacacgcgcgtaacacaccgtcctgccgttcgccgtgggggcggcgggctggttctcgtatttcgggtcgtggatgataatcgtgcccgtgttcatgcgctcgaacgggacgggcatacggttctcgcgacaccactgccacaccgtctgctcgttgaagccctcacgcctcgcccattccctgacacgcatgacttaattatatcacacgaaaacaaactaaagcaaataatcaatctagcaggttataaccctgttcaccagcggcttcggctccatcttcctgcccgccggacgctcgatccgcgcgcgagactcttccttctgctggtggcgaacctcatgctgttcttccatgtagggctcgccacgcaaatcgtcatggtcgtgctgttcctgttgcccctgctggcggccgcccgatggcgaaccgcgttgaacttcggcgtgacctatgccgtactcaccgcgctgggaatgctcgaccccgatgccctgggactgccgtggctgcatgtggtctccgcgctggccgtgggcgtcacgatgatgctgccctgtttcatcaccgactcgcatggctcaacggcgtggccgaccggtacgtggtattcgacggcggacatatcgtgcaggattacgaggccgatgaattcctgtccctctcccccggctgcgtggccgccatgggattgcgggcgtttgacttggaaccgtatcggcaccggattgcggccctggcttcaagcccggccgccgaatccggctccacggacaatgcctcgctcgccatcgaatgggtcgccgaggacgacaccagcctcgacacttacgaatacgccatcgaccatgtcatcgagcacgggctcgaaagctcccccaccttcgtactccgcaccgctgatccggccgccgaagacagcccgttccgctggctgctggccatcaaccctctgccttcgcgcaaggcgttcgccgagggcgggctgctcagccacctgcatttccagtacgccaacgatctgcacacgctcgtcgccacggatgaggccaccggcaccgagaccttgcgcaatccgcgttggtacgcacaccatgtgcgccaacgagggaaccaccgaggaccgttgcgccatcatccgtgcgttgcaccacttgcagtagatctggcaacatacggcggtatgacggctccccgctagtgaaacagcagcgcttcagtagccgtgcgagtgcagatactcgtcatcgaagccgaaataatggccgatctcgtgcaacacggttttgcgaatctgttggcgtagctcggcccgtgttgagcatacgcgttcatgcgaccccttgaacagggtgatgacgtccggcatcacgccgctgtagcccgtggttcgcttcgtgatgggtatgccctcatacagtccgagcagctcaccgcacggattgctcattgtggccagttcgcgctcattgggctcgtccgcaacgacgatgccgacattctccagcacccgcgcaaaccgttcaggcaaatcatccaacacctgttcaatggcccgttcaaactcatcgtcaccgatgtgcatactcaatccttcacctgttgcttggcccccacgataacagacatattccgggttccggcttcttgcgggtgccataacgttgcgcggaacgcttccaatcattcattaggtcgattcttcattcattaggtcatgaggctgcgattgtcggtgttggaatggcaccattccagtggtgactgtcagagctcaccgacctaatgaatgaagaatcgacctaatgaatgcgtccggtcatatctcattgtgaaaatgacccggtattgcggtattccgcaattgcacttccaacgattctgaagtattcatccagattctgcgtggtagcgaacgttcttcttgtggcgggaaaagtcttatagcccgcgaaggagaggttgttccttttctcgatatctccttcccatcggtttcggtcatagtggtaccgtccgtcgtattccagaatcacatgatcattcggatacaccatgtccacaatcacttctttgttctgcaatgggaggtatatcggagcattcacctccaattcgggtaatccacgttttaccgattcaaggcgaaggatgctttcctgcggcgaatcggtgttctctctgcacaacgagagcgctttgcgaaataatctgatacctgggaatctacctatatcggcgaggaacaacgatatcttgtctttcgttgtctgtttcaaatgctcattacggcaggtggcccaatccaaggcaatgaccatactttccacatcgacgaactgtgcgatctgacacagcgcctgttccactgaaaccacggcgataagatcatcaatcatcgtctggtcaatgccatgaccccaataatggcattgcgtttcggtgagattcgacaatctttcagccccggacaccgtaacgtgcagtttgttggggtcatagttgggcttgtaattcagcgtggccgtcatgccagcaagctgtagcctggtgccatggctgaagcaaagctcctgtgaagtgcgcatcgatctggcacggcattgttccagtgttttctgggcgaggtctcgtgcctcatcaagtgtgaagaacgtgttgtatgcataggactccatgccatccccctgatggttgtatccgtgaaccgcgttattcacggatacaactcacgatggcataaccaacttctgcgcgcaaccagctcggccgaatcggtggatatgtgtataacctgccagctcagctgttgcggttgatctcgatgtcggtgacggtgaggttggcctcgttgatcaggttgaagaggatgacctcggccagcggaccgggctgcatgaaggtgtgctgcttggcttcggagacgtaatcgtggctatcacggtagaaggcggtgtcgatgccgcccggatagacggcgaccaccttgacgctggtgcccttgtatgcggcctgcaggctcttggtgtagcccttctcgccccacttggtggcgcagtacacgctttcgttcgcgttgccgcgcgtggcggcggtgctcatgatctgggcgattttcacgtcgcgctcgccacaggccttgagggtttccaccgtccacagaatcatgcctttgagccccttgaggcatttgtcaatgtcagcggcttcataggcggtgggcaccttgaacgaaggctggccggcgttgttgatgagcaggtcgatgtggccgagcgcggcgatgctcgccacggattccttgacaaatgcttcgtcggtgatgtcgcctacgaaggcgcggtaggattcggctggccactgcgcgctcagctcggcctgacgttcggcgttgaagtcgatgccggccaccagccagcccttggcgatgagttggctggcgagctcgtagcccaaacccagcgcgctgccggtgacgatggcgatcttctggcctgttgtggttggcatggttgattcctttgcatgcttgcgagactcccctcagcgaggggagcctagggttaacccgttctttgctgacagctcccggtaaggggggccacggtaggactattcttcggctacgagttcgaggtacgaatcattccagaggtcttcgtcgccgtcgggcatgaggagcacgcgctcggggttgagcgcctcgacggcgccctcatcgtgggtgacgagcacgatggcgccctcatacttggcaatggccttcagaatctcctcacgggaagcggggtcgaggttgttggtgggctcgtcgagcagcagcacattggcccgcgaggtgaccagcgtggccagagccagacgggtcttctcaccgccggaaagcacgtgagccggtttcatcgcgtcgtcaccggagaacaggaacgagccgagaatcgaacgggcctgcgtgttatcgagctcgggcgccacatgctgcaggttctccaacacggtggcgttcagatccaaggtgtcgtgctcctgcgcgaagtagccgatcttgcagccgtgaccgtattccacggaaccggtgtccggctcctcgatgtgggccagcaggcgcagcgtggtggtcttgccggcaccgttgtagccgaggatcaccacacgcgagcccttgtcgatggccaggttcacgccggcgaacacgatgttggaaccgtaggccttggagatgtccttggccatgatcggcgtgcggccgcagggcgcgggctcggggaaacggatgtccgccaccttctcggccttctgcgcctcggaggtgttttccagcagcttttcggcacggcgcatcatgttctgcgctgccacggccttggtggccttggcgtgcagccgaatgccttgcttcatgagacggtcggccttcttctcggccacttcgcgttcgcggcggcggcgctcctcgtccaccacgcgctggtgcaggtaggccttccagccgagcgaatacatgtcgatctggccgagctgcgcatccagatgccagaccttgttcaccacttcgtccagcagttcggtggagtgggagatgaccaggaagccgccctcgtacttcttcaagtagccgcgcagccattcgatggaatcggcatccaagtggttggtcggctcgtcgagaataagggtgtcggcgttggagaacaggatgcgcgccagctcgatgcggcggcgctggccaccggagagcgtgccgagctgctgctccatgacctcctgcggcaggccgagcgaggcggccatggaaatcgcctcggactgggccgcgtatccgccggccttgtcgaagtcctgcatggccttgtcgtaccgggtcatggccttgctcatcacgtccggatccgggtcggtcatatccttttcggccttgcgaatgcggctgatgatggtggcgatgtcacgcgcgctcatcatgcggtcgagcgcggtctgcgtgggatcggaggcgtgcgtgtcttgcggcaggtagccgagcttgccggagacgcgcaccttgccggcggtgggcagcatgtcgccggtgatcacgcgggtcagcgttgtcttgccggcgccgttgcggcccaccagaccgatcttgtctcccttggccacatggaagttggtggggtgaagcagcgtgcgcgcgccgatctgaatttcaagtccctgcacctcaatagccatgaataacctacttgtctgttacgaatactgtctcttaccaaagtccgactgtccatcatagcgaacactatgccgaccgggctcagccgacgctcatgcgtccatacgcttatacgcccgtagactcatgtaataacctgcaatgtgcgcgataagacagttgaatcgtgatttccgtcgtacactatccatatccgggcacgcttgcggcgcaatgcgtgtgcagtataggaaggatttcccacatggaaccaaattatctcgtgttattgggaatcgtgatcgtgattgtgggtttcgccctcaaacttgatgcgattctgatcattatcgtggcggctgtggtgactgcgctggtcggcggcattggcgtcgacggcttcctgaccacgttgggtacgtcgttcgtctcgaaccgcagcatggcgattttcatcatcgtgttgctggtcaccggtacattggagcgcaacggtctgaaaaccgcagccgcgcagctgatcggcaaagtgaagaatgcgacgcccggtatggtgatcgccctgtatggtgtgatgcgtctcgtgttcgccgcgttcaacgtgagttttggtggcgtggccgggttcgtgcgtccggtcatcatgccgatggcggtaggtgcgattgaagcgtccggtcacgagccgaacgacgagtatgtggaagagctcaagggcatggcttccggcatggagaacgtcgcatggttctttggccaggtgctgttcgtgggtacggccggtgcgctgctcgtgcagtccacgttgaagccgctgggttatgacgtcgaactgttgcgcatggccattatcgagattcctgtcgcggtgattgccgtggcggtcacagccgtctattacatcatcaaggacacacgactgcgcaagaagtactacggtgccgaagccgccgctcaggccgccaccgctaccaccaccggcaaggaggcctgatatgtcgttcttcatggaccccagcgtgaccgtcggcacgaaaatcctcgagttcttctatattttcatgggtttcatgtccgtgtatgcgggcgtacgcaacctactcgataaaaccaacaaggcccgctacggcactttcgtgttctggacggcgctcggtatcgtcatcgcgttcggccgttggattccggccattgcggacggcgtgctcattatcatcatggtcattcccgccatcttccgccaagtgcgtaagggctcggcatccgattcgagcgctcccagcaccgccgaagtggccgcgaacttccagcacatcggcatgcgcatctttattcccgccctgtgtctgggcgtgttcgccattatcggcgccctgattcccagcgtcagcgccctgaccggctgctgcatcggtgtgatgattgccgccgtgattctgttcgcgttctcgcatgacaacaagccggtcgtattcctcaacgattcggaacgcctgttgtctgccatgggtgcgctctgcatgctgccgatgctgctggccagtctcggcgcgattttcacagccgcaggtgtcggcgacgtgatcgccacgctggtcggcggcattattccgaagggcaacgtcacgctgggcatcatcgtattcggtgtgggcatgatgctgttcacgatgatcatgggcaatgccttcgccgcgattaccgtaatgaccgtgggcattggcgcgccattcgtgctcgcctacggtgcggacccggcggtgattggcattctggcgctgacctgtggctactgcggcacgctgtgcacgccgatggccgccaacttcaacatcgtgcccgtcgcgatgctcgatatgaaggaccgcatgggcgtgattaagaagcaggtgctgcccgcattggtgatgattgtggtgcagatcgtctatatgctgatcgcgcaataacctcgttgtccaaataccacaacaatccgtgaaataaggagctaatgatgagcaagattctggtgaccggattcgatccgttcggcggcgagccggttaaccccgcattcgaggcagtcaagctgttgccggatgaaatcgccggtgcgacagtggtgaaactggagattccgacggtgttcacgcgcagtgcgaccgtggttgaggaagccatggtgcgcgagcagcctgactatgtgctgtgcattggtcaggctgatggccgttcggctctgaccgtggagaaagtggccattaatttggccgaggcgcgtattcccgataatgatggcgagcagccgttcgatacgccgttgcgtgaggacggcgacaccgcgtatttcgccacgttgccggtcaaggccatggtcaggaacatcaatgaccacgggattcccgcattcatgtcgtatacggcaggcacgtatgtgtgcaacagcatcatgtataacgtgttgtatctgattgaccgcaaattccccggcgtcaagggcggcttcattcatgtgccgtatgcgaccgcgcagggcgtgggcaagccgaacggcacgccgaccatggaaatcgcgaccatggcgcgcggcatcgaagccgccatcgaggccgctgtgggcaccggaaccgacgccaccgacatcatgggcgaaacccactgatacgcatattgtcatgcccctgctgacagcagttgtcagcaggggcatcgttatgcgttgaacgttacagttcgcgcagctgggcggcgatctggatggattcgacgctggcctcggccttgttgcgcgtctcctgccattcggtagcgggcacggagtcgagcacaatgccggcaccggcctgcacgctcgcctcatggtcgcgcaggaacgcggtgcggatggcgatggccatgtccatgttgccagagagatcgaagtagccgacggtgccgccgtagatgccgcggtcggccggttccaactcgtcgatgatttcgactgcgcgcggctttggcgcgccggaaagcgtgccggccgggaacgcggacttgaacacatcgaatgcggtcagcgaggggtcgaccttgccggtgaccgtcgagcagatgtgcatgatgtggctgaaacgcttgatgtccatgagctgcacgacttccacggactgcggcacgcacaccttgctcaggtcgttgcgggacaggtcgacgagcatgatgtgctcgctgcgttccttcggatcggcaagcaattccttggcgaatttctcgtcttcctcaggggtggcgccgcgagggcgggatccggcaatcgggaaggtcatcgcgtggccgttgtccaccttgatgagggtttccgggctggagccgatcacgttgaagtcgcggccctgagcatcggtcaacgccatgaaatacatgtacgggctcgggttcagcgtgcgcaacacacggtacacgtcgaacgggtcggcaggcgaatcgatgtcgagacgctgggagatgaccacctggaacacgtcgccgtcgacgatgtgctgcttggcgcgttcgacggcctgctcgtagtggcttttctcggtgcggaagcgcagctcaggctgggcgaccgtttcgtccaagatgttgacgcgggactcgcccggagccggggtggcggcatcgtgctgcatctggtcgagtcgagcgacggcctcgttgtaggcgacgtcggcgcgggtggatttatcatccacgttcaccgcgttggcgatgagccacaccgaaccggatacgtggtcgaccacggcgatatcggtggccagggcgagcacggtctcaggctggccggtctcgtccggagcttcggcgcgcagggtcggttcccagtggcggatggcatcccagccgaccgtgccgaccagaccgctggtcaggttcggcaggccttccacatgcggggccttcagagtcttcaacgtggcgtgagcgacttcgaccacgtcaccggtgactggcacaccaaccgggaccttgcccaaccagtcggcctgaccgttgttggagcgcagctgggccatcgagttgacgccgatgaagctgtaacggctccacgtgccgccgtattccgccgattcgaggatgaaggtgccggatcggccgccggcgagacgctcgtagaagccgaccggggtgagcgagtcggcgagcagacggcgcacgatcggaatcacacggtagccggcgtcggccagttcgtggaactggccgcgactgggccaggtggcgccccacttcaggtgtttgacgctgcattcgctcatattcgctcctttacttacaactcgatgtcttgtttcgtagtacgcggtcgttcggcttcccccagtcagggaagcccgttctactgctcggccgggcggtggccttcgaccacggacagggggccgccttcgaggaagcagctgcgcttgccggtgtggcaggcggcaccgacttggtctacttcgacgagcagtgcgtctccgtcgcaatccagggacacgcccttgacgtattgcacatggccggaggtatcacccttgcgccagtattcctgacgggaccgggaccagaaggtcacgcggccggtggtcagcgtgcggcgtaatgcctcgtcgttcatgtagccgaccatcagcacctcgtgtgtgtcgtactgctggatgacggcagcgaccaggcccttggcgtcacgcttcaggcgtgcggcaatacggggatcgagttcagtggaattgtcgtatgtagtgtctgtcatacctatcttccttatgtggaccaccctcagtcagcttcgctgacagctcccggattatgtgcgacatgtgcatagcgcactgctacgaacaatccactggattgttcgtccagcgggagcaaggtgtattcgtttagcgaacggtgtagccgtgcttcttgagttccgccttgacatcggcgatggtcaggatgccgtaatggaatacggatgcggccagcaccgcgtcggcacctgcttcgatggcgggcgggaagtcctcgaccttgccggcaccgccggaggcgatgatcggaatcttgacttccttgcgcacggcgcgaatcatctcgagatcaaagccttccttggtaccgtcggcgtccatcgagttaagcagaatctcgccggcgccaagctgctcggcgcgcttgacccaccagatggcatcaatgccggtggatttgcggccgcccatcgtggtgacctcgaagccggattgcgtgtgttgctcgcccttttcgcggcgggcgtccacggagagcaccagcacctggttgccgaaacggtcggccacgcggctgataagcgacgggtcattgatggccgccgtgttgacaccgaccttgtctgcaccgcagcgcagcagcgagtcgacgtcctcgggcgtgcgtacgccgccgcccacggtcatcggaatgaacacctgttcggcggtgcgggagaccacgtcaatcatcgtgttgcggtgggagctggatgcggtcacatccaggaaggtgatctcgtcggcgccctgacgatagtattcggccgccagctccaccgggtcgcccgcatccttgaggttttcgaaatgcacacccttcaccacgcgaccggcgtcaacgtccaggcacgggatgactcgtaccgccaacgacatgcttcactcccctgttcggctttgcattacagtccttcagactacctaccgcccgttacatgcgccgcacccgtttctggaatatgagaatccgagctgacgcgcccgctgcgcgatctcaagaccgccgcgccctgccgttatatcgccgccgatatcgagaacgcgggcggccattacgtcgacgagcagctgcacgtggacgacgccaacggcttcaagctcatcacgtcccgcaagcccgctgatttggactacttcgtggacgcaatcaaggatgcgctgaagtaactaccgctccttagcggccaactgcccgcaggcaccgtcaatgtcctggccgcgggtgtcacgcagtgtggcggtgatgcccgcgcggtgcaggatctccaggaaccgctgttcgtctcccggcttggaggcggtccacttcgagccctcgatggggttgagcggaatcgggttgacgtgggcccagttgtcgccgtaatggttaagcctcttggccagcaactgcgcatgctcggcctggtcgttgatgccgcgcatcagcgcgtattcgatactgacgcggcgcttggaggccagccaataatcgtgcgcggcatccaacacctgcgtggtgttgaaacgcttgttcatcggcaccagctcgtcacgcagttcgtcgctgggggcatgcagggaaacggccagacgcacgggaatgccttcggcagtgagcttcttgatgccgggcaccacgcccaccgtggatacggtgatgttgcgcgcggaaatgccgaagccttcgggaggcatggcggaaatctgtcgtacggcggacagcacggagttgtagttgcccatcggctcgcccatgcccatgaacacgatgttgctcaggcggccctctcccccggccactttgccgtcacgcatcattttggcggccacacgcacctgttcgattatttcaccggtggacatgttacgggtcaggccaagcttgccggtggcgcagaacgggcagcccatgccgcagccgacctgcgaggaaatgcacagcgtggtgcgggtcgggtatcgcataagcaccgattcgatgagggagccgtcgaacagcttccacaaggtcttgatggtggtgccttcgtccgccacttggcgggtcacctcggtgatgagctgcgggaagaacgcggcggcggcctcgctgcgcttggctgccggaaaatcagtgaattcggcggcattcacatcgaaatggccaaagtaatggttggcgagctgcttgactcggaacttcggcaatccgagttcggccgctttctcgatgcgctgctcgggcgtcatatccacaaagtgcagcggcggcttaccacggcgggcatggtccttggatagcacgtcacggaaggcacctgatgtgccgccgggagtaatgccggtttccggagtgtcaggatgctgtgtggtcatgatgggttcgcttcgctctcaatatcagaaaatagtcaaacatgcaatagaaatatcagaatccaccatacggcgtgccgcatacgaatcagatggcccatgtcttagcccatggcgaacgcatattgaacgatgattgcccccatatatgacatgtggcaccgtgcgatatacacacgatgccacattgttcatgcacgaggcatgcgaatcacagtccggtgacccacagcaaggcgcaggtgaacggtgcactcatcaaaatggaatccacacgatccatcacaccgccgtgtcccttgagcagatggcccatgtctttgatgccgatatcgcgcttgagcatggaagcacacaaatcaccgaacgtgcccacggcgccgatgagaatacccgccacgatcggcacccaccaacgagtggcccatttcgaggcatcatacgtgcatgcgaatacggcgaatgcgccagccatggcgaagagcatcgagccgatcaggccctcaacggacttcttcggcgagatacgcgggctgagcttgtgcttgccgagccaggcaccggcaaacaaaccacccgtatcggagagggcgggcaggaacaccagcatgatggcgtgtgcaatcggatgcccattgaaagtcagcgagatgatgatgcagctggccagcaacggaatgtacaacacggtaagcacggacacagccacatggctgagccgggaatgatgctgttccccgccctcatgattgaacgaggattcgaggcgcgcgctggcatccgtgttggacagtttgccggcaaccgccagagataggcggttgccgacgctgatttttgcgctggccgcgatggcgaccagaataatcgacacgatgatactcagcgacatcgtgatgagatggtacggggaataataggtggcgatgagggtgaaggacgcgcacagccacagcatgaacaccgggatgtgcaggcctacggtggcgaagtccaccctgagctcccacagcgccagaatcatgaacacgactaccagcagcacgaagaggtcgacgctgagcagcaggcacgcgacaataaggatgaccagtgccgcgcctgtggcgatggcctgcggcatgttgcggccggtcttcttgttgatccggtcgagcgtctcctcggcctcttcatggagttgttcgttgcgttccataattctccggacctggtctgaatcagacctccatgatctccttctgcttggtctccagcagagtatcgatctcgtcggtaacggacttggtgaccttgtcaagatccttcagcaggcgatcgccttcgtcctcacccatctcgccgtccttgacggccttgtcgatggtttccttggtcttacggcgaatgttgcgcacggcgaccttgccgtcctcggccttgcccttggcgagcttgacgtactccttacgacggtcctcggtgagttccggcatggtcaggcggatgacgttgccatcacggttcgggctgatgccgaggtcggagttgcgcagggccttttcgacggcaccggcctgggaagcgtcaaacggggtgacggacagggtgcgcggttcgggaacgccgatggaggcgacggccttaatcggggtgggggcaccatagtagtccacggtgatgccgttgagcagggccgggtttgcgcgaccggtgcggatgccggagaagttttccttggtgttttccacggtcctggccatctgttccttggcctggtcgataagagacatattcactccttgtgtgttggtgttcgtctgtgttgttcgtctatgaacgtttgattcgattgtaggcgtttgcggcttactcggccacgcgcgattcggcggtggagaccagcgtaccgatttcatcgccgacgagggcgcgggtcacgttgcccggctcttcgaggccgaagacgcggatgcgcttcttgttgtcgcgggccatggacagtgcggaggcgtccatgactgccagattgtccacgagggcgcgattgtagctcagggtttcaaaacgcttggcgttctcgtccctgcgcgggtcggcggtgtagacgccgtcgacgccgttcttacccataagcacttcgtcgcagtggatttcgagggaacgctggatggaaaccgtgtcggtggagaagtacggcatgccggcaccggcgccgaaaatcaccacgcgacccttttcaaggtgacggatggccttgagcggaatatacggctcggcgacctgtcccatggtgatggcggtctgcacgcgggtggcctgaccctcctgctccaggaagtcctgtagagcgaggcagttcatcaccgtgccgagcatacccatgtagtcgccacgggaacgatcgataccggcctgctgcagttcggcaccgcggaagaagttgccgccgccgaccacgatggccacctgcacaccctgttgtacggccggaacgatttcctcggcaatgcgacgaatcacatgggtatcgatgccgaccttgccaccaccgaatgcttcgccggacaacttgagcagaactctgcgcggcttgtcgctatcagtcatatcatgcctttctcaaaaccgaaagtgcgaaattatccgtagacaagcgtatcggtttacgacgacaccccctagcaacgacacccttggaatagcgaaacgccatccgattattgaataaccggatggcgtttcgttgaaattacgctaagcgcgtggagtaagccttaggctcactcctcttcgcccttgccgacctcgacacgagcgaatgcggtggcgttgccaccgcattccttgaacaggtcgccgacggtcttggacgggtccttgacgaacggctgctcgagcagcacgacttccttgaagaaagcgttgagacggccttcgacgatcttcggaacgatcttctccggcttgccctcggccagggacttctcggtggccacgcgacgctcggactcgaccacatcggccggaacgtcctcgcgggtcagccacttagcgcccatggcggagatctgcagagcagcttcgtgagccacggcggcgccggccttgtcggtggcgatcatggcgacgatgctcggcggcatctcggcggacttcttgtgagcgtagacttcgacgtgctcgccggagatcttggcgaactggccgaccttgacgtgctcaccgaacagggcggcggcctcctcgacagccagcttgacggtggtgtcgccagccttggcctcgagcagctcgtcagcggagttggcgtcggcgtccacggcgtagccgagaacttcctcggtgaactcgacgaacttcggggtcttggccacgaagtcggtctcggagttcagctcgacggcgtagccggtctcgccattggcggtctcgacgaccttggaggcgatggtgccttcctgagccttgcggccttcacgcttgccggctgcggcgatacccttggctcggatgatttccttggcgcgggcgacgtcgccttcggcttcggtcagagccttcttgacgtcgagcatgccggcgccggtgtcttcacgaacctgcttgatcagtgcggcggtaattgctgccattgattattctccttgagaaattttgcttacccatgaacgatgggaagcgcttattcaggcacttcccatcgtagagcatcactcggccttgggggcctcggcggtttcgccctcggcggcagccggagcggcggcttcagcggaagcctcggcaggagcctcgttggtcaggagttccttctcccaagcggccatcggctgctcggcggcttcgccctcggccttgttggcgccggagcgctccagcagaccttcggcgacggcgtcagccatcaggctggtcagcagttcgatgccgcggatggcgtcatcgttggccgggatcgggtactcaacggtgtccgggtcggcgttggtgtcgacgatggcgacaaccgggatacccagcttgtgagcttcctcaacagccaaggcctccttggtgatgtcgacgacgaacatcgcggacggggtgcggttcatgttgcggataccgcccagctgcctgttgagcttgtccttctcgcgctcgagcaggaggagctccttcttggtcaggccggagccgtgcacgtcggtgaagtccatttcctcaagttccttgaggcggttgacgcgcttggagacggtctggaagttggtcagcatgccgccgagccaacgctcggagacgtaaggcatgttcacgcgggtggcctggttggcgatagcttcctgagcctgcttcttggtgccgacgaagagcacggtgccgttgtgggccacggtggtcttgatgaagtcgtacgccttgtcgatcatgtcgagcgacttgaacaggttgatgatgtggatgccgttgcgctgggtgaggatgaactgcttcatcttcgggttccaacgacgggtctggtggccgaagtgcaggccagccttcagcatatcgctcatagtgatctgagccatggtattactacctttcattgtcggttcttgcctggccatgcgcacctgcgtgcagctgctcccccggtttcacgagttgtgcagccgaccgacacaggccgtcgcgagcatgacgcgaatttgttgtgtgccggttgacaatattgggtggttccggacgccagcgactgcgtccgttgccgggtggcacacaagtttcaaggatagcacggagccggtactaagaaaaacaggctcccctctctgtggggagcctgtcgccgtaggcgactgaggggagttacgggcggtaccggcagaaccaccctcagtctcactacgttcggcggctcccgccagcgggagccgggtatggactacttcgcctgacgattgcgcatgtagcgcagggcttcgcggcgttcttccttttccaggcgatccaaatacacgtggccgtcgagatggtcgcattcgtgctgaagcatacggcccatcagcccggagccctcgagcacgacctcgttgccgtccaggtcgatgccacgcacgcgagcgtagtcggcccgacgggtcttgtaccacaagccgggcacggacagacaaccttcatcgccatactgctcgccggacttctcctcgagtacggggttcagaacgtagccgaccttgccgtcgatgttgtaggagaaggccctcaggctcacgccgatctggttggcggacaggcccgctcggcccggatcgtccacggtttccagcaggtcgtcaaccaggcggcgcacggccggggtgatttccttgatctcatcgcagggggtgcgcaggactgggtcgggcacgaccctgatctcacggatggccacttctcgttactcctcgttcttctcgtcagccggccggtccggcttgctgccggtgtcagcggcattgtcggcattgtcggcggaatcgccggtctcgccctcttcgggttcggccttcgacttcttgatcttctccgacacgctagcaatcgaatcagacacgctggttttcatctgttccgaggcctgtttgacctgttcggacgcctgcttgaccgattcggaggatttcttgacggtctccagcgtgctgtcgataatcttggctgtggcgggcagtggtttgttggatggcttgggcgcatacagatcctcttcgatgacggtggcgtagcgctgcaataccttgggacgcaccactttcatgctcggggtgagcgtgccgtgctcctgactgaattcctcatccagcaccgcgaatttgcgcacggactcagcgcgggagacattggcgttggcctggtcgatgtactgctggataaaggcacgcaccgcgtcgttgtcgctggcctcggcgagtgtcatgtcggcattgaggccctgaccttccagccaggaatgcagcatttcggggtcgagctcgataagtgcggacacgaacggcttgccgtcgccgactactactgcatgagccacaatcgggcaggtgtcgatgacatcctccatcggggcggggctgatgttcttgccgccggcggtgatgatgatgtccttcttgcgtccggtaatgaaggtgaagccgcggtcgtcgatacgacccagatcgccggttttgatccagccgtcggcagtcatcgtctgtgcggtgagttcgggctgcttgtagtagccaaggaacacgttcgggccggtcagctcaatttcatcgtcttcgccaagacgcacgcccatgccaggcccaggcttgccgaccgaaccgacctcgttgtcgtcctcccaattgacgagcatcggagcggcggtttcggtcatgccataaccctggatgaaggtgatgtcatccatgccgttgaaaaagtgggccaaatccacgttgagcggcgcaccaccgcaggccagccatttgaggttcggtccgagagcggaacgaatggatttgcccaccgtggccatgtagaacgaatggcgcatgcgctcgatgaacgaatggccgcggccggcctgctcatccttgctccacttgacgaagtgcttgaccgactgggcgaagatatgcccctggatgccggcaccagccttctgcgaggccgcgttatacaccttctcgaacacacgtggcacgcccagcaggtaggtgggcttgaagctgcggatatcggcgagcagtcgcttggcgtcgggaatgtatccgaccacgccgcagccaccgatgcacacgtactggatgtagcgggcgaagcagtgcgccagtggcaggaacagcagcagacggttgtcgtcgtacagcatgccacgcagaatctcgtagccgttaagcacgatgtgcgtgtaattgcggttggagagcatcgcgcccttgggcttgccggtggaaccggaggtgtagaccacggtaagcagatcatcggctttgatacgagcgatagccgcatccaacgtctcatcggatacgccatgcccgaagtcagcgacagcgtcaaggccatcggccttgaaattgaacacgtatttcatgcccggatgattgacacggatctgctcaagcgtctgtgcgcgctggaagtcgccggcaaaggcgatggcgggatcgacttcctcgacgatgcccgcggtctgacgggcggaatcggtctcatagacgggcacaaccacagcgccgattgccgcgcaagcgaaatcagccacaccccactcatagcaggtaggcgagtaaatcagcaccatggtgccggctttgacgccaagtcccaacaggcccttggccacctcgcgtacgcgggacagcatttcagtagctgtggcgccgcgccattggtgggtgttgtcatcctgccattccgcgatgatgtcatccggcgtgcgagctgctcgtttggccagcagcgagtagacggtgtcgtcatcggtggtgacatatctgggttcttctacatgttcacgcatggtcactactataggcgaaccagcctatgacacggcagaaccgtcttccgctgccagcgtaggaatcggtgtgcgggcggggccgtctggtcagcccagatcggcatagatgcacatccatcgagaaccgatgaacttcagtttgaggttgactcgcagattttcctggccgatggtcatgaataccgccatttccagcgtgtccttgccggtgatcatgccgtcgatcaatgtggggacagtgggcagatagcagaatttcgctttgagctccggatgagtgaccatgtgggtgccgagcaggtattgcatggtttgcagccgttccaggcatggttttgtcatggctctgttgagatgtgcgacgctgagtctaccacgtatcgcgtccgccgatgtgcaggcgatgcggcatgcagccatggccatggaatgacattccttcgcattcagcccgcctatgaatgtgggctggatatgataccgcaccgggcgatccgacagctccacaacgatgaatccgtcataactcggcaacggcccgtactgatatgtgccgtggaaaaatcccgaatactccatgatgaccccttcaagcccccttgcaactcaccatcatcggcgagcgtttgtactacaacatcacgaaaggcgcgccaagtcaaacgacttgagcgcgccttagggcaagctaagcctcctgcatggagggcaaaccccccattttcaggggggtaatcgggattatcgtgcggaatacgggttgaccaccatgccgcaacgctggaagttcttcacgtcgacgtagccggtggaggccatagcgcgcttgagggcgccgatgaagttggtcttgccgtccgcctggtggctcggtccgaacagcacctgttcgagcgggccgaccgtgccgaccgtggtgcggtagccgcgcggcagcgtctggtggcgggcttcggaaccccagtgggtgcccttgccgggggcctcggtggcgcgggccagcggcgcgccgagcatgaccgcgtcggcgccgagggccagggccttgacgaagctgccggagtcgcccatgccgccgtcggcgatgacctgcacgtagcggccgccggattcgtccatgtagtcgcggcgggcctcggccacgtcggcgatggcggtggccatcggggcctgcacgccgatggtctggcgggtggcggagaccgcgccgccgccgaagccgacgagcacgccggccgcgccggtgcgcatcaggtgcagggcagcggtgtagttggatgcgccgccgacgatgacgggcacgtcaaggtcgtagatgaacttcttgaggttcagcggttcctgaccggaggagacgtgctcggcggagaccacagtgccgcggatcacgaacaggtccacgcccgcgtccaccacggtggagtagaactgctgggtgcgctgcggggagagcgcgccggccacggtgacaccggcggcgcgaatctcgtgcagacgttgcgtgatgagctccggcttgaccggctcggcatagatctgctggatacgctcggtggcctgatcggccggcagcccggcgatttcgtccaacagcggggtcgggtcctcgtaacgggtccacagaccttccaaatcgagcacgccgagcgcgcccatcttgcccatggcgatggcggtggccgggctggtcaccgaatccatgggggcgccgatcaccggcacatcgaactcataggcgtcgatctgccaagaggtggagacgtcctcggggtcgcgggtgcgacgggaggggacgatcgccacatcgtcgagtgcgtagccgagacggccctttttgcccaaaccgatttcaatttcctgagacatggttgtaagcctattgcccgggtgggacgccaacaaggtcgtttcccacggaccggacgattgcttcaagtcgttacaaacatgcgctatgactaaatcatcttcacaccatctatcaggaggaagcatggccaaaatcaaggtcgaaggcactgtcgtcgaactcgacggcgacgagatgacccgcgtgatctggaaggacatcaaggatcgcctgatcctgccgtacctcgacgtgaacctcgactactacgatctgggcatcgagcaccgcgacgagaccgatgaccaggtgaccatcgacgccgcccacgccatccagaagcaccatgtcggcgtcaagtgcgccaccatcacccccgatgaggcccgagtcaaggaattcggtctcaagaagatgtggaagtcccccaacggcaccattcgcaacatcctgggcggcacgatcttccgcgagcctatcgtgatgagcaacgtgcctcgtctggtgcccggctggaccaagccgatcgtcgtggcccgtcacgcattcggcgaccagtacaaggccaccgatttcaaggttccgggcgccggccagctgaccgtcaccttcactccggacgatggctccgagccgattcagcacgtggtctacaactacggcgaagacggcggcgtggcccaggtgcagtacaacgtcaacgattcgatccgcggtttcgctcgtgcctgcttcaactacggcctgatgcgtcattacccggtgtacctgtccaccaagaacacgattttgaaggcctacgacggccaattcaaggacatcttcgctgaggtgttcgagaccgaatacaaggacaagtacgccgaggccggcctgacttacgagcaccgcctgatcgacgaccttctggccagctccctgacgtggcacggcggttacatctgggcctgcgagaactacgatggcgatgtgcagtccgactccgtggcccagggcttcggttcgctgggcctcatgacctccgtgctcatgaccccggacggccagaccgtcgaggccgaagcggcgcacggcaccgtgacccgtcactaccgccgctggaagaagggcgagaagacctccaccaacccgatcgcctccatcttcgcgtggaccggcggcctcaagcaccgcgccgatctggacggcacgcccgaagtccgtcacttcgccgagacgctggaaaaggtcatcgtcgacaccgttgaaggtggtcagatgaccaaggatctggccatgctcatcggcccggacgaaccgtggctcgacaccgacggcttcatgaacgcgctggacgagaacctggccaaggctctggccgagtaaatcatcgaacacatcgtgcggacctacatgggtcatgtcatgtcgccaactgtcatgattgtcgtgcttcatctggaatgttcctcagcacgacaatcatgacagttgttcgatacacgcgcgaaatacccctaattgttcccggatatgtggcgatttgtccactggtccgggactttttcgtatacggcctactagaatcgtgattcagtttgttttcacgcccgcttgaggaggtttcgccgcttatggtgttcgcacgccgctcaaccaccctgctcgccgccattgtcgcatcctgcgcgatggtgctgtcactgaccgcgtgcacctcagacaataagaccgttgtagatggtcaaaccacggtgacgtccaattctgccggcggcgtggccgtgttcacgccttcggacggcattacgctgaatcagcagacgccactgaacaaatgggcgaagctggtgcccgacctaaccaaggccctggtcgacgccggtttcaagaaaggcgatatcgatcatacgacgtccgactcgttggacaagcaaagccgcgccatccaagactttgtggtcgatcatctttcgaataacaccacggacgattccggcattgccatcgcgcccgacaacatgacattgctcgtggctccagtagtcgaggccgacgcttccactcgccaatacggcgattacgtcagccagaacctgagcaccaacgatgccacggatgagggagctacttctgacggtgattcttccgaagacagctcttccaaagatgactcgtccaacactgagagcgacggcactgcatcggacgagcaggcgcaggccgtggaccggctggtctcatcgctcaagctggccaaggaatccggcatgcatgtggtattgctcggcaacagcatcgaggggtataggccggacgccttcgtcaagttctcggacgcccagaccatcggcaagctacaggcggaaaagatggtgtccaaactcaagttggataaggccagtaaagacaaccccaaatacattgaggtgctgctgccatacaccgccgtggacgaaaaaggcaacgccaacgattccacgttcgcccaagaggcgttccgtggtatctggcaggtactgggctcctactatcagaagggcgttgtggaaagcccttcaggcaccttggacggcaaatccacggaaaacgattggcaagccgtggcctacgatgccgccaaggaaggctccactgcgaaagtgcttgacaagcgtctggcaaaaaccgacgggcagtccacactcacccgtattgacggcatcatcacgatgaacgactatatcgcctccgaggtcgtcaaggaattggacgatctgggatacaccggctctgccgccgatatcaatccgcagatcaccatctcgggcattgtcggcaatatcaccggcaagagggatctcagccgcgacgcagtgccggacccgatcaaatcccctgaaaacgacaacgcaaacgactcatccagttccgatgacgatgcggataaggacacctccgcttccgacaaggaccatgactcgcaatggcctctggtgaccggatacggcgcgtacgtctcgaacatcccatccatcgtcaatggcaagcaatggatgaccggcatggaagacagacagaccatcgccacggatatcgctcaggcctgcgccaggctcaacaagaacgaagcgctgaattccatgccttcaatcaggaactccgaggtaggcggcgtgaagaagatcccgaccatcaacgaaccgttgctggctgtcagcgccagcaatctcaagtccgcgctgatcgcccccggatatatctccttggccgatgccggtctgtgattcatactcgtcacgccgctagccgcctgcgatgcctcttccgtacggccctgttccggccgacaaacattgctgaatcatgacggcttcagtacgatttttcgactccccgcatattgctgtgggtcaagatagtcggccgttcctcgcttgaggccccaatgcaggcaacggtcttcgcaatggtccgagttgccctcaacgatgcctacgggctgtctgcgggagatcgtatcccccaccgagagctcggtaacagccggttcgaatgtcgacgtgacacctccacgatgccgtacactcaccgcatctttgccagctactttgccagcaaaactcacggtccctgcctgtggtgacagaatcacggtaccttgctccgcagcaagatccacgccacgatgacctggtgcccacgggttgatcggccgctcgaactgttgttcgacctgtggatcgtcgaccggccagtcgaaccgggattcgcactgattgccattgcgccacgccagatcagacatatcggtgaaatcctccaccgtgtatgccgcatctccggtcaccgcagtatccgcatgcgcaacatgctgaggcgtggatgccagtcctactcccaaggcaagcagcaggccgataacggcggccaacgcgattatggcatccatacgccgttgccgttcctgagcccgctgacgcgcctgctgacgccgtctgccggcacgtcgggcttcgtcgcgacgccaatcaaacaacagtggtgcattcatgagattcctccccatagtgtgagtgtgatgtgattccggcttctttgccggcgatacccaccttgaggggtccgaaacaggatgtccagccagaacgacctatgtggttccagcttccgaagttatccacaatgaaatttcgcgtgacagtatcgccgcatcgtcatcatgttgtatgagtgggtattcgatgagtccgattctgcggaattcagcgcgacatgccatacacgcatgtaatttgctttttcgtggcaagcatgtaagatgtgtgacttgtgcgcgagagaaatctcaaacacagcagacattcctgcgtagctcagttggcagagcatccgactgttaatcggacggtcgctggttcaagcccagccgcaggagctcacctgaagccaccggcgtgtcgccggtggcttttctgttactcattccctgaagctgcttcattcacgtgagaaaataccggtcggcggtaccacgatgcgcgccgatcgccattcaaacgaggacagtcatggaccgtcacgggttcgcccgctacgagcccttcacgattcagaaaccctacattattctacggaatctgtcacttctgcagattcggcattccggccttataccagagcaccgcgataccaacacgttctttgacatcgagcttggcaagagacctactaaccgcctttttgactgcctccagttgcattccgagacgctgagcaatttcagcgttagtcattccttcgctgaccagtgctgagacttcgaattcgcgaggtcccaatgaatcgaatttacttctgatggccagagtgtcagcattgatgctgacgttaggaacccctcggcgaatcacttcctttgtaatccgtggtgtgagtatggcgtctccatcgtacaccgagtgaatggcccgacacaggtccttagtcttaacgtccttaagcaagaatcccgaagctccggcgctcaatcccccaaacgcatagctatcctgatcgtatgtggttaaaatcaggatacgtattgaaggatataactgtttgattcttgccgtggcatcgagcccatccataacaggcatgcgaacatccataagaatgacgtcagggaggctctgcccatgtaattgcagtgccgcaagaatatcaagggcatcctgtccattccccgcctgcaacgtcatgcgaagcgcaggatctttcatgaccatgagcgaaaaacccattctggtcggctgctgatcgtccacgatcattacgttaatcatcgtttccctcctgcacaggaatatatggacgtttttgctgtggaataatggctgaaacagtccacccctgccctgatgatgagccatagtgaaggtgcccgccgacccgcgtaacttcagtcactaggccagcaagcccgaaaccggtccccttagcgcggttatctttgttcagcgttggcctaccatcatcacgcactgttatatggagttccccattatccagatgatcccatgaaaccacaattcgcgttatatttttcccatggcgcattgtgtttgtgacagcctcacgactcactcggaagcataaatcagcttgggctagatcgtctggacgccttcctgtctcggtcagaatggcggcgattccaatatcacgagcatgttgaagaatcgggtttatatcattccagctgcacagttccaccgttcctgtttttgttttccgtaacgtcaccggagatgaaagtttccgtaccgcctcgcgtgtatcacctagactttgccgagctaagttattgatactctttatagcgccttccaccggctcctgtgtcaatccctccaagccttcagtaagtgcaatgatagcggtgagattatggcccacgctgtcatgcagttcggctgcgacgtccgcccgccgacgttcttcatcgcgttcctgttccaattccaggcttcgttgctgttgagcttccaccaaggccgctcccttcctccgctgactgatgttgcgcgaccaaagagctaaaatagcggtcatcgacgcaaggagggactcgggcagaagtatatcagtctgcaaggcggggaaggtcgcaatccagaggccgcaaacgattgacaatcccgacaaaaccattcccgcaatggcacgttcagtggtcgcggccaaggctgtagacgtgtagacggcaaacaagagaggcaacatcagatatggctccgcttgaagcaagcaagcgcatagatacaatccgcatatggcacacaaaatagcgaacggcattctgatacggaacaacagcgccacaacagataagacacataggatggcgagtacggggattccccattgatgctccaacagtttcatggctgccgaatcgcccccgccatgggtgaatacgattctggtgagcatcatcacgtcgtagcataggcacagtatcggcgcgaccatgcgcgcgaccgggctggaccgccagaacgcggccacgtggccgatcaggccggtaaccgcgtggcgcttgtcgtttccggtttttgcggtcatgcgattctccttccctgggtgctgccccatccgtgttgaagcgtatcgcatgtggcctgtgctgtatggcgtgtatgcggttagatgaacttccaaagaagttttccgttgtcagtcggattcctactggttgatgaacatgaggaagatgagcatgccgccggcggcagtcaggcctgcggataggagtatcgcgattgtactgacgattctgtgtactcccgcctgttcgggatagatgacgatcgcgatgacgagcgaagcgatgaggcatacgaagtcgatgatgacgaggatgttcctgacccagcccgtcgtgtagaggtggatgccgagcagctggggcacgagcgtgcacagaaggggaaggacggccaatgcgaggctggcgcagccgccccatgtccgcccgccgtccggcggtgccggcgtatatgccggttgctggtttgggtattgggatgtgtttgccatggtcattgctccttggatgtgaggttcacggtgccggtgaattggtcgccggtgacgtagatgtagaagctggtgcctgtgacgttgtaggtctggtcgattttgccgttcgtggcgggcacgggtcgtttcgtgtcgctgccgttggtcacgaggattctgccggtgccggatgtgcctgtgatggtgccgttcaggtggatgctggccttcttgccggtgccgccgaatacggcctcctcgccggtgaacttgctgtagtcggccttgtagccgcccgtgtaggagtcgccgtcttgggtgcgtatgccttggaggttcctgtctccggccacgccgatgccggtcgagcagccggtgaggatgatcgcggcgagggcggcgatcagcacggcgatgacgcggcgcggcaggcgtatggactgttcgctgttgtgtggcgcgttgtgttgttcgtcgtgtcgttcgttgtgttggctggtggtgtgcatgatgaagcctttccatggtgttgggtggcgggctcccgcaggtgaggggagcccgtggacggttgctcagacggcttgtttggcgagccggtggaagatcagggcgctgatggcggtccagatggcggcggcggtcgtggaggcgagcatggatgccgggctggcgatgttcgcgaggtcgcgggcggcggaggcgctggtgatcagggcgagcggatacggcccggcgatggccggggcggccaggctcagcgcgcatccgccgatggtcaggaccatcatcacgctcatcgtgcccgcgaacgattcggccttcgcgctcacggcctgtgtgagcgtcatgatcgcccataccgacagggtcagcgggataccgcgcagcaggaacgggccgagctgcgcgaggtcgaatccggcggcgaagcgtccgacgaggatgaactctgcctcgaacacgaggacggtcagcgccgaagccgcgagcccgtgcagcatcttgccggcgatcgccgcgttcacggtgccggcggcgttcagccgctgccagttgcggcctcgatgctcgttggcttcgacctgcgcggcgaacgcggccacaagcaccggcatgaacaccatgctcggcaggaggatcgcctgaccccagatcgcggcccaggtcacgccctgcctggcgaactccgcctggtagccggtgtactggctccacccgttgaacatgccgatcgcgtcgaacaagacggtcacgatccagtaccacaggttgccggccttgcgcgtctcccagcggaacgccgcccacacggacggcctgcggcgtcccgccgcatgcgcgcggggcatcgcggcatggctcgggccggcagctggattggcggccgggttgattgccggattggttgccgggttcactgcgtttgcgtgtgtcatcgtcttgactccttcaccttgaccacgaccatgctgaccagcgtccagccgaggaacgccatggccgcggaggccacggccatccacgggcgcgcggcgagcagcatcgtggcgttgccgcccgcatccacggatctgacgaacgggctcgcggccgaactcaggccggccgggaacagccagccaagcgcgggtctgttcatcgcacccaggccggagcccagcacgccggcgatgacgcccagacccaggccgatggcctgcttgtctatcatcatcgagaacatcagctggaccgcgctcgtggccgtcgcggacaggaagccggtcagggccggcacccacaccagcgcggcgaacgagccggccaccgtgaagccaagggctttcgccgcaatcggcacccacagcaacgggatcaggaagcaaagccccacgccggtgccggcgacgatgagcttgcccacgaaccgggccgcgtccgactggccgaacgacagccatgtgaggttcatgcgctccgaggtctccagcacgacgatgcggctggtcaacagggccgccagaatcggggccagcaggctcacgacctgatagacctcgccatcggccaacgcggccgacctcaacgccgggacgggactgccggcgcgtttcatgaacgccatgcccgcccacgccgaaaccagcagcatcatgcccagcagcatccaccagaacgacgagccccgcaccttcaacaactccagacgcgccagcgtgaacgggctgccggtcttcgcgcgggggcgcggcggacggcgccccgtcgccgcgaacactgccgcgccgctcattgtgcgcctccgtccgccgccgcgaacgccgcccgacccgcagcctgccggatcggcaacggacgacgcggggatgcgtgcgcggatgcgcgtgcggtgtcggaatccatggcattttgcgcctgatgaggcgtgggctcgcggctctgcgggctttcgatcagttcgaggaacgcctgctccagcgtcttgcgctcggaggcgacgcgatagaccgcgacgccctggccgacgagctgcgtgatcagggtgccgatccgctggtccggcagttccggcaggcgcagcacgccgccatccctgcccggcagccaccggtagtcgatccggtccgagcccagcatcgccgccgcgagcttcgggtcggagacacgcaaatcgatgtgcccctcctcgcgcagactgtcgagcgaaccctgatacaacaggcggccggccgcgatgacgcccacgaccggcgccatcttctcgatctcggaaaggatatgcgagctgatgatcaccgtgatgccccgttcgcggctcagacccatgatcatctcgcgcacctcgaccacggcctccgcgtccagcccgttcgtcggctcgtccagcaacaggagctccggctgcgagatcaacgccatcgcgatgcccagccgctgcttcatccccagcgagtagtccctcgccttcttgccctcatggccggccagaccgacctgccgcaaaatcgcgggcgcggccgaacccggcagattcaggtaatcggccaccatacggcaattatctagaccgctcaaccccgggtagaagctcggcccctcgatcatcgaaccgacccggcccgcctgcaacctgtgccggccacccaccttctcccccaacatccacatatcgccgctcgtggccgaggccaacccaagcaacagcttcatcgtcgtggacttgcccgcaccattcggccccagcaaaccatacacgccatgcgccggcacgttcagattcaacccgttcaccgcgagaaaatccccataccgcttcaccagcccgcgcgtcagcaccgcactcgacgccggatcagccggctgcgctgtatattgtattgtcattatcgtcctccaaaatccgtcaccataccgtggcatttacaatgaaaactcgttacgcgcgatacctcaatgaatgagagcggatgtgtactctcgggaggacattccttctgagtttgcaccgacatgcgacggaggtagggattcgaggctgctgtcaaatttttcctacgtgcgctggtatagggctttcgtccatgtccgtggccgttatccacaggccgtcctgcgtaagcccgtagcgttcgcgcagcatgtcgaacgtgtgcaggccctcgcgcatcgctgcccggtattcgtcgtcgtccgccgcgctgttgaggttggcggcgatgacgaacacttcggatacgaggcgttccatgtcgtgcgtggacagattctccgggtgtctttctcgtccgtcatcgaggaagggcgggcggttctccatcgcggcgcgccattcctggacggcgaggctgcggcttctggcatcgtccgcccagtcgtcgcgcagtcgtttcaatctcatgtcgtcgccgtacccgttccgcgccttccattcggcccattgacgccattgcccgtactgccagctgacgcgcgtgccggtatcggagcgtgcgagcccgaccagttcggggcgcgatttctccatccgcctgcatgatctctgcgcgttgatccggtcgtggtacgggttgatccacccgtcgtcggcggcgagctgcaccatgatgtgcacgtggtcgttgccgttggcggacagtccgtggcggaccgcgaccggttgcccgacacgatgctgtatttcgagtcgtatgacggtcggaaccatgtggccgtcagtgccgcgctcatggaggatgatgacgaggaggcgctgcgcggattcctcgccggggaatgcgggactcagggcgaggagctcgcggatcgggtcacagcggactggcagggtgggcgctatcgcagcgccgtgcccgcgttgcgtgacgcgggggtggatttcacgcttgatacccggctcgatatccgctcctggtcggacgagcccatggaacaggggcttgaagcatccggtctcaatggcgccaaggcgcgtgtggaacaggccatgagattgatcgagcaggccggggaatgcctgcgaagcgccgatgccatcgccttggacattgacccgcattacctcgcggccgctttcacgggcaagactgtcagcctgtgcgaccagctcgaacaggcgacgaagcagaccgcagcagaaatcgaggaaatgcgtctccaggagccatccatgggatcatcggacggcaacgatgattccatgtcctttttctctgtataggctagaataatcgagtgttaaggaggcctgcaatgtcgaatctggactataaaccgcctgagccgacaaaggcgcaactggagtacgcgcgttacctcagccgtttccaagcgccgcgtggacgccggactcttttcgcccgcaccgaatcggatatcgcggctgctttccgggaagaggcggcgaaccgttcctggaacgccggtgatctcgcctcccgggccggcatcgacccccggtccgccgatgatttgctccagcggggcgaagctccgattgaagcggtgttccccgcagccgatgcgctgggaatagacatagccgcgttgccgctttccagtctcgggagcgcccggtgagggagctgcacgcctggatgggcgattctcctgttggtgtgtttctggaggattccgaggggaatgtttccctcgaatacgccaagggtgtggatatgcccataagcctttccctccctcttgacgggaaatgggcaaggaaagcccctggcaggtttctggagaactttctcccatgtacgacgttttgaccacgaccttctggccttgggtgtccgccgagctgcccatgcgcatcggcggcgtcaccggtgccagggatgtgacgccccgtcattgggagaagctggcattggaaaacgacctcgatcccgagcgggtcgtcggccaggccaggcgcatggccggtctggtcctttccaacatcgaggaggcgtactcggatgtggagcctcgtatccgtgaccggatcctcatgctggtggatagggcgaacacgaaaatcgatccgatctacgattccgtatccatgactgatgatccgatgggcatgttgtccggcctgatgccttccgccgacgagggcagacgcctctgatatcggtgccggtatgcgccgacatgcttctttgcgcatgtcggcgcataccttttttgtctatcctattcttgcggtgctgagtgagtacgtggcgacgccgtttgcgccgacgatttggttcgtaggcatggtcaatctcatgtcggtgcgggtggtggattccacggcgttgcgcatctcgtcctgcacgagtccgccgggttgcagcgggcgagcccgcgtttcatgccccattggtagaagaccttgacgcagctgcgcactccgcgtctgccttcggtgcccatgccggcaagataaaatatgaggtcgtcttcggtcacgtccgtgatgctcttgttcacgattttggagaaacggacgatctggtaccatcgggttctcaaggtctcttccgtacggcctatggcttccatccagtcgatccacagttcgatggattccttccaatcctcgcgcggctcgacatgctcgcagcttttcctgttcgagttccagtacttcatggcagctccttcgcatagaaaaaggaagtgacgtcttcgtcacttcccagaaaatgctatttgcgattgcatggagcctagccaatgttatcgcggacggctgaagctcttcggaaaaccgggtgcatcgagaggaattgtcgagacacgccgatttgaaggacaagcaaagcaggtgtattctctactcctgttgcaaaaagccctacggctgcaagccagaaccgtatatcggacggttactggttcaagcccagtcgcaggagctcacctgaacgggtaactccggacgggatgaaaattgaatattcctgcgtagctcagttggcagagcatccgactgttaatcggacggtcactggttcaagcccagtcgcaggagccatcgaaagcctcggctctccgaggcttttttattttcatcgcattggtgaccagacacgacaccccatcatcaaccgggaaatccatggcgaagacctcaccactactcacatcaggcagacaggtcactgtcaattcaccgatgagaggcacagtattcccagtatcagtttgggaataccgtgcaaatcttacatcgagaccttggtcaggggcatggcggagtcgatcgggaagtcgggggcgctgggggccacgccggcttcgaccaggttcacgccgagcatggcgaccatggcaccgttgtcggtgcagagcttgatttgcgggatacggacgtcgacgccgtagttctcgccgaattcgagcagtttggcgcgcagctgcgagttggcggagaagccgccgcccacgatcagcgtgttggaatcgtactgccggcagccgcgcatggacttacgggctagcacggtggccacggagtcggccagggatgcgcacacgtcgtccaccggaatctcatggccggcggcctgctcgctttccacccaacgggccacggcggtcttgacaccggagaaactgaaatcatacgggtgcgcggcaccggccttgccttgggtcagacccatcggcaccttgatggcgtgcgggtcgccgttctgtccgtggcggtcgatgtgcgggccgcccggatacgggaagccgagcagacgggcgactttgtcgaagcactcccccgccgcgtcatccagcgtggtgcccaccacatcgatcttgcgcggcatgtcctccacatgcagcagcgaggtgtggccgccggagacaatcagagccagcgtgtccttggggaacgggccgaactgcagctgagtgacggcgatgtgcccgatcacatggttgatgccgtaaatcggcttgttcgcagcccaggccagcgccttggcgccggacacgcccacggccaggcaaccggccagtccaggaccggcggacacggcgatggcgtccacgtccgccaacgtcatgttcgcgtcggcgagcgccttggacacgcatggcacgaaggcctcagcgtgcgcacgggaggcgatttcggggatcacgccgccgtatcgcgcgtgttcctccatggatgaggccacgacgttggagagcagttcgcggccgcgtacgatggcagccgcggtttcgtcgcaggtggattcaatgcccagtacaaccggttcgctcatcgtgcttctccgttcttctccgtttgcttgccagtgatgtcttcagtgtccgccgatgccgtctgcggggcggcaaagcccacgaccctaggtttcaggtccaagctcatggtgtatgcgtcgatgccttcaggctggtagtagcgtttgcgcaatccaatgcgttcgaatccgaaccggtgatacagggccagcgcagggtcgttatccacacgcacttcgagcagcatgcgcgaggcgccctgacgcttcgcctcgtcgaccagtgcctgaagcaacgcagcggcgatgccttgccgctggtatgccttgcccacgccgatggtcatgagctcggcgtcctcgccgtcataccagaagccggcgtagccgcggacaaccgcctgttccacctctcccagcacatccagcagatacgtgcgggccggtgcgtccagttcctcgcgcaccatgttcgcattccatgcgccgcggccgaacagttcgccttccaactgtgcgatggagcgaaccgcaagatcacgacttacggcagtaatgtcaacaatcatcgaatcaacccgtctcacgccttatcggcgccggcatggccgagcacgtgcttcagcgggttcggcacttcggcgtccggccggcgcaggtacaacggttcgaccggcgtatcgggattacggttggcaaccagttccgcatcagtggcaaagatagcgagaccttgctccccttggtccaatacggattcatcggtgatgtcgccaagctgctcgattgcacccagcgcatccgcatatttgcgggccccatgacccacaacatccacgaccacatccacattgctgtcttctggcataagtccgtcgcggtacgtatgaacggcatcattcacgcgctgcgcgatggatgcagggtaatcgatatccatgtcaatcagagccgtcgccacggtttcgccatcgggatcgccaacgagcgggtccgagtacaacgcaaaatagagttgcttgcggcgtgcgtcgtttacggcaagagtgagcacatggcatttatgagtatcgccgagagtgccggctttgccacggcgaatgagattccattgcacctgagactcaagaacattatggccgataagcgtcgctcccgttgcgaaagccagtgccttggccgtaacgataccggcacgcagaccagtaaagggggctggaccggtacccacaatgactgttgcaatgtcagatgctgggaacccggcctcctcgaccgcgcgcgcgatattgacctgcagtttctccacatgggtgcgcgaatcggtctctacaatgggatcgcgccccacaatgccgaccgtcgagccgaatgaggtgtcaatcaccaacgtgcaacccatgaatcctcctagtcgtaaagcctctagagagtgtacatcgaggagtctataggcgcatggcttactgcagatcgaacgcggcccatcgcttgccgactgggacgaatgcgacggtacgagtgccgttgctggtgagttcgccgtctgatccagcggatgcggcatcggaggaatcgagaggtcgatcgatatggatttcaagtcgttctggcgccaaggcggtggccatttgttcgccccactccataagcaccaccgtgttctcgccggggtcttcaagttcttcgtccaatcccagcgattccagctcgtccaacaaacgcccgatggcgtcctgccccggcgcataggctgagccgcccagacggtaggcatccacatgcaccagatgagacggagtgccgtcggcgaaatgcccgtcgagttcgcgggcaatggtgaatgtaggagacacgatgggttcggtaatgcccagccccgccccgaagccctgggcgaatgtggttttaccggcaccaagagggcctgagagcagcaatacatcgccgccgtgtaccattccggccacacgacggccgagctcctgcatggcctcgctggtgggagccgcaatagtgtgttcgctcataaatacccctttatcgacttttaccgacctttatgactgatgtcttcaatgcagcgttccagcgcatataccgggtcgccaccgtttgttttgctttgctcatccgcccaggcgagcatacggatgcaatgcgcgagtcctgccgaagtccagccgccaagttggcgcatcgcattcttcagcacccaaggattggttttcgcttcggcctgggaaatcgtgccggcccgtaccgccgaggctttggcaatggtacggagcttcatggccaacgcgccgatcagcgcgatgggatcggtcccttgttccacagctgcacgcatcatgacgatggcttctgcggttttgccttccacggccttgtctgccacggcaaaaccggtgacctgcggattggcggtcaaatactggttgacacggtcgaggcccatcggattatcgtcaaagtcgaaacacagttgctcgcacatggcggcgagttcgccggttttgccgccgagtacggataccagctgctgtgcggccatcggttcgactctacgaccacgtttctcgaattctccgagcacgaaattgagctgtgcatccggtttcttcaaatccggcacgtcctctttgcgagcgccggctttcaccagttggtcgatgattttgcgccctttgacgccgccctcgtgctggcagatcaccacgctggagccgttcggatccttggcggcctgcttggtgtacgccaccagagcttcggcgagcttgtcgtcggcattctgcaggttgacgagtttgaccacggcaacgtcggaaagcaacgatgggctgacggcttcatcgaaggcatactggtcggccgatgtggcgtcgagttcgatgaggtcggcgtcgggcctcgccttcaacgcctgcgcgcacagtgccttggtgcgcgcgtcgttcaaatacgagtcgcctccgggcaccacggttaccggtgcattcgctgctgttttcgccatgccaccatctcgccacacaggttggacaatgacctgccggcatcacgattttgccggtgccgtcgagatagtggtattcggctgggattgcgatggttgctgcaccgaataccgcattggctattcggcttgccgccgcgtaaagaggcgtctcgtctcctcacaccagagactgaggcggacgcgccaagcggaaccgaagcgcacgccagacattccggcctcataacgacggacatgctggaggcaacggctgacgaacaccagtagcatgccgataccgatttccgccgtcacaatcagcacggcgcccgtaacgccgtctttccatgggatgacggccatcgtgctgccgcccagccacaacgccacccgttccatcaccagcgtgccccatgacgatatccacgcgaatacgccggccagccatggcgtgcaccatgcgcacgtcagtgccatcaatcccgccatcgtggccaattccacgaacggtgacaccagcaggttcgccggcacggacagcaacggcaattccggttccatcaacacctgaatcggcagggtgaacaattgcgcggccacggtcatcgccatcatttcggcgatgctgtgcggcatcgctcgctcaaagacaccggccagccgccccgcaaacagcacgatacccagtacggcggccgaagacaaggcgaatccgtagctggccgacatatccgggttcaccgccaatacaccgattatcgtccagcacagggcgctcaacgcttgcgtacgccgtcccatcgcatacgccaacgcacctatcaatcccatgatgaacgcgcgggtgaccgaatcactggggaacatcgccaatgccagcagcgcatatactccagagaccagcaacgccgtcagccgccgatcaagcagcatccacatgcataaccgacgcaccagtcctgccaccagtacgaagtggccgccggatacggccatgaggtgcatgatgccggaccggcggaactgattttccaacgtttgcgcatacgtgctgttgaccggcatcggaccggcatcgccgccgatataatcctggccaagcacacccatcgtcaatcccggcaccaacacacgcccctgatcggacaattgtccggtcacggtgaaaaacgcctcctgcatatgtgcgatcgcggcgagatgccacggcggagcccgcacctgcgctaccggctgttttccttccaagagcagccatagcggtatgcgtccatatcgcgcttgctgcaatacgcccgtcaacagatagaccgcgcctcgacgcaactgcccacaatacgattcatcggcgtatacgcgcacggcgaccgtggaacgtacgtccgcgccatccacagtgatgccgctcagccgtatgtccgtctgacaatcgtatgtgcgttggtccgaagcgatcacgggcgtcgtcaccgtggccatgacttcgtggtatgaactggattggcgagcttgtgcggaggcaggatcatgccaggcaatggtgtccgacgcgattgccgccatactgccgatgcacgccaccgcaacgcatacggtcaatgttcccgtccacctgatccgcaggcggaaagacaccacgatcatcgccgccacggcagcacatgacgccactgttataggcaatattcgtgtgacaggccattccatgccgattatggtggcgtcaatgccagctccggcatcggcctttgcctgaccggtgccgagtccatcagacatcctccatgcgaataatgcgtgcgctcccagactcgccgcccacatcactatggcgatcggcagcatcctccaatcgcggctcccctgctcgcgcagtatccgatccctgctcatccgaccgtcacctgccctcgcatggtctccaacgtcttggagccgatgcctttgacatccagcagctgatcgactgatgcatacccgccaatcgccgtgcgatgatcgatgatccgctgagcggtaaccggcccaatacctttgatggattgcaattcctcaacggtggccgtgttgaggttgatgagaccatgcgtggaagcgccggcatcgctgccgtccgtctgcatgtgcggagattgcgtggtatccgattcggggttcgctgtggcatcggaatgctccgactgctgcggatccgtgcgtttctcgtccgtggtgttctgcgatggcatcgtctgatctccagcggagccgcccgtggtctgcatggcggtcggttgagacagcatggccatattcatcgactgctggaccagcaatgccaagctgatgccaagggcgacgatcagcagcaatatcacggccaaggcatgcccaatggtgaacgacaatcgcggctgatcccgggtgagtctggctgattctccgacggcatcggcggaacgtacgccaatcagatccgataacgcacgtttgtcacgggtcgcctgccgcaggccgctctgcgccctttggggcgggtggccggccggacgaatccgtgcatggccgggaggcggcggaggcgtcgtgggccgttccactcgcggttggggcatggcttcgctctgcctgctgaatgcgcgcaaacggttggcggcatggtctgcgcgatggttatgagaaacgcccatgcatccacgctgatggattcatgggcgtttgtccagctgaaacggggtatgtggttctagcttatgaagttatccacaattgaggtggggcggttgacgctcccctcagtctcgcgacgcgagcggctcccctcaaagaggggagcctaacccgcaacaagtcactccgcggggacgatggagacgatcttcggggccttgacgatcaccttgcgcggctccttgccgccgagacggtcggcgacggcggccagcgcctgccgttcgaggtcggccggatcgatgtcgaccggcacttcgagcttggcgcgcaccttgcccttgatctgcaccacggcggtcacggtgtcgtggcccacgtaacgctcgtcggccaccggccacggctcggcggacagggactcggggtggcccagcttgctccacatctcctcgcagatatgcggggcgatcggggcgagcatcaggaccaacggctccactgcggcacgcggcacggccttcagacctgtcagatggttgttgagcacgatgagcttggcaatggcggtgttcggacgcatgccttccatttccgcggtcacttcggcgatcgtgttgttgagcagtttcagtgtcttctcatcgggcgcgtcctcggtcacgtgggcctggccggtggtctcgtccaccacgttgcgccacagacgctgcaggaagcgcatgccgccgaccacgttgcgggtgttccacgggcgggattcgtccagcgggcccatgctcatctcgtacaggcggaaggtgtcggcgccatagttctcgtacatgtagtccggagtcacgatgttcttgagggacttgcccatcttgccgaattcgcggttggcgtgttcgccgttccaggtgaacgtcggctcgccggaggcgtcggccggcccttccacgacctcgtccgccggcacgtactggccgcggtcgtcggtataggcgtaggcctggatcatgccctggttgaacagcttgtggaacggctcggccgaatccacatagcccagatcgaagagcaccttgtgccagaaacgggagtagagcaggtggagcacagcgtgttcgacgccgccgatgtacaggtccacaccgccttcatcacccgagtacttgttgtggttcgggcccatccagtagtcgaactcgtccttctccaccatgtgcttggtgtcggtcgggtcgatgtaacgcatgtagtaccagcaggagccggcccagttcggcatggtgttggtgtcgcggtagtaggtcttcttgccgtcgcccaagtcgagctcgaccttgacccagtcctcgttgcggctcaacggtgcctcgggattggactcggcgtccatcggatcgaaggtgcgcggctcgtagtcgggcacgtcgggcaggttgattggcaatgcggaatccggcagcaggtgcggggtgccgtcttcgccgtacacgatcgggaagggctcgccccagtagcgctggcgggagaacagccagtcgcgcagacggtagcttacggtgcccttgcccacgccggcggattcgagccaggcgttgaccttggcgatggcgtcgtccacgcgcaagccgtcgagcgacagcgcgtcgcccttagtgtacgtggattcgacgtgggagttgatcacgatgccgtcatgggagacgaacggcgccttgccttcgtagttggccaagtcatcgccggattccggcagcggttcaacggtgtagatgaccggcagaccgaacttcacggcaaagtcgtaatcgcgctggtcgccaccaggcacggccataatggcaccggtgccgtagtccatcagcacgtagtcggcggtgaacagcgggagcttcgcgccggtgatcgggttggtggcgtacaggccggtgaacagacctgtcttctcaccgccttcgtccacgcggtccttggcggtcttggcttcggcggcgagcctgtaggccttcaccgcctcgaccgggttgacatagccgcccttccagtcttcgggtacatcggccggccattcggcgggcacgttctccaacaggtgatgttccggggaaacaacggcgaacgtggtgccgaacagcgtgtcgggacgggtggtgtagatttccatgtccttgtcaccgtcggcagtggccacggtgaagtgcacggaggcaccatgggattcaccgatccagttgcgctgcatgagcttgaccttctcaggccaatcgatgccgtcaaggtcggcgatgaggcggtggccgtacttggtgatgcgcatggaccactgacgtagctcacgctggaagaccgggaagttgccgcgttcggacttgccttcggcggtgacctcctcgttggccagcacggtgcccaggcccgggcaccaattgaccggggacttggagatgtacgccaggcggaagtcgttcaagatatcctgctgctcggcgtcagtgaggtcggaccactgcttgccatcggactcgtggccaggaatggccttttcgccggactcgaacttggccacgagctcggcgatcgggcgcgcggagcccttggagccggacgggttggtggcctcctcgtcgtaccaggaatcgtagatgcgcgagaagatccactgggtccaacgcacgtagccggggtcgatggtggcgaacgtgcggcggttgtcgaagctcaggcccatgcggtgcagctggcggctcatgttggcgatattcgcctcggtggtcacgcgaggatgctggccggtctggactgcgtactgttcggcaggcaggccgaaggcgtcatagcccatggcgtgcaggacgttctcgcccttcatgcggtggtagcggctcgtcacgtcggaggccagataacccagcgggtggcccacatgcagacccttgccggacgggtaggggaacatgtccatggcgaagtaggcggcgcggccttcggcgttgcggcccttgccgtccttcaaatcgccgttgacgttggccgcccagaaggtgccttgctcgtcccaaatcttctgccacttgttttcgatgtcctgcgccagtgcggcgttgtagcggaagttgggctcttcggtttgcgtgctcttctcgttgtcactcataaatcagcaaggtagcctcgcaactggacacgtcgtcaatcgttattcagcatccgagacgatggctttggggtcaccgttcagcgaaaccatgagctttgtttggcttgtgaacgtatccttggcggccgtccagctgccatcctcaaccatgtcttccaatgcttccgcgattttctgcgccaattggctggtgccttgactcacggcgatgccataactgacctcgcccttgtccgcaatcacgtccatatactggggcccgttggccgcttgaagaccggaaagcaccgccatatcggaggctatggcatccgccgaccctacttgcacggccgtgacgcactgcgcataactgctacgctcctgaatccgagcctgcgggtggttgccgcggaagatgccgactgtctcgtcacctttcactgcgcacaccgtgccgtcgcctacgtcgcccaccgaacctgcgtcattggtgaatcggccacgctcatccgacctgaccagcaaaccgacgctggtcgtgaggtatggtccggcaaaatcaacgatcgcgctggacccatcggtgataggccaagaggcgacgaccatgtcgacctgtccattgtccagcatggagcgccggttttcggggcgaacctgcttgaagacgatctgcttgttcgcatagccgagtttggcggccacgtatttggcgatggtgatgtcgaagccctggtatgtgccgtcatgccatgctcccaccgatggttcgtcggctgcgaccccaatggcgatggtgggtccctccggcgctccggagacggtggtgacttgaatttggccgcaaccgcccagaccggacaatggcaatatcacgccaaaggccgcggcgaatcctgccatcagccgggagcgaaatccgcgccgcatcgggcggcgagcgcggagcatgctacggctgacgaacgatgaccaatggtgcataaccgtcaaacgccttacttgaacatgcgcgaacgtgtgaggaaccaggcgaccacaccggaaagcaccatggagatcacgatgatgagcaggaagccccaaggcttgtcggtgaacggcatgcccatcatgccgccgtcgaagttcatgccgtacatcgagaaaatcagcgtcgggatggacagggtgatggagatgatggtgaagatgcgcatcacgttgttcaggttgttggacacgatcgaggcgaaggcgtcggtcatgttcgcaagaacgccgctgtagatgttggccatctcgatggcctgcttgttttcggtgatgacgtcgtcgagcagatcctcatcgtccggatactgcttgatgcgctgcagggtggtgagtttctccatcacgatctcgttcgatttcagcgatgtggtgaagtacaccaaggtcttgctcagttccatgagcatcacgatctcgcggttctgcatggagtggcgcagcttcagttcaagcttgtcgctttcgcggtcgatgatgcgcaggtaacgcaggtacatcgtggcgttgcggtacaggatctgcaggatgaagcgcgaacgcatgaaggtgttgaagcctcggatcgtgccttccatgaatgggtggagcacgggcgtgtcctgcatgcagacggtgatgatgaggttttcggtgacgatgatcgacagcgggatggtctcgtaccagtcgcgtccgccacgctcctccacggtggggatgtcgacgatgatcatcgtgtaatcgtcttcgacgtccacacgtgaacgttcctcgtcatccaaaggggcgcgcaggtcggccaggtcgatgccggtctgtgatgcgacggtggcgagctccacatcagtgggttcgctcaaacataaccaggagccgttttccggtttctcgatctgctccacttggccattgattgagctgaagattctcagcatgtcgcctcacccgccttccgcgctttcctactgttctatcgctgtacggttccaaaccgagattagtctagacccaccgttcgaatttgcgagcggggtttcgcatagcgaccgtcaccagacgattggctgccaactcggcatgtgcggtcctcgcagatcggtcggcccgttctcccagtcggcgctgtcggcgatggcgggagccttgttgtattcctccaactcccacaggggctgttcggcggggatgccgttgacgctgtggcgcactttgagccggcaccaacaggcgttgcgcatgccgccgagtgcgttcatgccgtccgggtcgagttcgagcaggttggagatggtggcggtaatccatgagccatgggtgacgagcatcagcgtggtgggcgtgctgtctgaataggcggagtcgatgaccagtgcgcgcacggcatcggcacctcgctggcccacggcggcacggctttccacaccatgcttggtttcgcccccggtgtgctgtttccaagaggcgtagtcgtcggctgccacggctttgatttcggcgcgggtcatgccttcccactcgccgaagctgcgttcacgcagtcgttggtcacaggtgaccggcaatcccaaaatatcggcgaaggcgtgtgcggtctgttgggcacggaacaggtcggaggtcatcaccaccatgcgccggccggcggcgggggcctcctcgaactgtcgcgtatcagtgcgttcggcggcgtcaggaccgggctgggcgatggcttcgggatgctcggcaagccggttcaccttggcccagtagtaccgtgaagcgagcgcgaatccggtctggtcgacctgccattggcctacgatgtcgagcggcacatcgatctggccttgcaagcgatgttcgagattgtattgcgtacggccatggcgcagcatcatcacttcatcgatcatcggttttcgccacctcgttctcttgcggttttttcatactcatctcagcacaacccctagaatggcggcatggagatttctgagtcgacttgggcgttcatcgccaaacaccgccgtgaagatgtgcgtgatgtggccttgcacgccaaacatgatggcgacgtggatgtgccgttcgcgctggagcagattgccggctggcagcgcgcttcgctcaagctacctgactgggcgtcccatgatgggctgattttcccgccgcaagtcccaatggaacaatgttccagccagttcacggctcaatacaaagcccggttagcacagcgattgttagacggggaagcagtcgacgacgccgacgattccccgacatccctagtcgatctgaccggcggtttcggcgtcgacttttcttacatgtcccgagtgtttgaccatgccatatatgtggaacaacaatccattttatgtggtatcgctcgccataatttcccgatactcggccttggccacgccgaaatcatcaatgatgattcaacagcagtgcttgatacgcttggccgagcctccatgatcttcctcgatccggcccgccgtgacgatcatggctcgcgtacctacgcgattgccgattgcacgccggatgtgctgaccctgaaggatacgctgctggccaaggcaccgacggtcatggtcaagctctcccccatgctcgactggcataagaccattacggatttcgccggcgcggtgcacgaggtgcatatcgtctccaccggtaatgaatgcaaggaattgttgctggtgttggggcgcagccgttgcgcctcaccgctcgtggtatgcgtcaatgacgggcaggtgctgtcgtacaaggccggcgataacagcgacaatcaaacccctatcagcgattctgccttagttgcatgcaatacctgtaataccgaggatctcccggctgaggaaagcgcgaacagcttcgattcctcgcattggaagtacctttacgaacccaacgcctcaatcatgaaggccgggtgctttgctgttctcgaacagcgcttcgccgtgcatcacatcagcccgaatagccacctgttcgtggcggccgaacctatttccgattttccaggcagatcattcgtcatcgaatccatcgccaccatgaacaagagagaactgaagcagctattggccggtctcacgcacgccaacatctccgtacgcaatttccccctaaccgtggcccagctacgcaaaaaactcaaactcaaggacggcggcaacacctacctcttcgccaccaccgacctcaaaggccatcacctagtactgcgcactgaaaagcgaaaaagtggctccctctgacgaggaagccaccaatacgtcagctaatcagtccttggcgatggtcttgccggcggtcggaccggaggcaaggttctggatctcggtgacttcgagaaccggaatcacggccggcttcttggtgccctttttctcggcgatcttgacctgctcgttgtagatgtcgtcgtcaacgtgcagcaccacgttgccgcggaagcggtagccctgcttcttctcgaggttggcgaaggcgatgaccagcggagagccgttcttgaggttctcgtagtgctggccggcggtgcgctcgtggtaggcgatgtgcgtgtcgtccagcacgaacagggacatcttcgggccgaggtccagttcgccgtccttggagacggtggtgatccaaccgaggttgttcttgatgaattccttgatttccggagtaatgactgccatgtcgaatcctttcatgattgctatggacaacgtatttttactctttccagagtaccggtttcgaacgcgactagcccggatgttcgctgtgagtaacctcaccttcgcacagctttcatccggttcttacctgcttggcgatgccgcgccccggccgcgcaccagccacacacctgtcacacacccgacgcccatcgaccggtcgattttggccggtagttcccgtaatctgtgagccgagagagccacaagttttcctaactgtcctgaggtgcaccatgggtttggtcgaacgtttcagcaagctgcgcagccgctggtcccgcagctttcccccgaatctcgcccgactcatgttgctgggctgcgccgcattatggggtggcagttatctgctcgccaaattcgccatggaggcgattccgccccaatggctgatgggtctgcgcatgataggcgcctgcctgtgcatgctggccttgttccataagcacatcgtgccgtatctgacgccgaagatcattgtgccggcgctcgtggtgggtctgacctactggggcacgatggtcacccagaccatcggcctgcagaccattgaaccgggccgcagcgcgttcctgacggccgcctactgcgtactcaccccgttcgccacgtggatcatttcgagaacccgcccgaaggccatcaatctggtcgccggcgtgatctgtctgatcggcgtcggcttcgtctcgctgaagccgggcggttcgctgtctctgagcgccggcgactggctgaccatcgcaaccgccgtcatcttctcgttcaatctgacctgccttggtgtctacaccaaacgcttcgaccctatcgccgtcacttttgtgcagttcggcgttgccggcgtattgttcatcatcggcgcgttgttcaccgaacccatgccgaacgccagctggctggcaccctcagtagtggccagcgtgctctatctgttcctcggcgccacgatgagtgcccagatcatgcagaacatcggtctggctcacgtgcctgcctcgcaggcgtcaatcatcatgtgtacggaaagtctgttcgccgtcacgttctccgcgctgttctggggcgagacaatcatgtggacttcgctggtgggtttcgctttgattttcgccgccgtactgatgtcggtgatcagaccgaccgggcagtcgctgcatcgtaattgacgatgtcccgcggcctgcggcgacgcgaaacgcacgtgtgtgcgccgcagggcgtgtccgacctgtacgaaggccgattttgaaggtctcgtgtaggcctcgccccgcttccatcgagtctcaggcaacctgtcagcccgacaccctacggtcgtgcattgtgaagaagttttttgaaggaatctccctctcatccatcgtggcgggcacccttgccgccgtcacctcgttcctgctcgcatcgaagatcggcatcggcggttcggtgatcggagcggcggccagttatgtcgtctccgccgtggccaccaagatctaccagaacgtgctcaccgcctccggcgaaaaactccaatcggcctcgtcctccggcagcgggatcacgaaggacgccgagaacggcgatgccgatggcggcaccccccgaacggccggcagccggaccgacgttcgggacgagcccgatacggcgacgggcgtgaccgccgatgatgcttcctccacacgcagaccgcgtgaaatcgtgttcagccgggcgaacggcaggacgtactcggtcgatgagctgcgcaagtcccgcttccgcgcttcgaagcacaccgccatgatcgtcaccttggtgtccggcctgctcgccgtggcggtgacggccggcgtcgtgatgctggccacgcagggacgcggcacggacaatctcgtatcccccaccacgaccacgcccgcgcgcaacgacaccggcacgcgaacgggcacccccgatcagaacaacgctctgccccagacgggcaccggcgatgattcgaagggaaccagcaaggattcgaaaaccgacgccccctccaccgacctcgacgccaacggcacctcgggttcgaccggcgccggcgcctcggattcgaaaaccgacggcaccgccaacggttcgaacggcaccggcacctcaaagaatccgaccaccgaagacccgaccagccaaggcgtcggcggcagccagaccggttcgaacggcaccggcaccggctcgacgcaaaaagatccatcgggatcgacttcaaccagtaccggcaccagcggcaccagcggatcgccggccaccggcccagacgtgggcctgtctcgttaagtgtgtaactggcgttttcattgttgtgttccctcgcttggccggcggtcggcgaaggtgatggcaaaggcgttgagcgcgggcttccggcgcgcgctccatcgtatccgtcccttgccggtggggtccagcgagcggacggtcaggtacatgcacttgagcgcggcctgctcgtcggggaagtggccgcgggcgcgaatggagcgcttgaatctcgcgttgagcgattcgatggcgttggtcgtgcagatcacgcgccggatctccacgtcatagtccaggaacggtatgaaccgttcccacgcgtccatccacagcctgcggatcgcgggatatctcgcctcccacttgtccagcatcgcgtcgcggaccgccgccgcggcggcgggcgacgtccagatgcccagcacgtcgcggtcgccctccagatccacgccaacggccacgtagaacgcgcggttggcgacctgcccgtcgcgcaccttgacgacggtcgcgtcgatggacacggccgcgtacacacgatccaggggacgcgagcaccattcgtccttctcggccacgacccgctcggtgatgcgactgacggtctccctggacacgtccgccccgtagatctcctggaagtgggcgctgatctcgccggtggtcaggcccctgacatacagggacagcaccacctcgcccaccccgggcagccgccgctgccgtttcctgacgacgaccggctcgaacgagccatcgcggtctcgcggcacctcgatcccgaccggacctaccgaatcggtgaccacggtcttggcggtggtgccgttgcgcgtgttcgcggccctgccgtccttggatttcttgtgcttggcgcggcccaggtgctcggtcatctcctcgtccagggccgtctccagcacgcttttggtgaactgtttgagcagtccgtcgggccctgtcaggtccagtcctttttccttggccatgcgcacgaatgtgagcgctgcctcccgctcggcgttgcgtttttccgcgtccggcttcttcgtcggtgtcatgtttcccattgtcccagcacacatcgtccaccagcctttccgaccggccacacgaccggccagttaaggccagttacacacttcgagagacagtcccacgtataccggttctttgtttatgtaagggaatgattgatggttcggtttgcctgtttgtataatgcgcttatttatcttggtgccggatgtttttcggtctactatatggtggcctatcatgatgtgggcctgtcggtgctgctgatctccatcgtcaatgtggtgttcgacgtcagcgaatcggccagcgagctgcccacgtccgtgctgttcgaccggtggtcccgggaacggacgctgatcatcggcgtgttgtgccgcgtcgcgggattcatattgatgctgttctggtccgcgaacttcgccgtgctgtgcctggccaacgtgctggccggcatcggggccgcggtcgaaagcggcgcggcgtcctcgctgtacatcgaatacgcccgcaagcacgatccctcgctgggtatgaagaccttggtgtcaagactgtcggcgatgatcggtgcgtgcacgatatgcggcggtgcggtcggtgccgtgctgttcctgcttgactcccagctgatctggctgggcgcgacggtgttctacgtattggcgatcatcccgcttctcggtctgatgagggccggatcgcgcaccaaggccgcagcgacggatgggagcgggacgacggaacggcaggccgaggcgtccgtcgaatccgatggatccgccgagccgggcgagtccgggacctcgctgacggtgttggatcatgtcaggcagaccgtggcggccgcggccgtgctgctgcggaagccggagatatggaatatggtggtgttcaatctgggtacgttgtcggtgctgacgttctggcagctgctgctgatgggccaccagaccggggtctggtggcagttcgccggcctagtgttcactaatatcgcgcagatcgtcggcagtcgtctgggtatgctgcggctgcatccacgttccggcgacattgcgatcctcgtgctcatcgtgtcggcggtggtgcttgcggccacgccgatgccggcggtgaggatcctggcgttcttcgtgttctcctgcgcgcagatgtacgtggcgaacgcgatctccagcagcttgcacgagagcattgacgattcgatccgcgcgaccgcgttctccgtgggatcgctcgtattgatggccttcaccgcggtcgtcaccccgctgtgcggctacatcgccgacacgttctcgatttcctggggtacactgacgacgatccccctgctggtggccctcctcatcgccggacttgcgcgaaagcctgaatccgacaaacgggtaaaagtcgatatttcgttggattgagacgtcaagggcttgcggacacgatgcccgcaagcccttgacgtctatatgtcattcattcatggttggaatgcgctcctcctacgcgtgcggttgaatggttagtccatcgctatcgtcggagggtgtcagggccgaagatgaaaccgtctgttccgggtgcgtgatccaggtggaatggattggcaacggtgtacgacttgtcgccgggtttcacgtcgtccgtgtcgaattcgttggaatccttgtcgagcagtgggccgtccagcgaggcgggacagtacacggtgacgtgccagttgccgtcgtccatggggatgagcacggtgtagtacgccttggagaccgtctgctgcggcatcccttatggatgattccttgataaaggagtttcggggggcgggtaacaaaaacccggaaccgaagttccgggtttttgtctggctcctgcggctgggcttgaaccagcgaccgtccgattaacagtcggatgctctgccaatagacaacgggcaattcgactgccatgtcaggtatggtaatctcgaaccagccagaagatcgataagccaaattacctgcgactgaagtgaggacggaatcatgcgtagcgagttccctggtctgttgtattgcgcgggtgcattaatcgcagtgacctcttgggctcttttcatgttctcgaaagaagtccatcggaaaggccgaacagtatccatcctgagattgcccgtcatttggatactgttcctcgtgagttcggcgccggctctcgcatcatatccggtttttgaaatatactcaggatctatggatccagatgtcctcgatttctacagtcagccgttcatacggctactgccagcagcgacctgcatagtgaatctgtgcgtatcgacatgctgctccatggctcttgtcagcaagcgcagaaaaaccgaacatcgaaaaatctgaaccacagcgttcgagatgagatgccatggaaaaaccgctgtttccgctggccttggtgccgctggccgtcggattggtcctgatatccgtcgtgatcggatccaaaaaccgggaagagaacgcaaaaggactcttctgcgtgtcttctcggcgctcatggtcgttgccggcgcgttggccatcgcgagacaactcgtatgacgcttcacgctgcggctcggcttcccggctatcggtcgaagccagtccacgggccctctgtgccattccccgcaatcaaacagcaacgcccggtctcaagcccatgagacactcggaaccatgactaccatcatcatgcgcacctcgcatgataatcctagccaactgtttttggctttgttccaaggctttcgatttttgggaaacctgccggttacgctcgtttctccacgaggcccccacaggcacccaagaataatctcaactgattcccacccaccggtcggccaccatcagccggaacgctcgtatctcgcggcgttggcgatctcgttcgcctgaagcgtcgggcatcgcgttgacgatccgctcgaccttttcgcgcaccatggcgtcgagcttgctctcgaacatggcctggtcgaactgtatgatttccttggacatggctccatgcctctttccaatcgcggtttttcattgtctggcgactgaaaatcgtacccggcacggcccatgtccttttccatcaaggccggaatccaaaaatgcgcaagaattcggtcgttatccccttagagactaaaggaattctattagttcagcaaattcgtatatcaatttattttttagcatgtcggacaatacagtaaatcaaccactctatggctaagataccaaggtagaaaagcgcccatacggaaaaactaatcagctttacttctagtgtctgtacagttccatgcccgtccactgttcttataaaaaggaatacactaatgcataagaacaatatgaattgaatgatttggaaaattctccaacctttgttttccacaatcaccctcctgtaaccccaatctctatatgctgattccaccattataagccgcccttggtgaaatgtcaggcgccccgttgtctaattgaaagtgcaacacccgttagattggagattgtccggataaccagtccgaagggatgttgcacctatgggagaagtatattcgcacctgtcggaagaggaacgccaggtcatccggatcgagatcggcaacggcaccagcatccgcaggatcggtctgatgctcggccgcaacgcctcgacggtcggcagggagatcgaacgcgacacgtggttcccgtccaacgagaacgagtcctgacggccgtaccggccgaaacggctgaagacgggcccatggacgggcggatactacatcgccggccccgccgcggcgcaaggccgaccgcaggcgcgccgaaccgtgcaagcgctaccgcctgtcatgcgaacgcctgtgggcgcgggtggccgaatggctgggtcgcggctggtcgctgctgctcatcagcggcaggctgcgcgtcctgttccccgacgactccgccatgcgcgtgtgcccggagaccgtctaccgttggatccacgccgaccgccgtcgccgtgaacgctgggcgcgtcgtcttccacgtggccacgggaggcgtcgcaggcgtggcggcgggaggacgtcgcgtttcccgattcccggacgggttcccatctccgagcgtccgccggaggccggagaccgcagcggtttcggccattgggaggccgacggcgtgatcggcgccggatgcaacctgcacaccgaggtcgagaggaagaccaggttcctcatggccgggatcgtgcccggcaagaccgccggggaaagcgtcggggcgcagctggcgatgttctcgccgctgccggccggcgcgcgcggcggcgtcacgcacgacaacggcaccgagttcgcccgccacacgcgcctgcgcgacgagccgggcatggacacgtacttcgccgacccgtactccagccggcggcggggaagcaacgagaacaggaacggcatgatccgccggcatctgcccgaacgcagcgagatccggatggacatggcaaaggaggtcagggagatcgtcgacgaggccgacaaccgtcccatgcgcgtgctggactaccggacgcccgccgaggcattcgccgacgaactgctagaattgcaggaccaacaggggtgttgcacctctaaatagacatcgggcgcttactgtggcgagaactggatctacagggccaacgtgacacaaattatcgaagaacacggcatctcagtcacggtccaacggcagaatgccggaaccgctcgccgcatcgttacccaatgcattggtctcaatcttggtggtcggctaccccatgcccctaatcacaacccgcattcctgcaatcaggcatcaccacccggtctcaagcccatgagacacttaagaccatgactaccatcatcatgcgcacctctgatgataatcgcatgtggtcgtttttggctttgttccaaggttttcaatttttgggaaacctgccggttacgctcgtttcccacgaggcacctacaggcacccaagaataatccgggaacgttccaccaccctgccggcgctcagcgtcttcgccgaccggcacggaaaagcgcaataccccctgtggtttcatgatgttccgcatgggtggtgcccagaagcattcacccggcagcatgtctccatggcggacaatagacagaacgatacgcagcccgtgcaaccgtcccagccgccaatggcatccaaatccatcccgaatcccacaggcccattgcagacagcccagatcagctggctcatggtccaaagccgcctgcgacgccaccgtcccaatagcaggaacggtcagctgcgcagtatgatttccgccctgtcggccagttcccgttcgcgcacacccatggcagacaggatcgcttggctccgcgatggcatggtggaggtcacccgtgcgaccaatgcggagaagcgaccgaacaattccaagtaatcgtccttgtcaagcaaataaccaagatcaccgatggcctgatacacgttctcgttagcgcgcccatcgtaccgggcacaatagcagcgctcgtcatgcgcgcacaggttgcggtagaacaccagtctgttgaagatgctgtccagccgcttgatggtgatgcgccgtggcctgtcgtgcgtgtccgcatacaaaccggtgaaactttcggcgaccgccaatcggacggccggggactggacttggaagaaccataccgtctggccgaaggaaagatcgttggccagcacccacaacggaacctggccgttgtggtcttccatgcaatggcggatatacgccttgccgccatagtcgcccctgttgcgcgggttgccgtccaactcaagtatccgcttgaagaccttgtcgatcaatgccatggcgctcggacggcacctggaatcataatagtcgggattgagatacgggttgacctcgtcggggtgcagcccggtgaactcatgcgcgcacactgccttgagcgcggcctccgcccgtgtgatggaggaaaacaacagttcacgcaactcacggtcgaacaggaacagggcgtacagatcatcgaaacgcgcgcccgttccgtaccggtcatcaccagcggtcaggcatgcctttcggtcgaggaacaaatccttatagccattgacgatcggataatagccctcgcgcctgagcacatgacccgcaccggcatcgacggccatgccacgggagcgcagaatgcgcagctgttcgttcacactcctgtagggcttgcgcaacgacatggatccgacctcccccaatccagcgatgaaagcactgaggccaccccgcgtccacggaatggcctcagcgaaccgaacgaagtccagcttatttcgctgttacagaatagcgccaatcccccgcgaatgcaacccagccagacgacggacgatataatgaaacctccatatcatcattccagatgtttttgttcaataggaagttgaggttttagtcacgaaggtttttcgggtttaggcggaaaggcatgccgaccacccgtgggccttagcctgatggtgcttctagttccattcgggaaaggtccggaaaggcaatgatca

SEQ ID NO: 152 - DNA, 17890 bp, Unknown
  R206_24m  MAG No. k141_49282
acgggtggcctcgagctggccccagccgtggccgtactcagccacttccttgacctcgtagtcctcgaggttcggcagcttcaggtcgtcgcgaatcacaccaccgttggcgttcgggttggcaccgatacgcagctcgcccttcggcatgaaggcaaggacgtcgtccttgacagcgccgttggcgtcgaacagctcttccggcttgtaggactcgagccagttcttgaggacctcgaagtgggcctcggtgtcgcgggcggaagccagcggcacctggtgagcgcgccaggagccctcggtcttcttgccgtcgatgtacttcgggcaggtccagcccttcggggtgcggaagatcagcatcgggtagaacggacggtgcacgttgtcggtctgagcggtggccttgatgtcgcagatctcgtcccagatggtctcccacagctcggcgaagcgacggtggatggacatgtggtcctcatcatcgaagccagcgacgaactcgtagggctcgtaacccatgccgtggaagaactcgtggagctcttcgtcggagatgcgggacaggatggtcgggttggcgatcttgtagccgttgaggtgcagaatcggcagcacgataccgtcggtgcgcgggttcacgagcttgttggactgccaaccggtagccagcgggccggtctcggcctcgccgtcgccgacgatggccgggacgaacaggctcgggttgtccatgatggcgccgtaagcgtgagacagagcgtagcccagctcaccaccctcgtggatggagcccggggtctccggagcgaagtgggacggaataccgcccgggtaagagaactgacggaagaacttctgcagaccagcttcgtccttggtgatcttcgggaaggtctcggtgtaggtgccgtccaggtaggactgggaggtaccggccgggccaccgtggcccgggcccatgatgatcacggtgttctggccgtggtcagcaatgaaacggttgatgtggccgatgaggaagttcaggccaggggtagtgccccagtggcccaccagacggtgcttcacatcttcgcgggtgaagggctccttcatcagcgggttggaacgcagataaatctggccgatggaaaggtagttggcaacgcgccagtacttgtcaacgccttcgagggcttcctcggaaaccggagcgttgagcttcttccaaggggtgccaataacaggactcgtcatgtgtactcctgtactcctgcacgtgatcgtgcgattgattatttctgttcggtcacggttcctgacccttgcggtgccaaggttttccgttcccaatcaatcgtcatggtacgaggacaacgcgacttttgaacgatttcttgcgggtgtgttcgaaattgttgcggaaatttcagtatttgtgcggttcacctgaccgtttgtcaacattagttttttcaacatactttttcagaacggcggaagcatgcggaaatctagcatctggctagaacagcgcacgttcgatttcccatgttcgaaatcggcgtgttgtccgactacaggcatgtagtttgttcgatttgcgcacatagtccctgcgtgtcggccttgtcgccttgaccagtgataatcaggggtgttcagcccacgtaaaattccaatgaacgttaggggaatatcaatggcaaacggtcctgtgcttgtcgtcgacttcggcgcccagtacgcccagctcatcgcccgccgcgtgcgcgaggcaggcgtgtactccgagctggtccctcattccatgccggtcgacgagatcctggccaaggatccgaaggcgattattctgtccggcggcccggcctccgtgttcgagcccggcgcgccgaccatagataccaaggtattcgaatccggtgttccggtgcttggtatctgctacggcttccaggtcatggcctatgagctcggcggcaaggtggataaggccgctctcggcgaatacggcaagacctcagccaccatcgacgacgccgacggcatcctcgccgactcccccgccgagcagaccacgtggatgagccacggtgtggcggtcgaacaggccccggccggcttcgaagtgctggcccacaccgaaggcgcgcccgtggccgccatggcggacgaatcccgcaagctctacggtgtgcagtggcacccggaagtcaagcactccccgcttggccagaagcttatcgaaaacttcctgcaccgttgcgccgcgctgcccaacgactgggacgcctcctcgattatcgaggatcaagttaagaagatccgcgagaaggtcggcgacgccgaggtgatctgcggcctgtccggcggcgtggactccgccgtggccgccgctctggtgcacaaggccatcggtgaccagctcacctgcgtgttcgtggaccacggcctgctgcgcaagggcgaggtcgagcaggtcaagcacgacttcgttgccgccaccggcatcaagctcatcaccgtggacgcggccgacgacttccttgaggccctgaagggagtctccgagccggagcgcaagcgcaagatcatcggtgagaagttcatccgcacgttcgagaaggcccagcgccaagtgcttgaagaggccggcgcgcgcggcaaggaagtcaagttcctcgtgcagggcaccctctaccccgacgtcgtcgaatccggcggcggcgacggcgcggccaacatcaagtcccaccacaacgtcggcggcctgcccaaggacatcaagttccagctcatcgaaccgctgcgcactctgttcaaggatgaggtgcgcgccatcggcaccgagctcggtctgcccgacgaaatcgtctggcgtcagcctttcccgggcccgggtctgggcatccgcatcatcggcgagatcaccaaggagcgcctcgacctgctgcgcgaggccgacgccatcgcccgcgaggagctctccaaggccggtctcgaccgtgacatctggcagtgcccggtcgtgctgctcgccgacgttcactcggtgggcgtccaaggcgacgagcgcacctacggctcccccatcgtgctgcgtccggtgagctcggaggacgccatgaccgccgactggtctcgcgtgccctacgacgtgctcgccacgatctccacgcgcatcaccaacgaatgccgacagatcaaccgcgtcgttctcgactgcacgtccaagccgccggccacaattgaatgggagtaattgctctctgtgacgaatgggattctccatcggggaatcccatttttgttgccgacgatgcccggtataatttttccgcttacgacgtcgtccggaaagggataccgacctctttgcgccagggattcgacaacgaaaaatacatcgaactgcaagccgccaacatctcaacagcgtgaaccgacgcttgcactcggatgaaacgctgattgcattgtcaatcaccagcgccaccagtcctgtggccgctcgcgtcatcgacgggctcaaacagttgcagggctgcgacgcctttttctccgttatcatctcatccacggacgaggcgttgtatcgcaaactcggcatcaacgtgtgctgcgaaccgaagtacgaacgggtgagtctgtatcaccggtaaacgccaccgataagcgcggtatgccgcgaatcgtcaagccggtaatcatgcagcatgcggcctgacgattcgctgctgtcgcattgtctctcccctcgaccatgctgggcttgttttccgtttgttggagagaacgggggatgccattagcactacggtgagagaaggattatccgtgaatcggttcgtgggtttggacggcatcaaaggattggcgctgatagccattgtgctgtaccactgcatgcagcaactgctgccaggcggattctacggagtcgacgtgttcttcaccgtctctggattcctgattgccgtcagtttgattcgttctctggcgaaaaccggatcgctgaatctcgtgcgatatatccccaagcgtgcagtacgtctctatccggcgctgtttctgctgattccggtcaccgtctccgtcggctggctgctcgatcacgacattctagtttccatccgcgaccaagtcatcaccgtgctgctgggctgctacaactggtacgccattgccggaggccaaagctatttcgaccaaatgaacccgcaggtgtttcgccatctgtggttcattggcgtgctcatgcagttctacgtcatcgtgccgttcatcgtctggctgatgtggaagctccgccagacgaaactgtcctcactcatcccactgggactcgcggcgttcagcagtatcgccatgtgggtgatgtacgtgcccaagggcgaccccacccgcgtctacttcggcaccgatacccacagcatgggcctgatgctgggtgtggctctcgcctggtgggtcaccgctcctcagttgggccacgctcgtcagggagctgtgccgatgccccgcaccattagatcgagcgcttcggccgccacgtaccgggctccgttacctcagattcctgtaaagcatcgcatctggaatgcgacggcaccggtattggcattcctcagcctgattgccttggtcaccatgacggttatcggcaaacaggatgcattcgccttccgcggcggcatcatattgtccagcctgttgtccgtgctgctgattgccggtaccatctccgacgattcctggatgcaaagcctcatggtgttcaagccattggccgccctcggcaagtattcgtacggcatttacctgtggcactggccgttgtggattctttccagcgcccttgccccgaagatcttcaaggcagcagggccttggcctctcatcatgaccgcgttgctcaccgccattgcggtgatgatttcctggctgatggtggagaaaccggcggcaatgcactcggtgatatccgtcgtggtgccccttcgcacgaacaagaagaatcatgcggcccgggttattgccgttgacgttatcctggcgctgtcgttggtcggctgcgcgcagggcattactcatgcacctgcgaaaaccgccatgcagatccagctggagcaacaggccgcacaactggaacgcatacagaaaaccgaacacgtgctgctgcgccatgccgtgccggcaccgcccaagcccaagcatgagatgcccaccggcgatcagattaccgccataggcgattcggtgatgctggcctcatcacagggcctttcggaagtcttccccggcattcagaccgacgcgagcgtttcccgctccatcatggtcgcccccgaactcatcggcaatgatctgtccgccggcagtctgcggcaatgggtgctgatcggccttggcaccaattcggcaatcacccctgatcagctggaccagattcgtaatatgatcggccccgaccgcgtgctggtactggtcaatgcccacggagaccgtacgtggattccacctaccaaccaggtgcttgccgactatgcggccgcacatccggacaatgtggtgctggtggattggaatgccacagccaacgcgaacgcgcaggtgctcggctccgacggcatccacccgagcatggatagcgatatctatgcaaaggcggtcaaacaggccatcgaacaatggatcgcaagcggcaggtgaacggcaggcaacgctgagttgtccaaccggtcgtgaagaacggctatgctgaagactgcatcaacgagaccacacgttgggagacatggtgagcgcaatccttgaagggaagcccgataagaatcttattctcgttacgggaaggattcatccgaaattggctgaggatgtcgccgagcagctcggcatcgacgtccttgaaaccaccgcatacgatttcgccaacggcgagatgtacgtgcgctacaccgaatcggtgcgtggcgccgatgtgttcgtgctgcaaagccactacaaacccatcaacaaggcgatcatggagcagctcatcatgatcgacgcattgaagcgcgcctcggcccgttccattactgcggtctgcccgttgctcggctactcccgtcaggacaagaagcaccgcggccgcgagcccatctcctgccgtctggtgttcgacctgctgaagaccgccggtgccgaccgcatcatgtcggtcgatctgcatgccgcgcagtcccaaggcttcttcgacggcccggtcgatcatctggtggccatgccggtgctggtcgactacatccgtgatcgtttccaaggccatctcgacaacgtcgccgtcgtctcccccgacgccggccgcattcgcgtggccgagcagtgggcgcagcgtctcggcggcggtccgctcgctttcgtgcacaagactcgcgacatcacccgcccgaaccaggcggtcgccaaccgtgtggtcggcgacgtcgccggcaaggactgcgtgcttgtcgatgacctgatcgacaccgccggtaccatcgcgggcgcatgccacgtgctgcaggacgcgggagccaagtcggtgaccgtggtcgccacgcatggcgtgctctccggcccggccatcgagcggctcaagaactgcggtgcgcgcgaggtcgtgctgaccgacaccgtgccgattcccgaggaaaagcgctgggatggcttgaccgtcctgtcgatcgccccgctgctggccagcgccatccgcgccgtattcgaggacggctcggtcgccgaactgttcgacacctaccccgagcaccacggtcaaggcttcctgttcgcctgatcacgtgcgtgtttgttcaaggaaagcacacgatgcgagacgcgacatggcgtagtctttcggtaaataccgacagtatggtataaatgaacacttgtgggccgaaagcccacgactcccccatggtgtaatggcagcacacgggtctttggaaccctttgtcttggttcgagtccaggtgggggaacggctgacggccgctcgacatccgggcggccgtctattgttttgaggtgtttccaccctcaatagacattccgatcgaagggaatacgtcagttatggcattatccgcagccatcgtcctcgccgccggcgagggtacccgcatgcgttccaacaagccgaaggtgctgcatacttttgcaggcaagaccttcctgaacagggtcatggattcggtgaccgccctgaaccccgacacgctggccgtggtcgtgcacttccaggccgagcgcgtcgccgaagccgcccgctcctatgacgagcaggtcaccatcgtgaaccaggacgacattcccggtaccggtcgcgccgtgcagtgcgcaatggcacagctcaccgaggctggcaaggtcgatggcccggtgctgatcgccgcctccgacatgccgctgctcgacagcgagacgctgcaccgcctggtcgaattccacaccgcctccggcaacggcgccaccgtgctcaccaccatcctcgatgacccgaccggctacggccgcatcatccgcgatcgcgaaggcaacgtgctgcgcatcgtcgagcagaaggacgccaaccgcagcgaactcgccgtgcaggaagtgaacacctcggtctacgtgttcgaggcttccgtgcttaccgaggcaatcgccggactgaagtcgaacaacgcgcagggtgagttctatctgaccgacgcgctggaaaccgccaaggccgctggcaaggtcggcgcgttcgccgctccggatccgctcaccgtcgaaggcgtgaacgaccgcgtgcagctggccgcgctgtccaagacctacaaccgccgcgtctgcgagcgctggatgcgcgacggcgtgaccattcttgacccggaaaccacttggatcgaggacgatgtccagatcggccgcgacgccaccatcctgcccggttccttcctgcaaggccacacggtggtcggcgaggacgccatcgtcggcccgtacaccaccctcattgacgcaaccgtggacgaaggtgccgtggtcgagcgttcccgcgtgcaggaatcgcacatcggcgcacgcacgaacatcggcccgtggacctacctgcgcccgggcaacgagttcggcgaggatgccaaggccggcgcgttcgtcgaaatgaagaaggcgcacatcggcaacggcaccaaggtgccgcacctgagctacgtgggcgacgcccagctcggcgaccacaccaacatcggcggcggcaccatcaccgccaactatgacggtgtgcacaagaatcgcaccaccatcggctccggctgccatgtgggcgccggcaacctgttcgtggccccggtcgaggtcggcgacaacgtgaccaccggtgccggctccgtggtgcgccacgccgtgccgagcgacacgatggtctactccgagaacacgcagcacaacgtcgagggctggaagcccgcctgggagcgctgaaccatgcccgcacttcaggattccatcaacgccgtccgcatggccgccgaggccgcagaccgtatcaaggccaccgacatcgtggccttcgacgtagccgacctgctcggcatcaccgacatcatgatgatcgccggcgcctccaacgagcgtcaggtactggccgtggccgaggaaatcgaaaaggacctgttccttaagtgctccggccgtcagccgcgctctcgcgagggcctgaccgagggccagtgggtgctgcttgactacggtgatttcgtgattcatgtcatgcacgaggaatcgcgcgaattctacgggctcgaacgactctggcgcgactgcccggccatcgatcttgaactcgcacacccggaaacggcggagcatgcggacgctgctgccgtcaccaccgcgtaacgtgcgaatcacataacgctgatattcgctgatattcgctgatactcgctgatattcgtgtgtcgggctgcctgttgccgaacgtcattgacggcaccaggcagccctcccttttccctgtttcctcactggaatcgaaaggatcgtcactatggccaatcatgttcgttccattttccttatccgtcatggacgcacttcctataacgccgctcacaagctccaaggccaggtcgacattccgctggacgccgtgggtgaatggcaggtcaagcagaccgccgcggccttgaaaagcctgtacgtcgatcgtcggccggaaatcaaccaccggttcattgtctgctccgatttgaagcgtgcgcacgccaccgcgcaggctttcgccgacgtattgggtggaatcgagcccgtcgatgatcatcgcgtccgtgaacgcagcttcggcgactgggatggccatgccgtggctgaactggccgaacgctaccctgaggacttccgttcctggatggagtctcgcggcggtgaactgaagtatggtgccgaacccaaggaagccgtaggcaaacgcggtgtggaggctcttgaggactggtccacgcgtgccggagacgacacggacctgttcgtgttctcgcacggcgcatggatcgcgcagacattgcagaccctgttgggcatttccgcgatcgatccgaccttctccacggtggtctcattgcgcaatgcgcactgggtgcgcttggtgccgatggacaatcccgatggcactgtgcgctggcgtctgctggactacaatcacggtccggccatcgccgacaccgacgaatgggaacgcgaacgctgatcatgttcccgactcccctgctaatccaataggtccggtgcattcggaaccgttcaagcaataactgaatgactcaatgcctgaataatggcggaaacaagccaaaaagtgtcgccaaatcacacttttgtcatttggcgacacgccggcttttgccagaatcgacatctcgtcgtaatgtatacgaggtccgaacaacgggccaacaattgaaaacggggctatagcgcagctggtagcgcatctccatggcatggagagggtcgggggttcgaatccccctagctccacgacgaagccatcaaatcgggtgatatggtggtttctccgctggttcgtggcgggtcttgtgactcccatgaatcagatagcttcactcggggctatagcgcagctggtagcgcatctccatggcatggagagggtcgggggttcgaatccccctagctccacaatcaaggccggtgcttcacacaccggcctttttcgttttctatcctatcgggcgacttttgcgcaacattcccgggaatgcgtcgcaaaacagggactggaatgcatgcagtgcgatactttccccggaaagtatcgccaaggggacgctcttccgattggcgcgacaccggcgtgagagataacagtaatcgccactacaatgaggtgtggtccctatcgtgttgatcatcaaaggagacaaaaacatcgtgaccgtcacccgtgtatatatcgccagccctgaaggcgccaatggccgcaacgtcgtcgcttacggcgtgctcaacgcattgacttccaagtacaagaccatggtgttccgccctgctgtgtccaaccatgacgaattcaccccgatcctgctcgccgcttccaatgccggactcggcgtggccctgtccaccggcctcgatgtgcacaaggtgcgcgccgacaaggacaccgcccgcggagacatcgtcggcgagttcaactacgccatggaggtctcccgcgcgaacgccgccctgatcgtcggcaccgacaaatcccacgtcaacgacccgaccacctacgagttcaacgcggacgtcgccgccgatctgaaggccggggtgttcctggccgtgtgcaccatggaccgatggccgcacgagctcgacgaaaccgtgcaactgtccatcgagggcatgcgcgccgcgggcaatacggtgctcggcatcttcgtgaccggctgcgagccgcgccacgccttctccgtcaaggagaccctcgccaaatacggcctgccggtctggaccctgccgcaggtgcccttcaccgacgaatccaccaaggatctggcccttgagaccttccgcaagcacgctcccatcgacgaggtgctcgccgcgctcgacgtggacgtcaccgcgccggtcacgccgtacgccttccaattcgacctgctcggcaaggccaagagcaacaagaagaccatcgtgctgcccgaaggcgaggaggaccgcatcatcaaggcggccgattacctgctcgaacgtgagaccgtgaacctcatcatcgtgggcgacaaggacgccatcctggcccgcggcagggaactgggactgaacagtctggagcgcgcccgcttccaggctatggacgacgagaacgtgttgaagcccatggtcgccaagctgtgcgagttgcgtgccaagaagggcatgaccgaggagcaggcccgcaagcaactgaccgacgccagctacttcggcaccatgctggtggtgctcggctatgccgacggactggtttcgggttccgtgcattccaccgccaacaccgtgcgccccgccctgcaggtcatcaagaccaagccgggccagaaactggtctcgggcgcgttcctcatgtgcttcaaggaccatgtggccgtgttcgccgactgcgccatcaacctcaacccggacgccgagcagctttccgaaatcgcgttgcagtccgccgagaccgcccgcgccttcggcatcgacccgaaggtcggtatgctctcctactccaccctcggctccggcaagggcccggacgtggacgtggtcgaggaagccaccaagctgctcaaggagaaggctccggatctgccggtggtcggttccatccagttcgacgccgcctggtcccccaccgtggccgccaccaaggccaagggcaacgatgtggccggacacgtcaacgtgttcgtcttcccggacctgtgcgccggcaacatcggctacaaagccgtgcagcgctcctccggcgccttggccatcggcccggtgctgcagggtctcaacaggccggtaaacgacctgtcccgtggtgcgatggtgcaggacatcatcaacaccatcgccctcaccgccatcgaagcgcagtgagcccggcttggctcccgccagcgggagccactgtaatgcttattttgtagcaagcaacgagtaatctaatcaacggtaacccgtgtctcacgggaacattcaatcacaatggaggatgcccacaatggcgaaaaccgtccttgtcatcaattccggctccagctcgatcaagtaccagctggttgatctcgaatccggcgaaggcctcgcttccggcctcgtcgagaagatcggtgagccggtcgacggccactacaagcacgagtacaacggcgaaaagcacgagcttgaagagccgattcacgaccacgagcagggtctgaagcgcgtgctcggcttcttcgaggagtacggcccgaacctgtctgaggctggcattgtcgccgtcggccaccgtgtggtgcagggcggctccatcttcccgaagccggccctcgtgaccaacaagaccatcaaccaggtcaaggatctggctgtgctcgccccgctgcacaacggcccggaggccaagggtgccgaagtcatgcgctccctgctgccggacgttccgcagatcttcgtcttcgattcctccttcttcttccagctgccgaaggccgccagcacctacgcgctgaacaaggaaatcgccgatcagtaccacatccgccgctacggcgctcacggcacctcccacgagtacatctcctccgtggtgccggacatcatcggcaagccggctgaaggcctgaagcagatcgttctgcacatcggcaacggcgcttccgcttccgctgaggtctccggcaagccggttgagacctccatgggtctgaccccgcttgagggcctgatgatgggtggccgtaccggtgacatcgacccggctgtggtcttccacctgatccgcaacgcccacatgaacgtggacgagctcgatgccctgttcaacaagcgttccggcatgatgggcatgaccggctacggcgatctgcgtgaggttcaccgtctggtgtccgaaggcaacgaggacgccaagctggctctggatgtctacgtgcaccgcatcgtcagctacatcggcaactacacctaccagatgggtggctgcgacgtgatcaccttcaccgctggtgtgggcgagaacgacgacgtggtccgcaagatggtgtgcgacaagctcgctccgttcggtgtcaagctggacgaggagaagaacgccacccgctccaaggaaccgcgcatcatctccactccggactcctccgtgatcatcgccgtgatcccgacgaacgaagaactggccatcgcccgcaagtccgccgcaatcgccgaggctggcaccgatacctacggcaacaccttcgccaagtaagtaaccgccgttaggcatctcactaatctctagttgcaacactatgggggctgattccgattggaatcagcccccattcgtatatggtcatgagaccactacccctgcgtcatactcccctcagtcgcctccggcggacagatccactcagagaggggatccaggccctataacttggctcccttctctgaggggagctgtccgcgtagcggactgaggggagttccaccagaacacaggaccccttactgcctcagtatgccactccacataccgacgaaatcaggcaaggtcttgcgcgtggtggccacgttgatgacctcgatatcgggaatacgcagccccagcatcgcggcgaacgtggccatacggtgatcagcataggtttccatcacggcaccgtgcaacgtctccgccggcaccggttcgatacgcaatccatcaggcaattcctcagccgctcccccaacacgacgaatctcgttgaccaatgcctccagacgattcgtttcgtggccgcgcaggtgaccaataccaaccatgtctgtcgacttatcagcaaacaccagaatcgccgccaacgagggcgcaatctccccggccgccgtcaaatcgaacgtacccagcccacgcacggtgccgtcaccggtcacctcgcaatagcgcacgccgccgatggtcgggaacgatacttcggcacccatctgctccagatatccgggcaacaggccgcccggctgggtggtggtttcaggccaatgaggcacccggaccgtgccgccggcgatcaatgccgcgccgaggaatggcgccgcgttcgacagatcgggctcaacggtcaccttgctcggcagttgcattgcgcgcggttcaaccgtccatgtgcgggcggattcgtcggcctcaaccgcaccgccggcaccggtcacatcggccacggtcatgcgaatgtgcggcaggctcggggtcttctcccccgtgtgcgcgaggtgcagaccgccaggcagtttggaactaatcagcaacaggccggagatgaactgggaagaaccggacgaatcgatgctgacctgcgcctgggcagccggcaaggttgcaggcggcgtaatagtgaacggcagacggccaacctcgccgtggtaatcaaccgttgcacccagctgttccaaaccgtcaagcaccggcttcatcggacgtgcataagcctgttcgtcgccatcaaaattcactgggccatctgcaaacagggcaaggccgggcacgaaacgcatcaccgtgccggccagtccgcagaacacattgacgttgccatggaatcggccggatacaggaggagtaaccgttacggtggtgtcggttgcggaatccacgtcgcagcggacaccgagggcttcgagtgcgcccatcataaggtccgtgtcgcgcgaacgcagcaggccaatcagagtaacgggcttgctgccgagggcggcgagaatcaggtagcggttggatagggacttgctgcccggcaccgttaccgtagcgttcaacggctgtgcggcgagcggggcaggccagagattcgtgagtcgttcagtcataaggccaaatctatcaaacaaattattcaccggtcggcagcgatgcgggattcgatctgctgatcaggtgcggaagacggctgctcaaaaccgccttcgatggcctgcgcgtgcaacaactgagcggccgcgcgatcggcctcgatggcggcgatctggcgcgagaacacgatgaaccagccgaggaacgccagaccagccaacgcctccacattggtgagggtgttgtgacccatcatcatattgacccagaatgcagcgcatacgagcgcggtcaggtcggaggccaccatcactgctttggacaggcgtggcgcaagccacggcaggagcacgaacagcagcagcatgacgaacggcaggcctttggcgcatatattgtgcaagagattgtgtggcgtgtaccgaaacacgccgatgccgatgaatgccaggccggccaccatcagcaggaaggacagaatggagatgcgcagcatgaaatgtgggatttcgtagccgcgattcggatctctgttggtgcggtcgtgccagaggcgctgtagccgttcggtggtcaccagttcggagatggcgaagtagctgacgatgatgatgcatgtgccggcaagaatcagcgtggagttgaacatacgggccgcaaacgtggttctgtcgccgagctgcgaaaagttgttgtgataccagtatgggtcgtcggtggtcatgccggcggtgaccacgccggagatgacgaagaacggcaacagactggcaatagttttggcgttcatcatctccgcctgtacaaaggtcatgtaccccaccacgccggcgaaggcggcgcagacgctggagatatagccggagaagatggcattgcccatcatgtcgttggccgcaccgatgagtgcaaaagacgacaggaaaatggtcgaggcatacactaccgaaagggcgacgatttcgaaaatgcgacgaatcggtgcaaaccaaccatgtttgaggttcaatgaacgtgatttgcgcgcatagccaataatgaaggaaatgacgccgcatgccgccacgatgcccgaacataccatgaatcggcgttgcgtcagctgccagatggccggcgcgtattccatgtacaggttcatcgataccgcgccaacgatggcgcaaatcaagaaggagatgagtccggaggtttctgcacgctgatgacgtcccatgccgggcctcccctatctattcgatgccgcgttatctttcaacaacaaacaaaactccccccgaggacaacgctttactagcaagccagcgggatttggctgtcgccattctactgaaaatctgaaacactacaaaaaaaacgattatgtacgggcttcttagcctttgcgactatcgttaccgccttgccgagtaccgttgttcatgcagaaagaaagcagtattggacacaatcgaatgagcgtgtcggtatcgttgaaaaagtaatgaatgacggttctatcggttcaacctttaagggacgaaccagccgcggcaccatggcgctgatgcatgactatgccgagctcatcaatgaattacgtccgacagcagagcaattcaccgagatcgagcaataccgggtcaaacgaattcaggcgttcttcaccagcaaaccattcaagctggagtccgacaactcgctttccgttgatgcggccgtggaacatctgctgcggcaggcagcgcagcggcgaagggagaatccgggcaccatgtacgtcggcaccgtcctgcagcatctcgtcgcggcaaagctcaccatcgttgctccggaagtggaaatcaacggcgcgtccgttgctgatgatccgagtccgcggcttccaacggtgaggccgcggaccgtctcacaaaaccgtccgcggctccgccctcctgtttcgtcgcaactgactacaccgacgggttcgggcgcttcgtcacgaaaacgccattgcgatgcaccgtatacgcgccgccgtcactgcctcgttccgcccggaacaggacgatcggctcccctgcgatgtcgcgcagttcgacatccgatctgccacgtgtcagatagaagtcgaatatggcgtcgtcggattgacgcacggtgtgcagaacgtcagaggtcacgccgctggcgggcgaccgcaggttggcttccggctgccggccatcctgcggctgcacggcaagccagcctcccacgaatcgcgtcagatcgctcacgcccagatcgcagccgaggaaatacgcctccccttcgccgtacgtgttgcgggtgatcgcggccatgccgtcaagctcccactcatccgcttcttcgccggcatacgaggcaagcacctgcacatgcggtccggcgacggtcacgtcaccgagcttgtcgatgacgcgatcgagccagtcgaaatcccaatggtcttcgatgggctggaggcgatctcagctgaagatggcaagggccacggtgttgacgccggcctggcccatcaggcggatgtcgtcatcccagatttcctccggccattagtcgggactatagtcaccaccgaaagcgatgccgcgtccgtccgcggtcagcagttttggccatgcgaagtcacgtcatgcacgcacggttatctcctttggcaggcggcgcagggccacggcccatatcggataccagctgatactagctgatagacactcctggccgatagtcgacacgccgccggttccggccccactgccggaaccgacatgggtatgttcatgaccgccgaccgcaggaacgaacaggcccgtccgccacggaccgcatcttgcggttcaggcggacgggccttatgggagggatgggaac

SEQ ID NO: 153 - DNA, 10360 bp, Unknown
  R206_24m  MAG No. k141_50609
gcggttgtccgcggcccgagtggagccgctgctgcggatgccctggacccagcgctgcagggtcgatcgcgcgatgtcgtactcggccctgatctcccgggatggcttgccgctcccgttacgactgcacgatctgccgtttgaacgcctcatcgtagtggcggggatgcttcgggccggccatcgtcggcctccaacctcatgtcaatcgtccctcatcggaccgtctaatacattatagccaatccacagcgagatcgaatgcggcgcacgcgaccttcccgaactcgagcaacgggccatccaatggatacactcgacaaccaacccaaaacaacacacccaaacgcttgacaatgtataggagcatcaaaacacactggtccgcgtaccacgacagcaacgcgcccttgccgggatggccgagctcgcggatcacgtcggcggcgcagcgttcgtatttgatgtacaggtccacggccctgtcgcgctgctccctgccgtacgtcgccatgaggggttctcctcccggtcagggagtccaagaaaacgtcaccacctcgttgcattgtttttatttgacgtactcacacttcaatgtgtcgggtcgggaattattagctcgataagctgccgccattcctctgcgaagtcgagtgcgcagccgctgctgagccagcgcagttgcaacccgtccatggctcccagcacctgaatcgcagtgcgttccggattggacacatggtctcgtgcagcggcgacggcatattctttcaagacgttcttctcgcgaagctgaaagtactcgtgtgcagggtggtcttcacttaatgcttcaccctgtaatagcacataaagactcactaactgacgacgattggcgttggtttctgctgtagccgtggaaatggttctgagaccataatcgcagtgataagtaatgccgtcattgatatcaccagaaacgccttctacccccaaatatttggcaatggcaatctgattgacgtgatcggcgtactttaacgcttcgaccataagatcttctttattcttgaagtagtacagcaagccagcttcggtaatgccttgggcttgggccacgtcgcgaatagtgaatccccagaagccgaattgggagataaacgtcatcgtggtttcgaggatgctttttcgacgattctctgcgctcatttttttgggggcgtctgttccggtacgacgacgcatgacgttcctttctttggacagcacatagaggcgatattagggtggcgtggataagccgttattcttcgatatgttacgtcctagtaggaacttaacgatatggcaggaacgcgcattcgagcgaaaacatcctctgagattacatgagcgtctgggcgggactccgctcggacgctcatggcctgatttcggaagaggtttgtggatcaggttttgagggggcgtgattacttgccaaagccggcggtcaggcctgcgaccatttgacggcgaccgaagatatatgccgtcagaatgggtagtacgctgatgacgactgcagcaaggatgcccggcacgtcaacggtgaactggccctggaaaagccataggctcagcgggatgacgcggttggatgcgctttgggtaaggatgagcgggaaaaggaatccgttccacacgttcagtgcgtcatagattgccacggtgataatggcaggcttcaccatcgggatggcgagtcgaaccatagtggtgaactcgctggcaccatcgacagccatggcttcaaacagggacagtggcacatcgcgtaggaaattggtcatgatcagtacgctgattggaatagcgaatgccgccgaaggtagaatcagtgcccataaggtgtcataaagcccaatctgaataatgatgtagtacacgggaataatcgtggcctgcatcgggatggccaagccggtgatgatgactttgtatatgccgcgcgaccatgcgtcattgcgacgaacaatcatgtaggagaccatgaacgagacgatcaggataataagcacggtcatgacggtaacgaataccgaatttcccacatacaacaggaaatcgttctcaaacacgcgcttataagcatcaaaagtggggtttgaggggagcgagagcggattctcagtgaaaatatcattctgttgcctgaccgaagtaatcagaatgtaatacaccggtacgatgacggtggcgagccatacccagccaaggaagccgccgagaatgttatattgcttgttcttgatacgaatcatggtcgaatcacacgccttccatctgactttccattttgtctgatcctgagagcttgttcagtagcaacgagatgataatgcccatcgcgaggatgatgacaccgaccacactggctccgcccatgtcgtagcttttgaagcccttcaaatacatgtcgagcggcagaatacgagtggcgttgcctggtcctccctgcgtcatgacgtagaccagatcgaagtaggtcagagaaccaacgatcatcaacgtggaatcagtagcgaatgtgtacttgatttgcggcagcgtaatggaaaagaactggcgcatagggcctgcgccgtcgatcatcgcggcctcatacaggttttgcggaatctggcggactgcgccttgatacagcagagagtgcaacggaataaagcaccaggagaccaccatgataagtacccacagcgcggtatttgggtcgcccaaccagttatgggccagccagtcaacgccgaatgccttgccgatgccgaattgtgggtccaacaagttcttaaaggcaatggccactgcggtggagctgaagagcaggggaatgaagtagaagacggacaagaatgcacgatacttctgtttccccgccataaaaacgccaaggaggatgcagatgggggtttgtacggcccagctgacaatcgtcaggataatcgtcagtcgaagaccgttgaggaccaaggggtcggtaagcattctggtccagttgccgataccgttgaaggtaactgcgccgagaccatcccagttcatgaaggacagtaccaccacaccgatcagcggaataattgcaaatattccgaacagaaccagtgcgggagccgcataccagactgacggtcctttatgcaatacggttggcttattgttagctggtttcgaaaccttggaactcatgacatcctccttatcgtcctatctattgcttcattgcgtgaatcacttgagcgtagagttcatggcatcgacgaattgttccggggtcatggtcttgaggaacacctgctcgaggttgttcagcacggcctgtccttggtcgctcggaagagcaacatcccaagaaagctggtagttcggtgcattcttgacggaatcgtagatccaggtgtaatagccggaaccatcgtcagctgcggcaatcttgtcttcaatgcccttgaccggaggaacttgtccctgttccaacatggcatccaccatggtgtcagagtaattcttttccttgatgaagttgacgaaggtatccttctgcttatctgtcgctttggaagaaagctgccagtagcttgacagatttccggtcagatcgcccatatcgcccttgcctccatcgacggaggggaacggtgcgaaaccaaggtcgtctgcggtgaagctgtcattgatggagatgaggtcggcgtacacccaagagcccatcaattccatacctgcttcgccggtcgcaatcatcgcggtatctttgcggtcgtcagcagtcaacgactggtagttgttgccgaaggcaccggcatcgatgagatcttgaatcatggacatcgcctgggttacggctggatcgctccaagcatctttattgccgtcgagtacaccttggaagacttcaggcccaccgatgcggtccacaagatatgcggcccacatcagatacggccacttgctaccaccggctagggcaatcggcgttttgccggcagcctttagcttggccactgcatcgagtaggtcgtcccaagtctggggagcttcgtcgactccagcatccttgagcacttgcttgttgtagaagaaaagcaccggctgcgcctgaccagtgggcactgcatacagtttgccgtctcggtagccttcggcggaaacggaatcgaacaccttgctatcaatagtgtccttaagatcgctagttaggtcggtaacggccttggaactgacatagtcggtgagaggagagccaccccagctggggaagaaggtcggtgcattgcctgagccgacggcggtacgaatcttctccttgtaagcatcattggcgaagctttcctcactgatctgagcatcggggttagctttgttccattccttgaatgcatttttgatcggatcccatggggaatcggtcattgcccaagtggtgacattggcgcccgtggcctgagtgttgccggtctggccaggcttattgccgcatgcgggaagcgataccaacatcgaagtggcggccagtgctgcaatggcttttgtcattgacttcataaggatctcctccttgagtccatttcctttttgcttaaggtgcatcttccgtcattggaattgtgtgtctccctttttcggaagatggttatactatatacttagtagttgctaagtgcaagtcgcttggtgacatactatgccgaatatcaatggtgagtgctgaaaggaaccaatatgacggacgccgcaaaaatcaaggaaatccacgtcgattgcaatgccttgcaaggaggagatggcgctcgcgacacgccggtgaataccatccaagcagcagccgatattgcccagccgggagatgtcgtcatcgtgcatgggggtgtatatcgcgagaacgtgaatcccaagcgtggtggatacgatgaatattcacgtatcacttacacggttgctgaaggtgagcatgccatcatcaaagggtcggagatactgggtaattgggatctggtcgacggcaccatatggcatgccagcgtagccaatgacgtttttcatggctgcaatccttatgccttgcctctcgaaggtgattggttggaacgtccgtccgattggaaactcagtttgggcaatgtgtatctcaacggcaaagccctttatgaagctcccagcgtggaagctgtgaaggcggcggagcggcgcgataccggattcggccccgattgggtcaatatcactgaaccggtggcacgcccggaggagaccatttatcagtggcatgctgaagtaggggattgcactaccgaattctgggttaacttccatgactatgatccgaatgcggaattggtggagattaatgtacgtcgcacatgtttcttccctgatcgaactgggctgaattatattacggtccgtggtttcgaaatggcgcaggccgcttgtccttgggcccctccgactggtgatcagattggtctgattggcccgcactgggcaaaaggctggatcatcgaaaacaacgatatccacgatgctcgatgcagtgccattagcttgggaaaggaagactccactggagataacgaagcaactcgatgggggcgcaagccagggtatcagacccaattggaaactgtgttcagggcgcggcacaacggatgggacatgggaacgattgggtcgcatatagtacgcaacaacactttgcacgattgcgggcaaaatggtgtggtcggtcatttgggatgcgttaattcgattatcgagaacaataccatctacaacatcggtgagcgccatgaattcttcggtcatgaaatcgccggtgtcaaactgcacgctgccattgacacgcagattcgcaacaatcatttccatgactgctcattgggcatttggttggattgggaggctcaaggcacacgcgtgtcttcgaatgtattccattccaatattcgtgatttgatgattgaagtgacctccggcccgtgcctcgtggacaacaatgtgttcgggtctgattacaacttcgacaatgtggcccaaggcaccgctttggtccataacctattctgtggctcgacgcaacgtcgtgccacgctcaatcggtttacgccctatcatctgcctcactccactgaggtcgctggttatgcctgcgtatacagcggtgacgatcgcatctaccagaacatttttgtgggtggcgatgcctatctgccgggtgtcacctctcgcggtactgagacttatgatggtgcacctactagtgaaaacgaatacatgaagcgcgtacatgcgcagggcattggcgatcttgagctgttcgaacaggtgccacaaccggtgtatgtggacggtaacgtataccttaacggtgcgcaatcttttgatcgcgaagaacatcgattctctgacaatggtgatgcccatattgtcgtgactgaagacgcggatggttctgtgtggctggaaggagagattccttctggagtattcgaggttgatacctcatatatcgatacggcgaaactcggtgttccgcgtattgtctggcaacattatgagaaccatgacggtacgccgattgttatcaatcgcgatgtgaccggtatcgcacgaggtgcgcatcccgtgcctgggccggttgagtctctgaagcccggttcgaatcgcattcgcctcgcctgacgaatgtgctgtgtataggctggttgtctgctgtgatggcagaacggatgaccagcctatggaaaacatgataaggggttcaccatgaccacatggattgccaccactcaagacaataggctcgtcgatcgttcgggcgaggtaactgccactggcgcaaccaccgcacctgatttgcaactcgacggcaacgaataccaggcgctgcgcggcttcggcggctgcttcaacgaactcggctggctgccgttgcagaccgtcaccgaggcggaacgcgaccagatcatcaaggagcttttcgaccccgaagagatgaacttcgcgttcaaccgtgctcccgtgggtgccaacgacttcgccgaccactggtacagctatgacgaggtcgacggtgactacgacatggagcacttctccgtggaacgcgacgaggagacgctcatcccgtacatccaccgcgcccaggaatggcagccggacatgaagctgttctccagcccgtggtccccgcccacctggatgaagcgcccgaaggcctacaactacggccggctcgtgcagaccccggaaaacctcaaggcctacgccaagtatctggcccgttacgtgcgggagtacgccaagcacggcatcgaggtcacccagctgcacgtgcagaacgaggtgttcgccgaccagaagttcccgagcgccctgtgggacgccgaagccctgaaagtgttcatccgcgactatctgggccccgaattcgaagccgccgggctcgacaccgacatctggctcggcacgctcaacggtccggaagatatggcgtggaccggtggcggctacggcatgaggctcaacaactacagccgtttcgtggacaacatcctcttcgacgacggtgcccgcaagtacatcaagggcatcgcctaccagtgggcgggccagaactgcatcgcccgcacgcacgaatcctggccggaaatcgaactcatccagtccgaatccgaatgcggcgacggccagaacacgtgggaatacgcggaatacgtgttccacctcatcaaccactacctcaagaacggcgcgaccgcctacacctactggaacatgattctcgacgaccgggattccacgtggggctggtggcagaactcgctgttcaccattaccgccgacacgcatgaggtgcgccgcaaccccgaatactacgtgatgcgccacttctcccagtacgtgcgccccggcgctaaagtgctcggcaccaccggccacttcaactccatggccatcgcgttccgcaacccggacggcacgattgccgtcgtggtccagaacgcgctcgaaaccgcaatgccgttcgagttcgccgacccggctgacgcctcccgcggcatcaaagccaccctcgccccgcgctccttcaacaccttcgtgatcgactagcgcccacgcccgtatcggtgcgcaggcagggcacaacgccctgtctgcgcaccgctttcgtatgttcggccgtgctggagtgtgtgggccggcgtgcgggagggcgggctgcggatagactggcgggtatgtccacacaagccacaacccggcccaagcgaatccgcaagttgccggaagagcgtcggcaggaaatcctcgatgccgccgtacgcctcatctccgaacgcgggtacaacggcacctccatacaggacgtggccgatgcggtgggtgtcaccaagcagggcgtgctgcggtacttccccagcaaggacaatctgctcgccgcggtgtaccacgagaactacaacatgtccggcgacatcgaggacttcatgactaccggtctgcccggctccacacccggcgacctgcggctgcccgcctacctgcggttcctagtgtggcacaattccaaacgccccatgctggtgcagctgttctccatcctgcaggtcgaatcgttcaaccccgaccacccgctgcatgacgaattcgcgggccgtcgggattcgatatggcactactattcgatacacgactggaacctgcctcccgaattcgactcgttcgaggagatccgccccacgttgcgccgcgccctggagatcatggacggggtgcagttgcgctggttgcgggtgccggccatcgatctcaacgacgaatgggctgatctggagcccatgatcttcccctcgccgctctgggacgggtaccgctgagctttcttgcgataggtgggcgttctggtgcttgcaggatatctaacagaaattagattgtcagaaaaccgtgtattcgcagcgtgtttcgtcattaggcatgctaaactaccaatcggtaactaaagaaccgttcgatttcaccgaagaaagcgacaccgcatgaccgacaacaccgcaacctccgcaaacgccgaaaccatgccgtacaagaaccccgccctgcccgccgaggagcgcatcgccgacctggtcggccgcatgaccctcgaagagaaggtcggccagatgatgcagctcgacgcacgcagcggcgacctcgaagacctcatcgtcaacaagcacgtcggctccatcctgcacaccagcccggccgacctgccgcgcgcggtgaagatggtcaacgagcagacccgcctgaacatcccgctggtcatcggcgacgactgcatccacggctattccttctggcccggcgccacgatcttcccctcccagctcggcatggccgtcagctgggacgccgccaaagtcgaagccgctggccgcgccaccgccgaagaggtctcctgcaccggcgtgcactggacgttctccccggtgctgtgcatcgcccgcgacacccgttgggggcgtgtggatgagactttcggcgaagacccgatgctgatcggcgaactcgcctccgccatggtcaagggctatcaaggcggcgccaaggccggcgaggccctgccgaagaacgcgatcctggcctgcgccaaacatttcgccggctattccgaaacccaaggcggccgtgacgcctccgaagccgacctctcccaccgcaagctcgaatcctggttcctgccgccgttcgagcgcgtggccaaagaaggttgcggcacgttcatgctcggctacgagtccatcgaaggcgtgccggtcacgttcaacaaatggctgctgaccgacaagctgcgcggcgcatggcaatacaacggcacgctgatcaccgattgggacaacgtcggccgctcggtatgggagcagcatgtcaagcccgattacgtgcacgccgcagccgacgcggtcaaggccggcaacgacctggtcatgaccaccccacagttctatgagggagccatcgaagccgtaaaaaccggtctgctcgacgaatccctgatcgatgacgcagtagctcgcatcctagctctgaaattccgcctcggcttgttcgaagacccgcgtctgccggacgccgaacgtatcaaggcggtcatcggttcggccgaacaccagcaaatcaacctggagctcgcccgcgaatccatcgcactgctgcgcaacgacggtgctttgccgtttgccgcaaacaaggccaagcgcatcgccgtggtaggtccgctcgccgacgacgcccagaaccagctcggcgactggaccggcaactccggtcaggtttcctggatgccgga

SEQ ID NO: 154 - DNA, 2567 bp, Unknown
  R206_24m  MAG No. k141_51371
aaaatcagcttcagtgatatacgtgtcgcgatgccgcgtcagcagagcctccaactcagcagactccgtagcccgatgcagccagatctcgtccgcttcgccgctggcggcaaaaatccccggcttcatccacttttccagcaccagccagttaccgaggttcaccccattgatctgctcgccaatgcccagcgtgcccagtgccattaataatgtcacccgcgctaatcattcaatgcttcaccgtagcgagcgaccaacccctgatttgcacgctcaaactcggggatgtaatcagcgatgatggcgtccacaagacgccgagctcgttcttcatcatagatatgagcagaatcattgcgatcgcgtagcatgcgcagccacaacgattcgtccatgaaatcatagtattgaaaagcggttttgagcacatctcgcggagagccggaagcggaaacagggtctccctcataagccagcagcgccttgaacagtttccaaccaagctcgaactgcaacccgaacttgtcaataatgccgctctggatgaaatcattgccgagatcctgttcgggagccttgcgcagcgaattcaatgcggaaacgtaattctcatactttttcatacagcacctttccgctacgctcaatctctgccctcagcgatgaagaaatcggctcatccagattgatgacatcaactttaagcagtgaccacagattgtcctgaaggttctgctccaagcgattgaaatcgggacaaccggccacggcaagatcgatatcgcttttaggccggttcacgccctttgcgcgagaaccgaacagcacgaccttgcgagcgccggcatcagcggcaaacgcgcgaatctggtcgtacacgtgctcgataggaaccatgacacctcccgccgcatccaacagtcccggaccaatcccggaccatccgcgcttccatcatacggccgcggcccactcaccgcacggagcccgaaccacccgaacgcggcgacgtagttgcgggaggcgggctggcgctgtagggtgtgcgggaagttcctgacgtctacttttcaggaggtgaatcctcatgttcaccacgttttctctggccatcattctcgactgcaccgtacgcattgtgctcggcacggcattgggcgcgctgatagggctcgaacgccagttgcgcgcccgaagtgctcggcgtgcgctgggatgtggagcacatcaccacgtccgactgaaacgtccgactgacgctgaccagcaacatcgcaacagtacaacaagccaacaagtgggatggggcatcgagcctcatcccactttgttattatccggcgattgtcagactcactcacgccacggtgaaagtggtgcgcttcaggtcttcacggcgcgaggagtggccaacgagcagttcgaattcgccgggctcgacgatacggttggcctccgagtccacgatggtgcagttcaccaccggaatgtcgaaggtgacggtcttggtctcgccgggttccagtgcgacgcgctggaacgccttcaattcgcggtcggtccagctgtaggaggtcacgatgtcgccgatgtaggcctgcacgatctccacgccggcgcgctcgccggtgttggtgagggtgatttcggcacgtacggtgtcggtttcggcgaatgtgccgtcggcgttgcttgcgccgcccgtaatggtcggttcgccgtatgcgaacgtcgtgtagctcaggccttcgccgaacgcgaacgccggatcctgggtgaggtcggcgtaccggtcgccgtgctggcctcggatctggttgtagtagaccggcagctggcccgcgtggcgcgggaaggtgatcggcagtcggcccgacgggctggtcaggcccaggattatttcggcgatggcctgaccgccgcgcatgcccgggttcggcgcccacaggatggagccggtgccggtttcagggtcgctgacgcgcttggcgaacacgccgtactcccccacgatggaggcgggcaacacctgcggcttggagctgatgagcacggtgaccatcggcttgccggtttcgcgcgagacggcggcgagcgcgtcgagcagggcgttctggccaccgagcagttcgagcgtggcggtggagcaggtttcgccgaccagctggaccacgtcgccgaccacggccacgatcagatcggactggcgggcgttggccacggcttcgtcgatcatcgcttgatcgacggcggcggaaacgccgattttcgggcgaggctggccgtccgggtagaattcgccggcagggtcaggcacgaggtcgatgacgttcgcgccgcgcgagtagaccacttcgcaatcgtcggcggtgagctgggtcaggccgtcgagcacggtggtaatcatgtctcgaggctggccatccggcatccaggaaacctgaccggagttgccggtccagtcgccgagctggttctgggcgtcgtcggcgagcggacctaccacggcgatgcgcttggccttgtttgcggcaaacggcaaagcaccgtcgttgcgcagcagt

SEQ ID NO: 155 - DNA, 52754 bp, Unknown
  R206_24m  MAG No. k141_51534
ggacgtgtagaacttgaacgcaccaaggaaagtgccgaactcaaagccggcggattccacgtgctcgtagatgcggtcgaggaattcagcggagtactggttgaagaccgcagggttgtagtactggttgctgatcaggtattcgagacgctcggcggtggaggcgaaccgcttgctgttggtggccacgtgccctgtcacgtattcgcgttcggcggccttgtctttgtcgaactggatcttgccgtcggcgtcatagaggttgagcatcgcgttgagcgcgtggtaatcgtgcgccgggtcgtactgttccgctgcggtgtcggcagtattgtcgagcggcaggccggtggcggtgaggtcagtcattggaaatccttggaatatggcagaagtgtgtttactcagacagttgctcccctcagtcaacttcgttgacagctcccctcggagaggggagccaatacctcgagggggtcaagatttactgttcggtgaagaagcggacgaggccgtttcgcacggcggcagtgtcttccggggtgcccatgagttcgtaacggtagaggtagggcaccttgcatttggcggcgatgatgtctccggcggcacagtaggcctcaccgaaattggtgttgcctgaggcgatgacgccgcgaatccactcgcggttggctggatcgttgaggaagcgtttgacctgaatcggcactgctttcttgaccacgccgccgccataggtgggcaccatgatgacgtacggttcgcggacgtttagcgccgggtcggcggcccgcaacgggatgcggtagacgttgatgccttcgtcctgcaaacggcatccggccacgaaccgtgcggtgttttcggaggccgacgagaagtagaccaatgcgccgatcgtcttgccttcggccgcgaattcgggctggctcagactcacgcggacaccgtggcggcggcgcggttgtcggcggccacctgctgggcgacttcgcgaatcaggtcggggcggtagccggtccaggagttgtccggcgtgatgaccaccggagcctgctggaaaccggcggcctgcagctgctcaagggtggaggggttctgcgtcaggtccacggtttcaaacggcacacccagcttggtgagctggcgcttggtggcatcgcactgcgggcaatgcggcttggtgaacacggtgacggtcatggcgactccccttgatgtggttctgatgaacagtgaagcgaaggccatattacagcggtgtgatttgaaatcaaggcactatatgtagtggcgcgtgtcacataacaaacctagatatagggtttttcgttgatattccgccattcccatgcacccccgaaaatcggcgtgcagcgacccgcccaatcacatgtggcattgttcacatttgcgtttgaaccgctcttcgactgatcctcaaccgccctgcaaccgccatcttgagtttcgaggggctgttttgaccctttccggagatctatctccgtttcgaggggctggtactcaagtaagcgcatccccaaaatggcggaatgacggtggggcgaagccgtttatacccgtgttctagcgggccaccagcccctcgaaacgggagtaaacctctacggaaggccaaatcagcccctcgaagcggagaacggatacctcggcaccccgtgtggagccagaagacccggccggatgtccaaacgagcatccggccgggccttaaaagtagttgttcagttatcagaatcgatgcggcgcgatactactccgcgtctttacggctccaacagatcttcgatgcggcagccaagcgtgcgggccaaagcgagcacggtggagacggcagctttgccaaggtctttgcggcgctgctcgtacatttggatggagcgcagggtaacgccggagcggcgggccagcccggattggctgagtccggcgcgcacgcggatcgtgtgcagccgggagtcgccctcggtgcgattatgggcggcccgctcgtcgtacacgtcgacgaatcggctttcgtcggcttcgtgcagagtcgggtacagtcgcacgatatcgtcgagcgacagcacatcgagaatgtccgagaaccgcactcccctggcccattggcagtatgcgagtacccatccggcccagtattcgggtgttgagccggcgcgcagtgcggctggcggcatatcgagaatgcgcgcccaaccggtttgccgcatgatttcggccaccagctcctcgccggacatgccacacacgtatttgggcgtgcctcgcccgaaaagcgcggccgcctcggaggtggcgaagaagtccatgaataggccgaccggcaacccgcaatcgttcagcgcataatcgaaggcgccggccaagttggccatggcgtccggcaagtatgtcccatcataggcggggatcatcgttggtcactttctcgcggatgatgtcgcgcatgaacaggccgtcgagatcggcttctgcacttttgcggcggtaggcttcgcgagctgtgcggtcgcgctcgttacgcaatccgtggtaggtcgaagcgcgggcgatttcgcagccttggaaccgcagtgccgcgaatgcctgaggactggcgagtacgatctgcttgccgagctcgcccaaccgcatcgcctcagcgagttggtcgatggaaatcgcgttattgacaaaagcgcgggcgaacgagaaatacgaatcgtcggcacgacatccgacgatgacgtcagcctgactggcatccggcagaaacacttgtttcagatattcgatgccttgcgcggcgacggcggtggtcggctggaaacgacggttttcgaccagcatggccagccagttcaggatggtgtagggcggctgggacaggtccaggaagaggagcccgtccgtggtcaacgtgtaccgattcgcgaaaccgtcatccagtcccgcgcacgcccattccttggccagctcgacgctgcgcgtgcaatagaatccgcggccataatcgttgttcggcttgaccagcccgtattcaggatgcttgatgacatgcgaagagccatgccacagttcgatcgatgcggtctccattggccggctccttctctctccttacatattcttgattatatcactgtggtgatagccataggggaaatacgagatgaaaaataccgctgtatacgttcgtacacaacgtgaaatgtatacgaacgtatacaacactgatgtccggagtcatgctccgcagtggcgcagcggacgcgccactacaatcggaatatgggactgaagacgtggaagaagtggacggactggccgctgatggtgctgtccgtggtgtttctggtggtgtattcgtgggaaattctctcccgcacgcatatcgcgctgtgtgaaaccgtcatcaacgtgatctgggtggtgttcgtcgtcgattatgtggtctcgctgtggttggccgacgatcgctggcagtggttcaagcacaacctgttcacgctgctgaccatcgcgctgccgatgctccggcccttgcgactgttgcgtttgctgaccgtgctgcacgtgctgaaccgcacctccggcatggcggtgcgcgggcgcatcaccgtatacgcggtcggcgcggtgggaatgctcatgtacgtgggcgcgctggccgtgtattccgtggagcgcggggcgtccggatccacgatcaccgacttcggcacggcgttgtggtgggcgttcgtgaccgtgaccaccgtgggatatggcgacttctcgccggtcaccttccaaggcaagatcattgcggtggtgctgatgttcaccggcatcgcgttgatcggtattgtgacggccacgctggcttcgtggatcgtggatcaggtcaatctggagacggatcggcgcgaggacgctcgggagaaggaagtggccaaggaagccgcgcaagaggctattgcaatatcagccaatcccgaaatcgacctattgcgcgaggaagtgcgtgagctgaccgctacggtagccggtctgcgcaccgaacttgagcgacgttgattggcgaagcgggacaaacaacgattctgccaagaaggtccgcgtcagttgttgtcaccgcggattgcggcagaatcattgtcgccacggctgttttcttcagtcggctcaacccaacttttgataatttttatttttttgatatttttgataatttttattttaggttgattcagcgaggaggcggtccacatgaaggcaaaggaaaacccattcaagccaacggcaggaggggaaccgcccctgctcatcggccgaggcaaagttatccgcgatttcgagaaaggtctcgataacggagtcggtgccccagggcgcattatgcttgtcaccggcgctcgtggaaccggaaaaaccgtgatgctcactgtgttcggagaccgggccaaagcgcgcagatgggatgtcatcgaagaaacggcctctgccggactatgcgaacgccttgttgatgccttacgaaccgggcgaggggcccttgaccacctcactatccgaccatcgttgacttttgctggagcgggcatcggcctcggagaagccgaactatccccgaagcgtatgcccgaaacgttgagaagtgccattgccggacggttggatgcgcttgagaagcgccatgctgggttgcttatcaccattgatgagactcaagcggctgagcgatccgacatgattgccattgccactgccatacagcatcaaatcagggaacgacgcaatatcgccatcgtgttcgccggtctcccacagatgatttctgatttgttcaatgacgaagtcatcacgttcctacgtcgcgcgaaaacgaacatactcacagatattcctcttgatgaagtgcgcgatgctttcgccacaacattccgcgcctccggcatgtccatcaccgacgctcaattaagcactgcagccaatgtgacagccggatacccctatatgattcaactggttggctaccatatctgggatgccgcagacatgcgggactcggataccatcatcgacgctgatgttacggcaggtatcgaggaagcacgtattgaccttgataacgccgtgtgcgtcccggagttgcaaggcttatccaaaaacgaccgtgagtatctcgaagccatggcagcgtcagatggtccctctcccaccgtgaatgttgcacagcgcatgggcaaaacgcctaactatgccgccacctaccgcaaacgcctccttgacgccttcgttatccgcgaaacagaacgaggcgaagtcgattttgccgtgcccttcctgcgcgaatacttgcgtcggaatcagtaatcggcacaatgcacagtatcgatatattccgttccatataatgacttttcgcattcagatacacaatggacggcctgttgagtagcactcagcaggccgtccattctatttagctattcagttatcggagacacacctcaggccttggcctgagcgccagcgacctgctgggaggccatcacgccgaacaggtagccgtcttcggagaagtattcgaaggtacgaccggcgaagtcgcggcattcgaatctgatatcgttatcgattcgatcagcggctcacgatactgcccttgcatcgctgtgccactgttgaatgtgcccggctggctcacctttgggtcaccgccgacacatccttgatgccgatggttatagagtcgcaaattcacgactggcgcacctgcccacgcacctatcctgtcatttcgagcgcataatttgctaccacatccggtcagggcaatcgaccttaatggcgtaaacggcacttctcaatacgtaaacggcacttattcttggctcccctctcagagaggggagccaagaaatatcaagctcggcctcccaggagagagccagaataatgcaccatcaaggcattaggatggagggcatgagcgatttgaacgcgttgaatcttgagcccggcgaagtggttggtgggtatacgctgatctcccggctcggctcaggagctatggggtcggtgtggcgggtgcgcgacgacggcggcaccacctatgccatgaagattctgcgcgactccctgaccgacgagtcagtggcaggctccggctctgcgtccacggccctgcacgaccccgacctcaagcccgatgtcacgccgcgcgagcgcctgcggcgcgaggccatggccttgaagaagatcaatcatccgggtgtgtgcggcatcgtggatatggaactcgacgatacgttggcgttcatcgtcactgaactcatcgagggcaagaatcttaaggatgatgtggccgccaatggccggtatgtgggcgacgatctggaacgcttggcccgcaagctcatcgaagccaccaaagccgtacatgcggccggcatcgtccatcgcgacatcaaacccaccaatgtgatggtgtcggccgccggaccggtattggtcgatttcggtatcgcgatgggcgagggcgaaagtcatgtgacccgcaccggcctagtgatgggtacacccggattcatcgcacccgagattattgacggtgccgaatccgacgacgccaccgattggtggtcggtggcgtccgtgctcgcttttgccgcaaccggcgcgcctgtgttcggcaccaagccgatgatggcggtacttgagcgcgaggcctcgggcaacgcgaatctttccggactaccggccggcacattggctgccttccgttctgcactggacccggatcgcagggatcgttgcacgccggatcaattgctgaatgccatcgccttggatgcgttgaatcccaacgcttggcagggcgagcaggcgggaccgttcgccgcgggagccgtggctggacaaccggctgcgatcgttgccgaagccgcggaggcgatgcccccttttggcgcggccggcggcgttgaccgcaataatccccgaaccatctggcgcgcggccgaggaagccgctgaggctcccaccatggccgtgttctccggcaataagggcgataacggcgatggcgaaaccgccgtattctcgccggctggcgccgctaccgccacgctgcccttagccgatatgccgccacgtccgccggccggtgcggagcaggccacgcaactgttgcccgacgctgctgccgatttcaccgacgacgccggcacacaggtactcaccggcgcgaccacaccgatgccggaccaaaccacaccaatggccggcgccaccacaccaatgaccaacaccgattcgactccggccccgaccacgccgctggccgagcgcaccaccgtactccccacgccgcagccgtcatcattccccccgtccggcaccgcccagagcagctgggatcccgcaagcaaccagcccacagcggtggaccccgccattcgcccggcattgcagcgcatcatcgaccaaaccgcccaagcggcccccaccgaaaccatggtccaaaatcctcccatgcccaatccggtggacgtgaagcgaggggaatatctgcggcgcggcaccctgccattgatcctgctggcggcgccgctggcggcactggcggcaaatgctccgctcgtggccatcatcgcggccactgcgttgttgtggctactgctcaccctggcctataacaccgaaccccagcttgagcgcgagggcaaacgcggcggcgagcgcaaaaactccgattcgtggattcgcgtggcgacttttccctggcatctggtcaaagccctgctgctggccattccccgcatactgctgctagtcatcatctatatggcgggaaccgccgtggccaccgcggctctggcactgcccgttcacaccatctcctggtatttcaccgcggattggggtattccggtgccgttgctcaatgatgtgccgttctccgcttccgggctggcgctgggcggtttcatggccatcggctggctggtcactgtgttcgccccacagtcgatgatgattcggctggggggcggcgtactgcgcgggctcaaacacagtcgcccggcgggcgcgccatccaccgaagtgggtggggctccacctgctccagtggcgccggcgcccaagggcggcgggcgcggcaccgtgctgttcaccatatgggccatcatcaccgtggccttgtgcgcgatgccgattctgggcatgccgatcaactggatgccgttcgcctagagcggagcggaatctcacacatcagccatccgcacacatggccgttgtgtatccgatacgttcgttccgtcacacttttacagggaattcacctcagatcagctctgggcgcagtcctcctcaggcccggtcattatgatggggcccaaacattgaagcgattgcaaggggatagctatgtcagatccgaagcgtcaggccaagcgtgccacacgcgctgagcgccgagcggccgaggaggccgcccagcaggcacgggccgagcaggcggctaaggaacgtaagcagcagaccatcatcggctgcattgtggtggccattattgtggtgctggtggccatcgctggattcgccgtatacaaggctatgcggccgtccaacaccagcagcagtagccagcaaagcaacatgaccgtggacgaggcctatagcaagctcaagaaagtcagtacccagccggccaacgccgatgacaaggccggcttcgtgatctcgagcaaggggtacggtcagaaggccgaaggggcgcccaccgtttccatctacatggagccgctgtgccccggctgcgcctcggtgaaccgccagcttgacccgacgctcgtcaagctgatgaacgccggccagctcaacatcgatttgcacttcctcaatttccaggacaacaagagctccgacaactactccaaccgcgcgttcaacggtgccatctacattgccgagcatgatgacaatcccgatcacctcatgagctacctctccaacatctacgctgaggatttccagccgggcgaattgtccaattacgagccggtaagcaacgccaagctggagaagcaggccgtcaatgccggcgtgagcgagaatgtggccaccgcggcattcagtggtaagaacgaatacgtcaagtggctcaccgcctccaacaactacacgatcctacgccccgaactgttcaacagctccggcgcgttctcctcccccacgctcaccatcaatggcgaatactgggatctgaagcagctcacgctggcggacaccagcatggtggacggattcctcaagtccatcggcttggactccgatcaggtgggcgtggaaggccagatgccatcgatcggcgccaacaagaagccgatttcgctggccgattaattaccggcgcggctcggcctgaattgaccactcgagaactaccggtatactagagatttgttcaaaacgatttacgcgttaagaacaatcgcctctttagctcagatggccagagcggccgccttgtaagcggcaggtcgtcggttcgatcccgacaagaggctcgacgcgtagaaaagtggcgtattatatgatacgtagatttttctacgcatataattcttaccttgggtaagtactccaggagccttcccccaactatgggcttcctggaatgagggcggagcgtcccccaaccagctccgcgccttcaggggggcgggaacatccccttctctcccgccccctttttcttttctttttttgagctcagaacaatctgacgagcaggaatggtgacggtggccggtgaaaccgcagtacgggccggaacaaccgttacgatgggtggcgtaatcgttcatccagcaggaagagtatggcaatggcacggcgttggaccccgcagcggtttgttacactgcgtcgcatccgcgtaatcgcctgtatcgcggcgaccagtatcgcgctggctggatcattcgcgttcaccgcgcgtaaatccgtagccctgaacatcaacgggcaaaccacccaagtcaccacatatgcgatgacggccacccgtcttctggaggaacaaggggtggatatcaagacccacgatatcgtcactacctcgtccggcgaccaactcgccaatcatgccgtggtcaccgtacagtccgcctaccagaccactatcaacatcgacggcacgtccgttcccttctggaccgtggccaccagtgccgaccagttgctgggatttttcgaggaaaaccagaacaacgccacaaaaatcaccgtcgacatcgacaatgtgtacaaccagctcaccggcggactggtcatcaatcaggatggcccggtcaccgtcattgcggacggcaagacttccgtggcccccaacggcaaactgcctgcggcctccattcttgactccaaaggcatcgtgctgaacaaagaggaccgtgtgagcgtcgaaaaggacggcgataccactatcctgcgcgtacggcgcgtgacgcatggcgaggaaacgcgcacagccgtagtgccatactccacacaaaccatcatcgactccaatctgcctgaaggccagtcggagatccgccagcaaggcgtcaatggcgagaaaacccaggtgtataacgtcacgtatgtcgatggcgtggccgaatcggagacgctgaaatccgaaaccgtcaccacgatggccatcgaccagatcatcgccgtaggcgccgccaagtctgataccgataaaggttccgacaaaaaatccgactccgccgataacggcaaggccgattccggttccaacaatcagcacgagtcgtccggtaacaatgccaataacacaggcgacaagaacaacagcagctctggcaacaacacgaacaccgataccaacaacaatgccggcaacaccggcggcaacaactccggtaacaccggcaacaccggcaacaccggcaacaccggcaattccggtaacactggtaattccggtaacaccggcggcggtacgaacaacaattccggctcttccggctccgattcaggaacaaccaccacgccctccggccgactctggcacgccaccgtagcccaggctcaggcctatgccgccggtgccgccgcgcagcgcgggtggacaggcaacgactgggattgcctggtcaaactatggaaccgcgagtccagatggctgtggtatgccgaaaacgcgagctccggtgcctacggcattcctcagtcgcgaccagcagacaaaatggctgcgttcggcgccaattaccgtgacgatgccgccgtacagatcgattggggtctgtggtacatcgcacaaacctacggcagcccgtccaaggcatggcaacattccgaacaaatcggttggtactgatcggttacgaagcccacaaggaacacacgcttatgaacgacaccattcccgccaccggtcacctgttaggtgccgccgatatccgtcgtatcgcggccgatgccggcatcagccccaccaagaaattcgggcagaacttcgtcatcgaccccggcacggtccgtcgtatcgtacgagaggcgggagtgaccgctgccgatcatgtcatggaagtcggccccggcctgggatcgttgacattggcgattctggaaaccggcgccaccatgaccgcagttgaaatcgatccgccgttggccgaacgactgccgggcacagtcgccgaattcatgcccgaagccacgtcacgactcaccgtcgtcaatcgggatgccttaaccgtcaccccggagaacgtgcctgatttcagcgatgacgcatcgtttacgctggtcgccaatctgccgtacaacgtggccacgccgattctgctcacgctgttggagcgtttcgacaacctcggctcgttcttggtgatggtgcaaaaagaggtggccgacagactcgccgccaagcccggttccaagatctacggcacgccgagcgtgaagctcgcctggtatggcaccgccgaacgggtgggcaccatcggccgcaatgtgttctggccggctcccaatgtggattccgcgctcgtcagattcacccggtatcaggccgatgacccggccgccccgggagcctcgaacagcacggccgacggcggcgcacaacgggaactcgtatttcgtctgatcgatgcggcgttcggtcagcgtcgcaagaccctgcacgcggcattgaagaccattgcgccctccgaggcattctccatcgccggcatcgatccgacccgtcgaggagagacgctcaccatcgccgaattcaccgctctggccaaggccatcgaatcgtgtggagatggagatgaggcacaatgagtccggtaatctcacatccacgcccagccgctgcccgacatcagttcgatgagctctcccccatcaccattacggtggattgcccggcgaaaaccaatctcaccttggaagtgggacctgctcacgacgaatggggcggacgccacgaactggacaccacctactgtgcaatcggcgtatacgacaccgtcaccgcaaccgccaagcaacccggagcgggattctctctggagctcgaaggcgcttatttgggcgacttggcctcctcacgcagcgacatgcgccgcaaccatgcggtactggccctcttcgccatggcccaggcggccgagtgcgagccggatgtggcgttgaccatcaccaagcgcattcccgtgggtgccggactaggcggcggttcagccgacgccgcggcgaccatgctggcggtcaatcgtctctgggagctgaactggcctatagagcgtctgcgcaccattgccgccacgttgggcgcggatatgccgttctgcctgaccggtggccttgcatacggcaccggtttcggcgaacgcatcacggatatcgcccccggcagccgcgatgagctggcgctgatagaacagggattcagcggcgaagtattggtcggcgcgtaccagtcgcaactcagcactcctgaggtctaccacacctttgacctcgtgggagccgcagaaggcgaccgcaatcatctgcaggctgcggcaatcagcctgcatccccgcagcgggcaggccatcgacgccgccacgcaggcgggtgccagccatgcattcgtctccggatccggcccctcagtggtcgctttcgccgccgacgaggcagcggcacaacgcattatcgatgtgtggcgcgatacggctgtggtcgatcgcattattcgagccaaatctcccgcacaccccaatatcggcgtcagacagtgacgctaaggtagcaaccagccacccgacccatgaaagaagtccaccgatgacgtatcaggttgatgaacgtgaagcccgcaaggcgtacgtgcgccaccgccagaccatcgtcttttccatcagcggcgcggtattggcagtagtgctggtcatagccctactgttcaatttccacgttttcggcctcggcgaagtggagactccggcccgccagccgaattacggcaacgcggcaccgtgcgcggtcaaggacagcagcggcaaagcgcaatacgtgtccaacgcttcggtcggcattcgcgtgatgaacggcacctctcacggccaattcgccaaggccgtgggtgaagctttggccaatcgtggattcagcgtgcagaaaatcgataactattccagcaccgacgttgaacgcaccaccatctacttcggcaagaacgccattaatcaggcgtatacgctgatcggcaatttcaccgacgccaccatgatcatgacggctcgcgaggatcagctcatcgatgtggtcatcggcgccacgttcaacgatctgcaggacaccaactcctccccgcaatccggtaagaccatcaccaatatcgagggttgcaaggccgccgatagcatgaccaagctgcccgccgacaccaaacacgacgcatacacggcgcagtaaggcgcatacagcttcatcttcgcgaaaaaccgtacgctgacacgtattcagcgtacggttttttggtatcggactagtatcggactactgaatctcggcgtaccagcgcttgagttcttcgacggccacatcgtggtccaccggaccgttatccaagcggtattccagcatgtgcttgtaggcgcggccgatcatcgggccgggctccaggcccagcaactccataatttcgttgccgtccagatccgggcggatcgcgtcgaagtcctctttcttcttgagttcgcggacgcgctcctccatctcatccatggcctgggagaagatcatcgccttgcgcttgttttgtgtggtggcatccgcgcgcgtgagcctgttcagccgctcatagaggtgcccagcatccttgacataccggcgtacggccgaatcggtccacggctcgtccacatagccgtggaagcgcaggtgcatattcaccagttctgagacgtcctcgaccagatggtggtcaaaacgcagcgccttcaaacgcttgcgggtcattttggcacccaccgcgtcatggtggtggaagctcaccttgccgcccggctcgaaccggcgggtcttcggcttgccgatatcgtgcatcacggcggccaagcgcagcgtcaggtcgggggcgggcaccgggccgtccgggccggtttccagggcgatagcacgttcgagcacaatcatcgtgtgctcgaagacgtccttgtggcggtggtgttcgtcgatctgcaattgcagggccggaatctccgggaagacgatgtccgcaagaccggattcgaccaacgcctcaaggccggcgcgcggacggtcggagagcagcagtttggtcagttcgtcgcgcacacgctcggcggatacgatgtcgatgcggtcgcgcatcgaggtaatcgcctcggccgcgtccggcgcgatacggaagcccagctgggccacgaatcgcacggcgcgcatcatacgcaacggatcgtcgtcaaaggactgtcgcggatccaccggcgtgcgcaacacgcccttggacagatcgctggcaccaccgaacgggtccacgaattgcaggtcgggcacacgcagggccatcgcgttgacggtgaagtcgcggcgggacaggtcgccctcaagcgtgtcgccataattgacctcgggcttacgcgagtccgtgtcgtacgtgtcggagcgataggtggtgacctccaccttgacctcggtgccgtccgggcggcggcgcatggcacccagcgtgccgaacttgcgccccatgtcccagaagccgtcatgcccccaccggcgcagtatcggctcgaactgctcaggccgtgcggatgagcagaagtccaaatcgtggctctttctatggagcagcaaatccctgaccgggccgccgaccaatgccagctcgtaaccctgttcggcgaacagtcgaccaagttcgatggcttcgggccatacttcgaaattcaatgggcaccttcccgcgtgcgacgtttttctgccctaccagcataccgttaccccacctgcacacggggttgagtaaggtggagaatatgattacgcccgccgaccttgcccgcatactggggcaaacaccagattcggcggatagccatacccaagaccacctgctgtatacgtccgaaactccgcatcattccgccgattcgggcgattctcccgatgccggcggcaccgcgagccactccaccaatcaggccgttcatcaagacgaagtagacgcagtaccgactgcgcaacattccggtgtacccggcacacccgcaacgcccgccacacccgcaccatccgaatccgaaatatcggacgccgccagcgacatgcccacaccgaagccgatgatgcccacaccggccaccgtcttcggcatgcatgccaccgtcaccatcgccactaccagcggcactatcgaggggcaggccgatggtatcgccggcgaggccggtgccgagacgattgccgaggtcgagccgattatcgccacggcacaaacgtccgtaaccatcgtcacgaacgattccgcggcgaccgcccacgcggccgtagatactgccgttgcggtcgccaaggccgccgccgcgcataccgcagcgataccgactccgcgcgacgtgctgatgccgcctgcggcacgtaccgcaccggccgcaacgccggtcaccatgccggtctcagcgccgtctgcagcaccagtgaggcccgcaacgtcagcgcatcccacgccggccacggtcttcggccggcatccgtccgcggatgttgcctcgccggaaccggcagtgccagtagaaccggtgacgccacccagcccgactccggccatgatgccgcaacgccgtacgtcggacggtccgaccacattcgcttcactggatgcccaggaactgccggtcgtacgcgaatattcggcaggcggtctgattttcgatgaccagaatcgcgtggccattatcgcccgtcattcccgctccggccatctcgaatggtgcttgccgaaggggcatatcgaaaaaggtgagaccccgcagcagaccgctgtgcgcgaagtgcatgaagagaccggcatcctgggcgaggtgatcgattccatcgccaccatcgactactggttcaccggcaccacgcagcgcgtgcataagctggtccatcacttcgcgctcaaacagaccggcggcgaactgacggtggaaggagacccggatcatgaggcggaagacgccatctgggtacgttttgaagatttggatgacgtgttgagctatcccaacgaacgcaaaatcgcgtggctctacgccaggaagaagaacaggcaggcaaacgagtgaacctacccggagtcttacgacattgcacacgtctggcacacgcactggcggctggcgtcgccgttgtggcgatgctggccgctccattgaccgtttacgcgaacgatacgacggacacgactgattcatccgatacgacggacgcaacgggcaatcagaccgagaatcagcccaagcagagcattgccatcacgcaaagcacccccatcgtcacctccaaatcgggctatcatgtcaccgcggtcatcagcaatacggacagcacggccacgtcaagcggcacactgcacctgaccaccaatacgctgttcacctttgtctcgcgcaccgatattcagaattgggccgagaacaacgcccccatccccacccccaacgagttgggttccgttgacgtgccatcgattcccgccggcggcactgccaccgtcaccatcgaggtgaacgccaatcagcagacccttgcctccatagggagctgggggccgaagccgctgatgctgtcgtatatcgtcggcaatcagatactcgccgatttgccgagttttctgacccgatcttcggatgggctcaacaccgcgacgacaccggccatgaacctgaccgtggccatgccctacaccgccagcggctggcaggtcgataacaaggccatcagcaatcgcattgccgaaaccaccacttcctcgacatcaacatcgtccaagtccaacagcacggacaaggccgacaagtccgataacgccgacgccggcaacgcggccaaagccactgatacgcaagccatatccttatccgagcaggatgccgataccgcgcgatcccttgggcagacattcgccaagcaccgctcgctgcaagtgatcgcggatcctctgtattggcgtcagtccgcagtgcaaccgtccattgccggcatcatgcagcccgccgactttgacatcaccgcctataccgcgctgggtgataccgcggcctacgaaaaggccggcatcaccactgaacagtggaacgccaagcaggcggccgcatggtatgccgccggaaacgactccgaaacaccctccgcgtacgcatggcagggcaacaactgttggacgttggatgcgctgaccgcagcacgcgagcagggctatgacacggtgattgccgatgcctctttcgatgccgaccagactgaagccgtacacacaggcacctacgtggtggatacgcctgccggcgatgtcaccgtgctgaaggagcaatcgaccttgggcacgctggccaagggccaagccaccagcacggacgcgcaggccgagtccagcgatgccggtcggttggcccgactggtcgctcagagcgcgttctaccagatggaacagccctatacatcccgatacctgcttatgacgttctcccgcaccacggaggccagctggatcgatcaggtgatgagcgccttcgagcaggcgtcctggttgaatctgacggatctgaagaccatggccaaggccgatccgtacgatgtcagcgattcggtcaatcccgacaaggccgatgatgccaacaccgccaatacccggtcggcattgagacagttggccgacagccggcatgacatcatgcgcatggccacctccatattgaagaacgagattgattccgacgaggtctcgtcgttggccccgcaggccctggcccggcaggatgccaatgacaccgtctcgcacagcaacgatccgacgcaatggattggctctttgctggtgctgcatgacgatatggcgctgcgatccatgtctggctccccccagccgacagccacgcgaaaagccatggtcagagccgcgaaaacactggccagcgatcttctgaacggcgtacgcatcaacccatcggaatcaatatccgtgttcagcgaatccgcgaaaatgccaatcaccgtcagcaatgaccttccttatgccgtcagcgtgcaggtcaactcgctgactgactccatgcagatcgtcacctcgcgaaccactgacatcgatattcccgcgcatagcgacgctcaggtgaccttcaccatccgcgtttccacttccggctcatcgacggcccatgtgtcgctgagcgaccgggaaggcaacagcttcggcaacacgcaggataccgcgatcaccagtgtgatgcgcgtcagtgatgccagcggtttcattatcatcggcttcgccgtgctactgtgcattatcggcctgtggcggcagttccatcggaagaaggaccccgacgaatgagttcaaccgtaggtcgtaattccctgatcatggccacgggaaccgctgcttcccgtgtgaccggtcagctccgcacgattcttctcgctgcggccatcggcaccactggattggcggccaacgcctatcaggccggttccatgattccccaatccgtgttcacgctggtgtccggcggcatcttcaacgccgtgctggtgccccagattgtgcgcacgttgaaagaaaaagacgcccaagaacgactgaatcgtctggttacgttggccatcggcatcctgttggccatgaccgtggtgatggcggcggccagccctctgcttgcccgcctgtacgtgggcagcgacgatcaccagatgatagccctgaccacctcgttcaccctgtggtgtatgcctcaggtgttcttctacggcctgtatacggtattgggtcagatcctggccgccaaagaccatttcctcacgtatgcgtggagctcaaccggtgccaacattattagttgcgccggttttactggttttattctgctgttcagcaaggccaatgaacagcccctcgaattctggaccgccgacaagatcgcgcttaccgcaggcacctggactttgggcgtggccttccaagcgctgatactgttcctgccactggcccgtatcgggttcaagtacaaacccagcttcgggcttggcggctttggactcaggtctatgggtcccgtggcgttaggctctttgggcgtggtggtcaccagcgagatctgcggcattatccttacccgtatcgccacatccgcaccgcagcgcgcccacgaactgacgggtgccagcctgttcagcgtggcaggcaacgcgacctatcagaatgcgtacacactgttcatcctgccctattcgctcatcgccgtatcggtatccacggctatgttccccaaaatctcccgttctgtcgcagctgcgaatctggatgaggcacggcacgatctggtgagcgcgctgaacaacgtagggctgctgatcatattcttcgccgccgccatgattgtgttccccgaaccgattatccgcgcattgcttccgtccgtctcgatggacgagaccatgctgatttcctacgcgcttatcgccctatctgtgggcactcctttgggatcggcgttcctgttgatccagcgcacgttctatgcctttgaggacggcctgcaccccttcttgtccgcggtgatgcagtatgggttcacctcggtattcatgatgattggcatgatggtacttcctcctgagcattgggtactcggcatcgcctgctcggtgacactcggcggattactggcgttgccgctgacgttgatgatgttgcgccgcaagttcgaaggcaatcttggcggtcgggagatcacgaggacatatgccaaggccattgtggcggcactggcttccggagttgtggtctggctgatcaaacgaccggtagtcgcactgttcggcgcggatattcgatcggtaggcgggcacatgagctggtggtctgcactggccatctgcgtggtgctcaccatcgtgctggccgtagtatatgtggctgtgttgtgggtgatacgcaccccggaactcatcagcgcctatcactcgatactggcccgtctacacaagactccggccagtgaggacgttgctgtgacagcccagccggaaaaagtcgacgatacgcaaatcaatcctgagacggagcccgtcaaggatagccccacacgtagaatatctaagaccagtctcgaacaccaatcacacggagccgaacgcactatgaaaccgcaactcggagacacgattctcaaccgatacaccttggtatcatcgttgcgtgaggagcctggcattcaggcatggaaagccaacgaccgtgtgttggcaaaggattgccagctgttcatcattaccaatcgcagcgctttcgccgcaatcgatgagctcgctggtcgcatcgccgccactcgccctgatcgtgtgattcccgtactgaaataccgtatggaatccgacgtacttctcattgtcatgccggtggacagcggccaatgcctgactgactacatggtggataccgacaagccgctcagctacagcgccatccggtcgattatcggagaatgcgccaacgtgctgcgcgaggtcattgcggatactcccagcagcatcgtcatcacaaccgacaccgttcgagtgactacctccggtgtgcagattgccgatgcaccatgtgccacgatgctggccgacacgtccgctactgatctgcgtacggacggtcctgaacggtatgcgattcgccagcttgcggcattgctctatgccctgctgacacgcacgccaagccaagcgacacccacattcaatctgcgcgccttgccgcaagacacccctggcgaattccgcgtgatttgcaagcgtggattggccttaagcaagcccgacgagcacacgttgccgatggctgcccttgtagaactcgacgccttgttgggtaattggaagccgctctctgaactgagcgatgctgatatcgctttgccgagcgtggaaagcgattgctcgattaccaaggcgatactgaagcccgccaacgagaccgatatcgtgcctattcccagcacgttgattaacagcagcagtcttccggaattgtctattgccccttccctgccggttcagccggccgccgtccccgctccgcacgcgatgtcaccggctcctctgcctgatgggtccagtactgctgacggcaaccagtctcaatctgacgcccgccgtctgtttgacttcaacctttctgacgcctgggagcacgagaatctttccggtgaagacaccggtgactggtacagcgaaatgaatccggcccccatcggcggtccgggtgataatactcggttgacggtgcctattgttaccggcggtatttccgatgccaccgtgggagagacgaccagtcgtattcccgtgttcgatgtcagcggccgtgctgtggcccccggtgaggaatcgctgcgtgccttggaagaggagcaggcccgcattgccgaagtaagcgccattcctccgagcttcacaccgaaggatgtgccggatgacgaggatgacagcaagctgcccgatgaacatctgttcggcaaactgtcgaccaaggtcgttgccatcattgtggctctgatattggtagtggcagcggctgtttgggcagtgcatgcgttccgatcctccggagacaatcctgccgatgcttccagcaactccagtgaaggtgactggcccgatatcaatgctgacgctgtgccattcggtggcagcaagaacgcgacgaacggtggcgccactgacgattcctcaaagtcgagtgatgccactcagagcgaatccagggactcggcatcagacaagtccaagaagtccgagactgctgattcgtcgtccaagaagaccaaggccaagaagtccggcgataaggattccagcgctgctccgcaaccgcgccatgagaacaacacggcgtttacgatttccagcgccaacttcctgtcgaatcctggcggccaatccgggtacgcatactacatgcaccttgaccagccgcaggatgcgtaccgcatggttatcaccatccgcacatccggtggtaagggctatattcgcgcaaataccactggagaccccactcagggcgagcaggtggccgaattcacctttgctgaaggtggcactactgaggtgaagttcaccaaagccgtcaatacgcaggatctgctgctgtgggtgccatcgggtagcctgccgcagaaccagctgtacatcgagaaggtggaggtcttctaatcggcatctataccgataactgacccaagaagggcggtaccgttcgcatacattcgacggtgccgccctttcttcgcgtctggctgaatgacatggaatatcgtatgggggtgtgacaatgtttcacgtgaaacataacgtcatcattatcggttctggtcccgctggctacacggccgccatctatcttggccgtgcaggtcttaatcctgttatggtcactggtgcgttgtcgccaggtggacagttggtcaacaccactgaggtggagaacttccccggattcccggaaggtattcttggcccggatcttatggatcgcatgaaggaacaggccaagcgcttcggtacaacctatatcacagacgatgtctcttccattgaggcgtgtgagagtgattcggtcaagccgacctatcgtgtaacgctctccgatgactcccagttggaggcatcagcactcatcatcgccacagggtcgtcattccgtaagcttggggtgcccggcgaacaggagctgtccggacatggcgtctcgtactgcgccacctgcgatggcttcttcttcaggaacaagcctatcgtggtcgtaggcggtggcgattcggcttttgaagaggcattattcctgacccggttcggttcttcggtcaccttgattcaccgacgcgatagcttccgtgcctcgcagatcatggtggaccgagccaaagccaatccgaccatcaccctgctgaccaacacagtggtgacctccattaccggcacctcctcccccacacagaacaccggtgcacctattgccattcctggcttgacaatcaaacgaccggctgtggcaccggccagtgtcagcagcattgccgtacgtaacgtggtgaccggagaagaaagcacgctggacaccaacgccgtattcgtggctatcggtcatacgccagccactgattttgcggccggtgttgtggaccgtgacgatgatggatatgtcgtggtgcagggtgccagcacggtgaccagtgcgccaggcatctttgctgcaggcgattgcgtggatcgtacttatcgtcaagcgatcagcgcagcgggcatgggctgccgtgcagcgctggatacgcaggcctatcttacggactgatggtggcggactgatggtggcttgctgttctggctgctgcctgtgacataggagcaacgctaggtcagtgttacagcatgccgcccttggatagtacgtatcggtcaaaggcatagaaagacccctcaggcgacggagaatcacgatgtgtgattgtccctccagcctgaggggttttctattgcgacaggggctacagcgcgggcatacgcccctgccaggaatcacgcagaggctataacgtcttgcgcatacaacgcactgcacagcaataatgccggcgacagtgacaagccgatacaatgccaagtgacaacgctaagcatcggtgttgtcactgacgatgccggcgacaacacgaatgttcttatcgtgttacacccatttggaatcggcatcgccttggctcggcaccagcagctgcaggatgcgatccatatcctctggtgacgagaagacgatttcgatgcgaccatgcttggtgctgcccttaatcgacaccttggtgtcgaaatgattttccaaactctgctggatggcggaaccaacccaaggattggtcttggacgtcttgggcttcttcggctgctcccccgacgcaatcttcatggcgacgatttcttcggtgctgcgtacagaaagaccttccgcaataatacgagaagccagcttgtccatttcctccggatcgctcaggcccaatagcgcacgcgcatgaccggacgatagcacaccggcagccactctcttttgcacagaggtcggcaggttcagcagtcgcaaggtattggcgatttgcgggcgagacttggacaccgacttggacagttgtacttgtgtcaacccgaactcttcaatcatctgctggtaggcagccgcctcttccagcggattcaaggccacacggtgcaggttttctagcaatgcatcgcggagcatatcatcatccgcagtggttttgacgatggcgggaatcgtctccaacccagccaactgggatgcacgccaacgacgttcacccataatgagctcatacgggctgtccaaatgaccggcaaacggatttgtgctggattccgtctcgtcgtgcttggcggctttggccgcagcaatctggcttgccggacgcttgcgcacgactatcggttgcagcacaccaacttccttaatggaagcagacagctcattcaactcatcctcgtcgaagatggtacgaggctgatgtgcattgggcccgatatcagacagtttgagttcagccagataaccaccggctaccggcttgagctcgtccttcttatctgtgtcagcggtctttgccgccgatgcagtctgagatgtttcacgtgaaacatctttgacggtgacggatgtacgatgtgccgtctgagacgcagacggcttgccgccctgctgaggtgcggcgaccttaccggtttgaggtttctccgtaccgaaaaacaggtcgctaggatgagtaatggtgtccaatgcgggcatggatgcgcgtttaccggcggctttcttggctgctttgctggacgataccatctgaggcgcggcaggctttgattcctgctgggcagtagccttcttggcgggggttatgtcagcagtggccgccggagtagacgaatcctccgcaatcattgcgggctgctccgccactggctcctcccctggcaatgtggggaacaaagcgccaaggcccttaccgagtcgtgattttgatgccattacttgttcctcctcgcatcaatggtgtcaaggacttgttgcgaacgctgtgcgatttccaaagctgcttcaccatacgatatggcacctatgccacgaggatcataggcaatcaccgattgggagaaactcggcgcttcggagatcttgactgaacgcgggatggtggtattcagcacaatgctgggatagtgtcccttgacctcgttatatacttcacggctcaatagcgttcggcgatcgaacattgtgacgagcatggtggacaccagcagtactggattgaaatgctcctgcaccaaaccaatcgtgttgatcagctggccaagaccctccaatgcataatactcagcctggataggaatcagcatctcggtcactgcacacatggcgttgatgaccaagaggcccaagctgggcgggcaatcaatgaacacgtaatcatagtgtttatctgattgacgcaggtagaggtccaaggcctccttcaacaatgtgtttcggttgggcagatcagccacttccaactcggcaccgctgagatcgattgatgcaggcacaacatcaagtgtgggaaaatcaggacagaccgtgataacatcacccagatcggaacgcccctcgataacgtcatagaccgagggctctcccgatgcatgagatacgcccaacgccgtagaggcattgccctgcgggtccatatcgatgaccaacacctgcgcgcccttgttcgccagcgccgcagcggtgtttaccgtggatgtggttttacccactccccccttctggttggccacggcaatacgacgggtacgttgaggtttggggaaatcggttttcttgagtacatcgtagcgtgagctttcatcagccatctggctgccaagcactgaaccgtgaccatcgaatattcgctgaagcgtttcggaagccgattctataggttccgactgatgatccttggtggacatcgctcctccttgcacagacgtaagttccagtgttctcattcgtatggacatgatgctcgttatccacaattgcgatatgcaatgtggataagtgtggataagtgtgaatgacgttgagtgttagattatgtattcgcagacgaaaaacattgaaaaatcagtgttttcatcattctgcacatcgtcccgtaaaaatgtggataacttttacgcacatatggaaatgtggataactcaatcagtactccactcatcgcttatccacaatcaccacgtgggtaggctcaagatccggtccgacagccgcctcaacgacgcgtggacgacgaccaccgaattttgcaatctccttgccagccttgtcgatttcagcctgagcagaccgtcccttcagtgcgatcaactgtcccgacggtttcagcaacggcaacgtccagccagagagtttggtcataggagcaaccgcacgacacgtgacaacagcgaacggatgaatttcccgcttccgtacctgctggatgacggcatcggagcgtccacggataatctcaacgttctgcagttgcatcaggtcaacacattcatgcaaccattcgattcgccgctccatcggttcaatcagcgtgaagtcatgatcagacaaacacgcggcagccaccaatccaggaaaaccaccaccactgccgacgtcggcaactgttttgaagcgaataccattcgtcacattccgaacgtacggcacaatcgcagcggaattcagaatatgccgttcccaaatgatatcgacgtcacgggggccgattaatccacgaggttcaccctcttcggcaatcttggcatggaaacgctccaacttcggcaacgcatcacccaagacctcagcaagtacaggtgacccctgcagctgatccgtcatagccatctccctcaccatgtttcacgtgaaacaatcaacatggaaaaggcgtcgctcattacgacgccattctccctacggtcactcttgtttgtttagagacgacatccgttgaacgtccttgtcatctcaaaaactcgtcgacctattactcctgatcaagctcgtcgtcttcggcaacatcctcgattttgttcttgagatacaccgtcacgtaacgatgaggctcctcaccgtgcgagcgagacttcagcccctcttcccgaaccacatcgtgaacgactttacgttcgaaggaattcatcggcttcaaatcatacggctcgccggaatccttcactgcgtcaatggcatccagggcgatatcacggaggtgctgacgcttgcgcttcaggaaaccgtcgacatccacaatcagatgagaacgctcgccggtcttctgctgtacagccagacgagtcaattgctgcagagcatcaacgacttcaccattatggccaataagatgtttgatgtcggtatcgtcatcagcaacgatttgcacggtggggcggtcattacgcacgcccatctcaatgtcgccctcatagtcggcgatatccagtaggccttcaaggtaatccgcggcgatgtcagcctcttcgttgagctgatcgatcgacttcacgtcatcctgtgccatacgctactccttcatgtcgtgtttgaattccaagtctaagccctgctcccccgaacagagaaagtaatgtcggtgcgtgttgaatgtttcacgtgaaacatcgaacgcgcaccgacatggtcgtcacttctttttgcgcttacgcacgggctgttgacgctgatagccctgagtggccttacgctcagcctcttccttggccttggccaatgcttcttcttccagagagggcaggccggcctttgcgcggcgagcattctcattacgatgatcgcgcttctccttgtccgccgcagccggagagccaggggtcgggaatgcgtacacctgccacaatgtgcggcagaggttgcacacgttgttggtcagccagtagaccagcacggcgaacggcatggtggcaccagagaagatgtacatcaccgggaagagccacagcatagccttctgcatggtctcggcctgtttgttcatcgatgcggcgggcatgttgcgcttcatgttgaagtactgcataaaccacaggcagaagcacatcaggaacacgaaggtaccgatgaccaccttgcctgcagtagatgcgcgggtgaagttatcggtcacactgacaatgccgaacacatcggtttgggtgaattgcttggcggttgctacgtcgaacgcgcccaacgcaccgcgtttaccgttggcaatgtagggaatggccgacagcgtatagaacatggacatgaacaccgggccctgaatgagcataggcaagcaggagccagccggattggcgtcattgtcttgatacagtttcatggtttcacggctcatggcctccttggaagcctgatccgtcttgcctttgtacttgttctggatgcgcttcatcttcggcgccaacgcctgcatcttgcgcatcgacttcatctgcttgcagaacagcgggaagatacacgcctgcaccaccagcaccaggataataatggcaagcacccatgagacaccaatcgggctcatgcccagcatcgcgaagaagtcatgcacgatcttcatgatccaggtctgcaaccactcaacgggagtcaggattttatatagaaatccccaaaacccgctatcaagcagaaattcatttgagttcatcgttgggcctctctttgggttgtggccaatggtgtcagtcggggctcttcatgagccttcgaccacgaaaatctgtaaaaaatggaataccgttgtggaacatcgtcgattcccccacgactccacggccggcaacgcagtaatctcagcatggcgagcactccccctttgaacgcgccataccgttccaatgcctcaatggcataattcgagcacgttggataatacttacaacaaggcggtgtgtttgccgagatgtgctgttgataccagcgcaccccaccaatcatcaccgccttgaaagaagctgtcatgcctcagccaccttatgcgccactgtggcaaaagccttcgcgatctgctgatctagcgaagcgaacgatgcggtcgcggcactgggcttggcgcgcaaaacgatatcgcaatgcgcgggcagcagatcctcatgggctctggccaatacacgaaacctacgcttcaccgtattacgggtgaccgcatgtcctaccgatttggagacagctaatcccaaacggcgatgcaccgtccggtcgtcatcatcatgatggtcgtcgggcaccaaatagtgcacgacgatatccttgccacctgctttgcgccggcgtttcagcacggtgacgaaatcacgatggctttgaagccgctccacctcgactatgcctgtggcactgatcggaatgatcaggcggagagggacttgcggcccttggcacggcgacggttgatcaccgcacggccagaacgggtgcgcatgcgcaggcggaagccgtgcttcatgtggcgacgacggttgttcggctggaacgtcctcttcataatccattgctcctaggtctattcggcaacgcttcgcgctgccctcacgtgagtcaagctataccaaagtactctcacccctaccctcaagtcaaaacggacggagtattttcacatttcgacacgttgcgagacacgcctcaaatctcttataatcggcggaataccaaccattcacggccaaaagttatccacaaattacatgtctgttattcacaatccagttatttcaacacgcgacacggtggataacttgtctaaaccagagtaaatattatctgttgtacagatttcgccacaccgatagaaggggccaccatggttaacgcttccggcgaccccgtaatcgaggccgcccacatctggtcagacacgctgacggtgctcaaacacagcgcttcgctcagcccacgagaaaaaggctggttggaaggcgttgttcctgaaggcgtcttcggttcgaccatcgtgctgtgtgtggacaacaacgatacgcttcaagccattcagggtgatttgaacgattccctgcttcaggcattgcgtacggtaaccggcgaaaatatgtttcccgcgttcaaggtcgtgccgaaaaccgagcccgaaccgctttcggcggcaaagccggcgcagccatatccttcggaaatttctccgaccgtcgccgagttcggtaaagaatcctatggtgcaaagccggtagccgcaccgcgggaaccgatgcccgccaccgagtcgcagttcccggtcggtcagcagaagatgaatcgcgatcccgagactcatctcaataagaacttcacgtttgattccttcgtgcccggcgattccaaccgttttgcccgtacggtcgcactggccgtggccgaaggttccggtcaggatttcaacccgttgtgtatctatggcggatcgggcctgggcaaaacccacttgctgaacgccatcggcaactatgcactggtcaaggatcccgggctaaaggttcgatacgtcacgtctgaggaattcacgaacgaattcatcgacgcgctgcaaaacccgaaccaaagccagggtcagattgctgaattcaaccgtcgataccgacaggttgatgtgttgcttattgacgatatccagttcctcggcggcaaggaagccaccttggatcagttcttccatacgttcaatgcactgcatcaggcaaataagcgtattgtcattgcttccgatgtggcacccaagaatttgaagggtttcgaggctcgactcatctcgcgcttcgaatccggcctgaccgtagacgtcaagccgccggatctggagacccgaatcgcaattcttcgtatgatcgcctcgatgaacggttcgaaaatccccagcgatgtgttggacctcatcgccgaacgcttcaccgagaacattcgcgaacttgagggcgcgcttacccgtgttacggccgtggcctcgctgagtaatcagccggtgacccgcgccttggccgagcagacgttgcaggacttcttcaccaccgatgtggaaatcaagcccacggacatcatcagtcaggtggcgaagtacttccacctgacgtttgaggatcttgtcggtaaatcacgaaccaaaaacgtggctattcctcgtcagatcgccatgtatctggctcgcgaaatgaccagtatgagcctgatggatattggccaggtctttggcgggcgcgatcacaccacagtaatgcatgcctgcactcgaatcagtgaccgaatgcagcaaaaacaggagatctataactacgttatggagctcacggttcgcctcaagcaaagcaacaccaactgacacaacgcttctgagagacgaaaaacggcacttttcggaaagtcagtccgaaaagtgccgtttttggttgctcaggcggattctggtggatacgtcgaggcaacggattcgagacatcagattcctcatggctcccctttgtgaggagagctgtcgtcgcagacgactgaggggagtttcgaaggggaacacgcaaaaaacccatgaaacgagagaatcgattctgaggaccgattttgcgggtttgggcgagcgagacgaaaaaagtgccgaaaacggtctccagaatcgattctcctcgacgaaaaaacagccttcaacacgccgtgcgaaagtacgaaaaccaaaaaaagttatccacacagttgtgcacagatgtgggtaaactcggcggataactcgtggattacccactgttttgttgtggaaaactcgtgcataaccgcgacctcgatgtggaaaactcaaattcgacgaactggctgtggaaaactcgcccacttatccacaagccatgcagaatttgtccacaattttcagggacttatgaaccgttgcatttgtagggctcacccctacttatccacactatccaccggccttattacgacgattacttactcagctacgtgaaaagcatcatcgccacagtaacagccggtcacccatcgtacgtaagttcgccacctaacggctagaatatttctcagccaatccgacgaagggaacaatcacacatgaaagtcgaaatcgatactgcagccctggccgacgccgtagcctggacctcccgagtcatcgacgcacgtccctccaacccgattctcgctggcgtcaagctggaagccattgacggaacgctgcaattctccgccttcaactacgagatttccgctcgccaccacatcgaagccggcgttgacgaagccggttccgtactggttcagggcaagctgctggccgatatcaccaaatcgctgcgttcggagaaaacgtacctggtcaccgacggctccacgctgaccatcacgtccggcaagtcgaagttcaccttgcagctcatgcccgacaccgagtacccggatctgcctgtggtaccggccatgctcggccaagtcgatgccccgactttcgttcaggcagtgaaccaggcatgcgttgccgtctcccgcgaagaaaaccgcccggtactgaccggcgttcgcatgcaattccaaggcgacaaggtcgtcatgacctccaccgatcgcttccgtttggcccgcgccaccttcacttggactccgcagaacccggacgtcgacaccaccacgctggttcgcggctccctgctcaaggatgtggcccgtgctcttgacgagcaccagaacatccgccttgatttcgatgccgatagcccgacgctgctcggcttcgaaaacgccggccgcgtctccacctcccagctcatcgacggtgaattcccggcggtcgaccgcctgttcgccgacgaatacccgattcaggccgtaatcaacaagcaggatctgctcgacgccatcagccgtgtggctttggtcgccgaacgcaatgctccgattcgcatgaccttcaccggtcaggaagtggcgctgtccgccggatcggtcgacgaggcccaggccaacgaaacactggacatcgacatggatggcgacgacatcaccgtggcattcaacccgtcctacctgaaggagggtctgtccgccgtgaccgaaccattcgtgcgcatcaagatgacgaccccggtcaagccggtcgagttcaacggccagcaggaagctgattccgacgagtccatggactaccgatacctgctcgtgccgatgcgcttcaacaactgagatccctgaatttccaacgattcgctaatgcacatctcccgtctcgcactcgaccactaccgctcatggagtcaagtagtggtcgatttcgtaccaggcgtgaatatcctgttcggcaagaatggcttgggcaaaaccaatctggtggaagccgtcgaagtgctgtccaccggatcgagtcatcgcacgtccagcacgttgccgctgatcgaacgcgggcagaccacggccaccatccgcgcgaacgtcgctgatgatgccggtcaaaccactacgtatgaagcgtcgattcatgcgcgtggtgccaaccgagcccgcatcaactcggggtcgtcgctgtatctgcgcgatatcattggcaagattcccagcgtttccttcactcccgaagatcagcgattggtgtccggcgatccgggagcacgccgcgtcatgatgaatcaggctgcggctctgctcgagcccggatacatgcagacgttgcaacagttcacgcgcatcgccaaacagcgtgccacattgttgaagcaattgaatgccaatgccaacaatggacagccgatggatgcggttctgagcggtttggaaatctggaccggccagttcatcgaagccggtgtggcgttgacccgtatgcgcgctcatgtgatcggtctgcttgccgagccatttgccgcgatttacgccgacttggccggtgccggcgagcaggtgacgctcacatatgcgccttcattcgacgaagtgctgatgttcgacgatccacatccgcagatcagcgagcattttcaacgcatctaccccggtgaaatggctcgcggcgtgaaccttatcggtccgcagcgcgatgacatgaaccttgagttggccggtattcccgcccgcgagttcgcttcgaacggcgagatgtggacgatggcgttggccttgaaaatggcattgtttgaaatcgtgcgtgaccggttgggattgcagccgattgtgattctcgatgatgtgttcgcccagcttgacgacagccggcgcacgcagattcttgatttcgccagaaaacaggatcaggtgctgattaccgtggccgctgaaggcgatgtgcccgactatgaatcggcccatcgtatcgacgtggccacactggccgaacccgcttccgtaatactgccaactctgggcaatttgtccgattcgcgggaaaacgagagtttgggtaagtatgacggaaaacccgcggtggacagcgcgtccgtagaacggaaagtgtcatgaacccgccgatcgcccgccaactcaacctggacgagaccaaactgccggccgaaatattcgagcggctctcccgtcgcggggcgaccttgaaggactacagacgccgccgtgaagaggccatcgaaaacttcggcaaaccggggcgcgatccggctgaactgggcagcgtgatgaccaccatcgccggcaatggcgtctgggcggcgaatatgaaacttgcgcaattgcgcaaccattgggaccaagtggtggggcaggccatcgccagccattcggcagtcgccgatttcacggacggcgtactgaccatccgtgccgaatccacggtctgggccacgcagctgacctaccttatcccccaacttaccgataccatccgtcgcaatctcaaaggattgaccatcgccgagattcgcgtgaccggaccggccgccggatacacgcgcaaatgggctcggcggcggtagccaagataccaaacaaattcgcagaagcctcgctatggcgctcgtcgggttagacgagtaaaatcacatgcagtatggtcaaatggccagaagagccctttacgggcctcgtaagccatatcgcctccgtgaatgaccttcatgacggaggttgaccctgtagtcacggaaggaagcctgttggcagacgaaaccagcaaagaggagcagctgaaggcggctgcggaacgcatcaacaatgcggaattgaccgaaggcgaacttgacgaatccatggcccccgagcattatgaggcctccgatctgagggtgctcgaaggactcgaggccgtgcgtatccgccccggtatgtacatcggttccaccggcccgcgcggtttgcaccacctggtctatgagatcgtcgataactcggtcgacgaggcgctggccggatacgccagccatatcgaggtcaccattctgccggacaacggcatccgcgtggtggacgatggtcgaggcatcccggtcgatgaggtgcccggcgagggcgtctccggtgtggagaccgtgatgaccaagctgcacgccggcggcaagttcggcggcggcggttatgcagtgtccggcggtctgcacggcgtgggtatctccgtggtcaacgcactctccacccgcgtggacatcgaagtgcgccgtcagggcttccactggacccagacgtacatcgaccagcaccccaccgcgcccttgaagcagggcgagccgatgaccgaaggcgagtccaccggtacgtccgtgactttctgggccgacccgaagatcttcgagaccaccatctacgacttcgagacgctgcgttcccgtttccagcagatggccttcctgaacaagggcctcaagatcagcctgaccgacgagcgtgagaatgaccaggccggcgacgaggtggccggcgacgccgcggacgagcccggcgcaaagcaccagaccgtcacctaccagtacctcaacggcatcaaggactatgtcgactacctggtcaaggtgcgcaaggccacgccggtggaagaggacgtcatcagcttcgaggccgaagacctgaagctcggcatctccgccgaactcgccatgcagtggaccaccgcctactccgaggccgtgcacaccttcgcgaacacgatttccaccaccgagggcggcactcacgaggagggcttccgcgccgcgctgacctcgctggtcaaccgttacgcgcgtgacaagggcatcctcaaggacaaggacgagaacctctccggcgacgacgtgcgtgaaggcctgaccgccgtgatctccgtcaagctcaccaacccgcagttcgaaggccagaccaagaccaagctcggcaactccgaggccaagaccttcgtgcagcgcgtgatgaccgacaagctcggcgactggttcgacgcccacccgaacgaggccaagaacatcatccagaaggccatcgaggcctcccgcgcccgtctggccgccaagaaagcccgcgagaacacccgccgcaagtccatcttcgagtccgccggcatgcccgacaagctcaaggactgccagtcctccaacccggaagagtgcgagctgttcatcgtggagggcgattccgcaggcggttccgccatccagggccgcaacccgatcacgcaggccatcctgccgctgcgaggcaagatcctcaacaccgaacgtgccagcttggaccgcatgatgaagtccgacaccatcgaatcgctgatcaccgcggtcggcggcggctatggcgaggacttcgacatctccaaggtccgctaccacaaggtcatcatcatggccgatgccgatgtggacggtgcgcatatcgccaccctgaacctgacgctgttcttccgctacatgcgcccgatgatcaccgccggctacgtgtacgtggccatgccgccgctgtaccgcctgaagtggaccaagggcccgcacgacttcgtgtacaccgacgccgagcgcgaccgcgtgctcgccgaaggcaaggccaacggacgccagctgcccaagggcgaaggcatccagcgctacaagggtttgggcgagatgagctaccaggagctgtgggagaccaccatggaccccgagcaccgcattctgaagcaggtgcacatcgaggacgccgccgcggctgacgagaccttctcgatgctgatgggcgatgaggtcgaaccccgccgcctcttcatccagcgcaacgccaagaacgtgcgttggatcgatgcgtaacggaatcctccaacctccctcgtcagagggaggtacacaacggacttagacaactaaaggaacaacagtggcagatgaaaacaacaccggcgacgagcagttcacgccggacggctcgatggagccgttgagcccgcaggaggcggacaccaccgactacggcctgatggacaccggcgaacgcatccagcgcaaggacctgcagcaggagatgcgcgagtcctatctggcgtatgccctctccgtgatcgtcgagcgtgccctgccggacgtgcgcgacggcatgaagcccgtgcatcgccgtgtgatctacgcgatgtacgacggcggctaccgccccgatcgcggctacaacaagtgctcccgcgtggtcggcgacgtgatgggtaagtaccacccgcacggcgatttcgccatctacgacaccttggtgcgtatggcccagtcctggtcgatgcgcaacatgctcgtcgacggccagggcaacttcggctcccccggcgatgacccggccgccgccatgcgttacaccgaatgccgcatggccccgctggccatggaaatggtgcgcgacatcgacaaggacaccgtcgacttcgtgcccaactacgacggcaagacccaggagccgaccgtgctgccggcccgcttcccgaacctgctcgtcaacggttccgccggcatcgccgtcggcatggccaccaacatcccgccgcataacatgcgcgaggtggcggacggcgtccactgggcgctcgaccacccggacgccagccgcgaggaactgctggaaaacctgatccgcatcatcaagggaccggacttccccaccggcgccaccatcctcggccacaagggcatcgaacaggcctaccgcaccggccgtggcctgatcaccatgcgtgccgtggtcaacactgaggagatcaacggccgtatgtgcctggtggtcaccgaactgccctaccaggtcaacccggaccgcctcgtcgtctccattcgtgaggccgtgcgcgacggcaagatccagggcattgccgacatgcgcgacgagacctccggccgcaccggccagcgcctcgtgctggtcttgaagcgcgacgccgtgccgaaggtggtcctgaacaacctgtacaagcactcccagctgcagcagaccttcggcgccaacatgctggcgctggtcgacggcgtgccgcgcacgctgagcctggacgccttcatccgccactgggtgaaccaccagctcgacgtaatcgcccgccgcaccgcgtacctgaagcgcgaggccgaagagcgcgaccacatcctgcagggctatctcaaggccctcgacatgctggacgaggtcatcgccctcatccgcgcctccgaagacaccgacaccgcccgtacgggccttatggggctgctggacatcgaccaggtgcaggcggacgccattctggccatgcagctgcgcacgctgacccgcatgaaccgcgacaagatcgtggccgagcatgaggaattgcagcgcaagatcgccgactacatcgacatcctcgccaagccggaacgccagcgcaagatcatcggcgatgagctcgacgagatcgtggccaagtacggcgacgaccgccgcaccaagatcctgccgttctccggcgagatgaacgtcgaggatctgatcgccgaagagaacgtggtggtcaccgtgacccactccggcttcatcaagcgcaccaaggccgacgaataccgcgcccagcaccgcggcggcaagggtatcaagggcaccaagctgcgcgaggacgacgtggtggatcacttcttcctgacctccacgcacaattggctgctgttcttcacgaacaagggccgcgtctaccgcatcaaggcctacgagctgcccgagggttcgcgcgactccaagggccagcacgtggccaacctgctgcagttcgcgcccgacgagaccatccagaccgtgctgtccatcccgaactacgaggtggccaagtacctggtgctcgccacccgttccggcaaggtcaagaagaccccgctggccgagtacgattccccgcgccagggcggcctgatcgccgtgcgcctcatggccgacgagaatggcgagaacgccgacgagctcatcggtgccgcgctgtgcaacgccgaggatgacatcatcctggtctccaagctcggcatgagcctcaagttccaggccgacgacgagcagctgcgtccgatgggccgccagaccgccggcgtgcagggcatgaagttccgtaacgacgacagcctgctggccatggatgtggtccctggcgactccgacaaggacctgttcgtggtgaccaacgagggcttcgccaagcgcaccgccatcagcgaataccgtctgcagggccgtaacggcttgggcatcaaggccgtgcaactggtcgagggccgtggtgccctggtcggcgcgctcgtggtgtccgaagacgatcaggtcatggccatcatgaagtccggcaaggtgattcgttccaacgtggacgaggtcaagcgcaccgggcgcaacacccagggtgttaccttcgccaagcctgacaagggcgacacgattctctccatcgcccgtaacgaggagaaggacgagcccgaggacagtggcgatgccgcggcgaacggcaccgccgagaccgcacaatccggcgagaatgtgaacaacgcggacgaggcgtgagcagcgtcctgaaaagctggtagcctcgcatacagcagaggctaccgccaagcctgttaaggagaaacgatgagcgagaatctcgaagacaacgagccccggatcataccgccggcagtcggcaatacgcagaacgatcatgtcgagccgctgatcggtactgagcacgctccccgcgtggcacgctccgtgtccagcgatccggaagaatccacgttgccttcttcaggtgccgccactcccgtgcgtccggcacctcgccgtagcgcccccagggctcgccgcatgagcttgtcgctgacccgcgtggatgcttggtccgtggccaaggtgacgttcatgctgtccatcgccgtggcgattattcaggtcgttgcctccgcgatcgtatgggtgctgcttgatgtggtcggtgtattcagccagattacgcagattgtgtcttccaccggtcttgatgcaggcggtttcgatctcaagaacgtgttgtcccttaccaccgtggtctccggcgtcaccatcttctcgattgttgaagtggtgatcttcaccctgctggccaccattgcggcactgatctacaacgtggtcagctcgctggtcggcggcgtgcacgtcacgctcggcgacgactgatatagctatactggcagaactcccctcagtgaaccgcaccccggttgttggactgaagtaattcagattcgatgatcggaggtgcggtttcttatgtgtggggttcgtaggcgtcgttgctgggccgagacttgggactccggcgacgctgggggtggcaggcgtcggtgttgggacaggttttgtatctctgacgacgctgtggagggcttaccgtcgtcagcggtacagatcttggagttctgccgatgctgagggtgtgttctgtgtcgtttgcgtccaattcttggccctctgccgacgctgggcacagcaagcgtcgttgctgggccaagttttggactgccgccgacgcagagaatgcacacagcggtgttggtctgccagcgtgtggcagcttggcgccgttgaggaaggtctatgtggtgtggttccgccaaaggactggcaggttggcgctactgaggggactttatgggctcttccggttttggcgtgtaggggccgtgcggtttcattcactttttcaatcacacaccgaatcaaaccgcacggcccctacgcaccaaaatgcgaagagccggtttcgctaactagtgcctatatgcctgcaatcaggctgatttgtgctgtcaggctggctggcgtcagcggttgatctgccgatgttgctgctcgtcagtctggactgttgggctttcgttttgacagcggaaggaagatcctcctcgcggtagggcaacaattatcagtatcataattaaggtaatcgtgattacattaaccatgatactcttattattgggcggtaagcggatcggagggctgcaatgtttgtcgcacgagagcacgagttacaagtgctggaaaagctgtttaccagcgattcgttcgaaatggtggtgctgtacggtagacggcgtgtagggaaaacggcgttgatcgacgaatttgtcaaagataaacgcgtgctgtacttcacggccatacagcaaagcgccaagatgaatcttgaagatttctcaagagcggcattgtcgttctttggtatgccggattccaccccgtcgtttggcgggtggtctgatgcgttatcgtttgttgctgaacgtgctgcacagactgacgaacgtatggtgttcgtattcgatgagttcccttatgcagctgccgccgagccagcattaccctccatgttgcagatagcaattgaccatggattcctcgccacaaaagtgacgatgattctatccggtagtaacgagggattcatggaaaacgacgtattggggcgtaaaagcccgctatacgggcgtcgtacagcacagattcgactcctgccattcgactatgcggatgcggcaaaatttctaacgaacacatctccgcaagaactggtccaatactatgcgactttcggcggtacgccatattatctggcccgtatacaggaagccgatggctttgaatccaatgtgctgcgcttgatgttcgacaacttgggcgtactgcgtgaggaacctatgatgctgttgcgtcaggagcttcgtgaaccggcatcgtattattcgatattgcaatctattgcgggtggtaattcctcgccaaagcttatcgctgaacatgcgggtgtcgaatctgattcgattggagcatatctgaaaacgctggtcgatttgcgcttaattgagcgaaaagtgccgtttggtgaagatccgagtaaatcgcgcaagggaatgtatgtggtgagcgatcccttctttgcatattggttccgctttgtggggcgcaacatgagcattttggatggtaatatcagcgaggaggttgcgagcagactcgcttttggaccatcgtttgatacctatgttgggcaacaatttgagacgatttgcctgcaatggcttattcgaaacaacgctatgggcaacctcccctttgttgccactcaattcggcaaatggtggggcaatgatccgattgctcacaagcaaaccgatatcgatgtgattgctgcggattcgctcgataaaacgattctgttcggtgaatgcaaatggcgtaattcattcaacgaaacggaggctattgaaaagctccatcagtgtgctggcttagtccgcggctatcaggcaggtaatgcgtggcttatgctgttcaccaagaatccggtgagtgagtccacgcgaacccgctacatggatgatgaacgaatggtgttcgtttccgcggaagagttatacactgcgtgatgcattactgggtgattgtgacgcggtatctagagtcctgccgacagccacgtggcaattacgccgaatcacgcaccaccaaatcggtgttcaggtgcatcacgcgcggtgaagagactccgttgatggctttgatgaccacgtcggccatggtccagcgcgctgatccatgtgctgatcgacggtggtgagttccggggttatggaggtggaagctaagttgttatcgggcttacgtatttggggatagcacttgttgctcgttgtacatatagcaatgcccttgcctcctcacgggaagcaagggcattacgctactgcttagtactgctcagaggcaagcgtcacagcacgccctgggcaaccatggcgttggcgaccttgacgaagccggcggcgttggcgccgagcatcaggtcaccctcgtgaccgtattccttggcggcggccagggagttggcgacgatctcttccatgatggacttgagcttggcgtcgacctcttcgaaggtccaagacagacggtagctgttctggctcatctccaggccggagacggccacgccaccggcgttggcagccttggccgggccgtacagcacgccgttcttctggtagacctcgatggcctccggggtggacggcatgttcgcaccctcgacgaccacggtcacgccgttgtccacgagcttctgtgcggattcgccatcaacctcgttctgggtggcgcacggcagagcgatgtcgcccttgacggtccacacgcccttgctgccctcgtggtactcggagcccggaacgcgctcggcatattccttgatgcggccgcgctcgacttccttgatctgcttgacgacctcgacgttgatgccgttcgggtcgtagatgtagccgttggagtcggagacggtgacgaccttggcgcccagctgctcagccttctgagcggcgtaggtggccacgttgccggagccggagatcacgacggtcttgccctcgaaggagtcgttgcgcagcacgcgcagggcttcctgggtgtagtagcacacgccgtaaccggtggcctcggtgcgggccagggagccgccgaattccagacccttaccggtcaggacgccggagtactcgtcgcggatgcgcttgtactgaccgaacaggtagccgatctcacggccaccgacgttgatgtcgccggcgggaacgtcggtgaactggccgatgtggcggctcagctcggtcatgaaggcctggcagaagcgcatgacctcggcgtcggacttgcccttcgggttgaagtcggagccacccttgccgccgcccatcggcagcgtggtcagggagttcttgagaatctgctcgaagccaaggaacttgacgacggactcggtcacggtcgggtggaagcgcaggccgcccttgtacgggccaatggcggagttgaactggatgcggtagccgcggttcacctgaaccttgccctcgtcgtcaacccaggccacgcggaacttgatggcgcgctccggctcgacgatgcgctccagcacaccggccttctcgtactccgggtgcttctcgacaaccggctgcagggtctcgaagacctcgcgaacggcctgcaggaactccggctgatcgccgtcacgggcaacgacctggtcgtagacacgcttgatgtactcgtcagtgagcatgattctcctcgatttggtagggaattaagacggttttattctatgcgcgcaggcccttgctgcatagagtctcgctcggataacgggaaagctttcggcgtggttatggagtggctcaagtttccgtttgttagatttttcgggcgattgttggatgtctgtctatgcgtgaatcgggtcgaaagggaagctgcatcacaccggaggcacgttcatatagtggacataaaggcggacttgggtgatgtcagatgtgtctgttggggatcgtgcggtctgtggggtttgtggggtgtggctggaccgtggggtcgtatggtttttgtgacctgtggggtttgtggggtgtgtggccgcaggtcttcggcgcgcaggttaccgggttcgcggtcagtgtgcgaagtaggtctgcagaatcatcgtggtctcggtgcttaccggcaccgtgcggtggatgagattgagcagttcttcaagtgcggtaggggaagccacgcgcaccaccagcacgaaactgggggcgccggccaccgaatagcaggagacgatgccgtcgatattgttcagcttgtccggaatcgaggattcggctgagtagtcgagcggggtcacgttgacgaacgcgctgatgggcaagccgcgctgctcttggtcgatgatggccttgtatcccttgatgatgccgcgcttctccagcttctgcacgcgcgactgggcggcggagactgacagtccggtcgcctgggccagttgcgcgagcgtggcgcggccgtcggcctccagcatggtgaggatgcgctggtcggtctcgtcaatcgcggtcatgatgtcttctccgttcgttgtgctctgtgttcactgtacctgttgccggaatgcgatggctttccgattttgcctggtaatttcagtagttcttcctgtgttttctgttgtgtggtggaatgtttacgtttaaagtcctaattggatgtaataattccttttgaaataagagaacgatgaaataattccattgaggagggatgatatgcagaagttttccaacatgtctctgtccgaagttgcatctgctgctgcgcctgctactatgcctgctgccggtcgggttgctgtgccgaccgccgagcccgcgagcctgtccgccgaagccctgaatatcccgcgctccggcatccgagacgtattcgaccgtgtagagcgcgtgcctgacgcgatttcactgaccgtgggggagcccagcgccacggccgcgccgcatatcgtggcagccgcttgcgaggccgcacaggctggccgcactcggtacaccaacgtgcttggcatccccgaataccgcaaggccgtggccgattactccgcctgtgtgaagggacttacttatgatcccgaaaccgagattcaagccgttgacggtgccacgattggcctgtttctggcgctgaaagccgtggtgggcaccggcgatgaagtgattattccctcgccgttcttcacttcctatgacgccgaagtgatgctgtgcggcggccgcccggtcaccgtggcgctgcgtccggagcacggcatgcgcgtgaacgcggcggacatcgaagcggcgatcaccccgcgcacccgcgccgtaatcatcaactcaccgggcaatccgaccggcgcggtaacctctgccgccgaactggcgcgtattgccgaagtatgcaagcagcacaatatttgggccatctccgacgaggtttaccatccgttcgtgtttggggaaacgttcggggaaacgcttgggggagaggcagccgtggcaccatcgatcgccgcggtgccgggcatgaaagagcgcaccattgtggtggaaagcctgtcgaaaacctatgcgatgaccggctggcgcatcggctacctgctggcacccgaagcggtcatcgaacagaccggcaaaatcgccgaactcatgcactcctcggtgaactccttggcgcaatacgcaggcgtggcagcactggctggcccgcaagataacgtggccgccatgcgcgaggaataccgcgccaagcgccagatcgtgctggacggtctggccggatgcccggtattgcgtctgatcgaaccgcaaggcgcgttctacgcctttgtggacgtacgcctgactggccttgactccggtgaattcgcagaccgtctgctggacgaagagcgcgtggctgtggtccccggcgaggccttcggcgaggaggggcgcggcttcgtgcgcctctcctacgccggagatgccgacgagctgtgcgagggcgtcgcccgtctgcgcgcattcgccgaacgggtatggaaccccatcaccggccaccacaccgccacctatcaccccatggaggtgctggcctgaggcttaaagcgaggctaggccgccattcggcctcgtcggcgcgagcgatggcctgcttcttggctcgcagcaagatgtagccgagtaccagaacgttggccagagctcgatgttggcatcgcgtcaaaacaaccgcattaaggctgccgcgtctcgtatcgttacgcgtaggggctggctgaggcgtaatgctgaagagtaatattgaagcgatggcaatcaagccgatttgagggagagaggcacacgatggcgtactgcggccactgcggaaatagagttgatgggccggcacgattttgcccggcatgtggagcgtctgtagacagcgcaccagttgcgacggcaccagtaccggccgcatcgccagccgtaccgcctgcgtcgataccggcacctgctgtgccggcgtctgcggtaccaccatcgataccagccgcgccggttgccccatcggtttacgccgcgtccgctgccccacagccggcaccaaccgttcccctgccggctttgccgattcccgctcctgccgcatatcaggcgactgatgcaaccgccgtcctggcaccgcagcgcaaatccagcaagaagctgatcgccgctttctgcgcattgcttgcgacgattctggtggcggccttggcgttcatcatccccaacttcaccgccgtcaaagcgatgctgggcttccggcccaccaatccgctggttgtcaccttcgacgcgatcaactcgctgtccactctgcgcagcaccaaatacgaactcagaacccacagcatcactgacgattctcttgacgtgcggatgtctggcatgtattcgctgggcaaaaccaccaacgaatcctccgcgtccttcactagcaaaacagacgaatatgcaacgaccttcgcttggtacaaaggcgcattcgccgagaaatccgtttggcatgacgacgacccctactacatctactgcccggccgaccaatatgaagatgacttaaggaacggcgttggtagtgatgtggcggacttgatattgaacgtcaaggatgcgttggtcaagaacggtgcttgggacatcaccggcgcggagcaaacgttctacgatcagctggacaagatgaacgacgatgggtactcgaacgacatcgaccgggccaagggcacgaaaaggtctgccgaggtgaaggccgaggccagcaaattcatccaacaatatttcggcgtggagctggaagataagaatgtgcgcagccagctgttcccgaatacatcgtctgccaagtctgccggcaatacgcagctgtcgtaccaaatcgatatcaaagcgttgtctcagcatttcgtgaattactggatcagtcatgaagcgcagtatccgcatctgaaatcctgggtgattcagcaaatcgaggatgccggcgtggacgatgctgaagatgagtaccgtcaggcgctcgataatgtgcgcaactgggatttcggcacggatgaagagccggagatgccgactatcaccgtggatctgaactacggcagaaagcgtctgatgaattcgattgccataagcgtgtccggcaaggacgaatacggcgactcctataatggctcgctatcgttgacgctcagtcagcagaacgcggtgtctgtggacgaccccgatttgactgatatggtgagcaaagccaaggacaacaacggactggatttgtcctgaatatggtgcgtgggatgttgcggcggcgctaatttcctcggtgggctatcacgcactcttcccgcttgcagcggtctgctcgctgattggcgcggtgctgatcgtcttcatcaagtcagtgaagtaaacatacttattcatccctcttccttccataacaaacgagcggaggggttgggccattgttttgcggtgtgtccagtctctccgctcgtttatttgcttgattctgtggaatggaaggggcatgctctatgtcaaataagataatgcggaagggctgttctgcgtgcatatatcttgctgaacgtatttgagggtactttctggttaaagacacgccctatggtgggcagaatgctgccgttgtgtctggcgtcggtcgcaggacatgtcgtatcatgagggcacaagcttaattcagccgtcctcaatctgattagtcgtcgggtcgggttggcgtgatcggcttgcagggaatcatccggctcttccggttttggtgtgtagggggggatgcttataggtgggcttgtatggtgtgtctgaagccgccggtgtggaggaggctgcgggtgacgtagttgtcgaggttgcggaagccgagggcgatgccgcgtagggtctcgggcctgccgttgatggcctcggtgggaccgttggcggtgccgtgggcgcggtcttcggatcgatcgtccccggtgccggcaccgtggtcggcgcatttgtcggaacggcgattggcactggagccggatggctgataagtagcggcttagacgcactttacgacaatcaggtgcacagaggcggtggagatgacccgggcagtcatttcaaggataatctcgggttttggaagtggaggtatctgttggcgttgttcactcggtatgtgttggtggggcgtcttgaggacggggcgcaggtgttctgggacacgctggagaagacgccggtcaagcgcaagctggatttcggcggcgattccggctgggcgcgggctggcgcggcggccggcggcgctgccgccgcggctgcgtccggcctgatggtcatgatccacggcatcgcccggctgctcaccccggacacgaagacgcaccacacgcataccgatgacgtgacgctgctggcttttctcagaccggtcactatatcccgcgacgcatggaacacgtacgtggcggtcgccgtgatgtggctggccggactcctcctgtactggggtttctgccggctcgtgttcggccggccgaacacctacgtccccgcctcgctggaggacttggcattcgcctcctccatgcccgccacgaagctgcgctacatgttcggcggccccatcgtcggcacgctgttcctcatcgcgatatcgggcttccccatagcgatgacgtggatgttctggtcgagcgcgcaatgggtcgacaccggcagatccacacctgactggattggatggttggctttcttctgggcgttcctcgccacatgctccccgattctgttggccttgcgtttcgtcggaccgtgggactggcggggacgtttcagcccgcacgcgggcgccgaacgctggagccggctgaaatgagcacactgctgatgggggtcgggatgggcctcatggtcgcaatctcgctcgcattcatcctcgcgttcaacatgtcccggctccgctggctcatggaccacgacatccacccgctgctcgaggagcacggactgcgcgaacccgacgacgggttcacgtcctccggcgccaaggagcgcatggccgcgttccactcggacgtcgcggaggcgctggcagcgccggaacgggaacgcgaagcgagggaacggcgacgattcactgtgttcgacccgacggtcgacaagttgccgctgccggcgggcccctacccgttcgaccgtccgacggcgtcctgggcacgcgacatctacgaggaaggcgattgggcgtacgccgacgcatgggtcagggggcggaggaagccacgcgtggtgcgcgagcaacgctacgactcgtggcgcaacgaagtcctcgcccgccacggcctgaccgacgcgccatccgccacgctcaaacacatcgaacacgccgctgcacgcatccgcaccctccaccacaccagcccagccgaagcctacaaacaagcctgcaaggaagccaccggcaacacggtcaacgacgaaaccaccggagaaggaaaagaaaacggctcttccggttttggcgtgacccgcagcctcctccacaccggcggcttcagacacaccatacaagcccacctataagcatcccccctacacaccaaaaccggaagagccaattatctgccggtaccttccacccgagaggaaggtgtagtcctccgggtccgggcgatatcgccgcaaggcgaaggattttcgtgtaccgttccgtgaagacggagcgacaatgaccacgcggttggtctgaatcctcgaggggtggtccttaacaggaccacccctttttcgatggagagggccatggcgcactgggagaatccctcgaacaagaacgcaaaaaccctcagaatcggtattattccaagggttgtctgtggagctagccgggttcgaaccggcgaccctctgcttgcaaagcagatgcgctaccagctgcgctatagccccgtgagaaaaaaagagcggctcgcagccgcttcattttttctgtgggcccgggaggacttgaacctccgacctcatccttatcagggatgcgctctaaccagctgagctacgggcccgatccatacgcttcaaaagcgcacaagtaattacaataccattgaacggcggtatgtcaataacggcgtgtcgtgattgtcgcttgcgccatgattgccggctcgacggtcaatgtccagcaacgccacagccaatgcccagctatgtaaccttgcgttctcacaccgtaatgctgcggttacacctccctctctgcgcagaaatgtccaatacatatgaggcttctgctgttttcgtgggttgggctcttggttgtggtgggcgtatgtcgagtccgccgcggcggagcatgacgagggcgatgggattgttcgcgtggtggaagccgtaggccatgcggatggtgaccttgatcctgttgtcggacgcctcgagcctggcgtttgaacagcccaattcgattgtcccgaggatgtcgggcccatgacggcggatctttcgggcgagttcgacgatctcggggatgcggctgtgggacgcccggaaca

SEQ ID NO: 156 - DNA, 13750 bp, Unknown
  R206_24m  MAG No. k141_51741
acggtggagacgacccacttggcgatgtcgtcggcgcggtcgtcgtcgttgccgtagaccgggaactcgccctcggtgcggtagccgacgaccagatcgtcgtcggcgccttcgacgtactcgtactcgtggccttcgaggttcttggcttccttgttggtgatcgggtacaccttggcgtacttgatggcggacagggagtcggcggcgatggacagaccggacatgccgcaaccgagggtgcggtacacctccttgtcgtgtagggccatctcgatggactcgtaggcgtacttatcgtgcatgtagtggatgatgttcagcgcttcgacgtaggtttcggacagccactcgagcgccttctcgtagttgttcttgaccttctcgtagtccaaggtgccgtcggcctccggggcgatcgggtcgatgacgcccttgtcgatgacctgcatgccggtcatctcatcgcggccgccgttgatggcgtacagcagggccttggcggagttcacgcgagcggcgaagaactgcatctgcttgcccacgcgcatcggggagacgcagcatgcgatggcggcgtcgtcgccccagtgggaacggatttccttgtcggactcgtactggatggccgaggtgtcgatggagatcttggcgcagaagcgcttgtagccttccggcagcttcggatcccagaagatggtgatgttcggctcagggccaggtccgaggtgctcaagggtcagggtgttgagcagacggaaggaggtcttggtgaccatcggacggccatcgtcgccgaagccggcgtcggaccaggtcgcccagtacgggtcgccggagaagatgttgtcgtagtccttggtgcgcaggaagcggacgatacgcagcttcatgacgatgttgtcgatgagctcctgggcgtcggtctcggtgatcttgccggcctcgaggtcgcgctcgatgaagcagtcgaggaaggcggagttacggccgaaggacatggcggcgccgtcctgggacttgatggaggccaggtagcccatgtaggtccactgcacggcttcctgggcggtctgagcagggcgggacaggtccaggccgtactcgttgccgaggttgatgagctgcttcagagccttgatctgctcgtcgtgctcctcgcggaagcggatccagtgctcgatctccggctcggtgaagtcgttgcggtacgggatggagtccttgtcgcgcttcttgaaggcgatcagcttgttgacaccgtacagggcaacacgacggtagtcgccgatgatgcggccacggccgtaggcatccggcagaccggtgaggatcttgttgtggcgggcgaccttgatgttcttggtgtagacgccgaacacgccgtcattgtgggtcttgcggtacttggtgaagatcttcttgatctccggatccggctccttgccggcttccttgatggcctgctcgaccatacgccagccgccgttcggcatcatggcgcgcttgcagggcacgtcggtctgcaagccgacgatcacgttgtcgacttccggggagtcgatgtagccggccgggaaggcatcgatgccagccggggtgtgggtgtccacgtcgtagacgcgctgcttgcgctccacggccaggtagttgtcgtcgaggtacttccacaggtgcttggtcttctcggtggcaggagccaggaatgtctcgtcgccctcgtacggggtgtagttcttctggatgaagtcgcggacgtcgatatccttctgccagttgccctcggtgaagccggcccatgccttggcgtcgagctcctcttgggagacagctgcattttctactgcggtcatgtcactccttaaatggggttgtaggtttcgcatcttcacggaacccttggttcaacagtgtagttggcacttgcttgggaaaagccgaaattgggagtgagctatctcacattgttttttgtgaacgctaccattccaatggtttctaggtattgatggggctattgcacgtctccagatatgggaaaccgctcatactgtgatgttcgtatgagcggcttggtgagcggttcggtcttgagattgacagcagaaccgtatccgtctgttttggccgtcagtcttcatcgttcgcttgcgcggatttcacaccgtagttcttccagcgccagttctcctcctcccatctggcgttgcggtccaccacgatgtcccaggcgtgttcggcatcttccttggtcttgtacggacccatgcgctgttcaatcggtgagaccatgcccagctcggcctgcttcttgacggtgttgaaataccactgcttcttgttatcgtctgtcattggtacctcctcaacggtattacttgctcccgctggcgggagcaatatatgtttattccctgaacgcgttggtgacgggcagtcggcggtcgcggccgaacgcgagggccgtgaccttcggtcccaacgggtattggcggcgcttccattcggcgcggtccaccaatcgcatcacagtgtccacggtgtcctggtcgaagccgtcggccaacaggtcggcgcggccgtgcgcgtgctcgatgtatgcagcgagcaccttgtcgagcagcgcgtattcgggcagggagtcggagtccttctgcccggggcgcaactcggccgagggagccttctcgatggatgagaccggaatcatcacgccgtccttcaacgggatgccggcgttgccgtcctcgttgcccacgatcttgagcccgccgataccgacgcctgcggccgcggccttgttacgccaacggctgatctcccagacacgggtcttgagcaggtccttgatgggtgcgtagccgccgaccgcatcgccgtagatggttgagtagccgcaggcgagctctgacttgttgccggtggccacggcgagcaggccgcgagaattggaactggccatcacgatcacaccgcggatgcgggcctgcaggttctcggcggagacgccatcaaggtcaagttgctgttggtaggcgttgaacaatggctcaataggctggacctcgtaatgggcaccgatgttggaggccaggtcagcggcgtcgtctttggaaccatcggaggagtacatggagggcatggagatgccccagacgttctcgccgccgcatgcgtcggccgccatggcggctaccagtgcggagtcgatgcctcctgagaggcccagcgtcacgccggtgaagtggttcttggccatgtagtccttgaggccgagcacgcaggcagtgtatacctcttcgtccgggtcgagttccggaacgatctcggccttgacctgatgttcggcggtggaatcgaagtcccagaacgtcaggttttccatgaacatcgggccgcgttcgataagcgtgccgtcggcatcgaccacgaagctgccaccgtcgaagaccaggtcgtcctgaccgccgacctgattcaggtagatgaccggggcgttgacttcggcggcacgacgctgggcgagctcgaaacgggtgttggtcttgccttcctcatacggcgagccgttgatggtgagcagcaggtcgatgttcttggtggccaggtcggccaccgggccaccatcctgccagatgtcctcgcagatggccacgccgatggtggcaccatccacgtcgagggtcacggaacggtcgccggcggagaagatacggaattcgtcgaacacgccgtagttgggcaggaagtgcttgtcgtagccggcccagaccacgccctgatgcaataccaccagtcggttgcgcggcttggaggtcttacgatcagtgcccacggtgccaaccaccacgaacagattgccgaggccgtcgtcgttgagctgggcggcgagttcgttggccttgtcccatgcggcttggcggaaggtgcggcgcagggccagatcttcgatggggtatccggtgagggtcatttccgggaaaacaaccacttgggcattccctgcggcggctttacgggagtagtcgagcactttggcggcgttggcatcgagcgcgccgacgcaggtgtcgatctgggcgagtgcgaagcgaagctgtgtcatagcttcttagtgtagccgcgtatggcgtcggattgcctgttcttccggcttggcgtcattcattaggtcgtttttgcgttcattaggtcactgcaatgcgatatcagtcgttgcaatggcgcgattccaacaaccagtatcgccgttcaccgacctaatggacgatgaatcgacctaatgaacgaatgccactcccctcagtcagcttcgttgatagctcgtcctgcacttatggacgggcgaggcccgcgcatatctggttcggctgtcgcctcaccttcggctgcagacagcccattgggctgtctgcctaacgcctcagcctccagaggggagccaaaaaaggatttacctcagctcgttgagcacgcgcagggcggcgttgacgtagaagttgacgaaggtgggaatggattcgtcgagacccacgaaatgcgggctatgccagtcggcgcaaccttcctggccgtttgacccgacgaacgcgaacaccggcaacgtcaccttggcgaattcgcagaagtcctcccccgccatcgactgacgtatcggttcgagctgcgcgtagtcgttgacatccgccgccacggccttggcaagacctggattggagaccagcgggtcttggaaatcatcccagaccacatcggcgctgataccgtatgcctcggcggtgtgttccaccacttccttgaatcggcggccgaccagattgccatccgacttgtggaaatagcgcacagtcccttggaatccggcttcggcgggcaccacgttccacacatggccgccgtgcacttcggtaacggacagcaccagcgggtggaagggcgtgacgttgcggctcacgatggtctgcaggctcagaataatactggcgagcgcttcgatgggcccggtgcccttgtacgggtagccggcgtgggtgccttgggcgtggagggtcacgcggaatttcacgcagccggccatcatcggctcgacgccgatggccagctggccggacgcatagttggggttgttgtgcgtgccgataatggcttcgacgtcatccacgagtccggcgtcgatcatggcgcgagcgccttggccggtctcctcactcggctggaacagaatcttgattgagccggcgaacttgtcacggtgctcggcgagccagaaggcggcaccgagcagaccggtcatgtgcaggtcgtggccgcagccgtgcatcacgccttcattgacggagctgaactccagtccggagtcttccacgatgggcaggccgtcgatgtcggcgcgcagcccgatacgcggcccgggaccggcctcgccctgaatgagccccacaacaccagtctccagcgggttgtgcaggatctcgatgccgtgcgccttgagctggtcggtcagatagatgctggtgtcgaattcacggaaactacgctccggatgggcgtgcaggtagtggcggatggtgatgagttcgtggtcgatgtcgatatgttcactcatggttcccgattctagtagcgcgaagaatatattgcggccctcgcttcatattggcgagggccgcgatctatggggtcagtatgccttgttattgctggcgtttgagcagtcgtttggcgatggcgttggcgatgccctgcaccacctggaccagtacgatcatgatgatcacggccgtccaggtgacggtctggtcgaacttctggtatccgtaggcgatggcgaagttaccgagaccgccaccgccgatgtagccggccatggcagacatgtcaagcacgccgatgaacaggaaggcgtaggccaggatcagcggtgccagggcttcggggatgagtacggtgcggatgatggtgagcttgccggcacccatcgaacgcgcggcctcgattactcccgggtcgaccggcacgagattctgttcgaccagacgagaagtggcgaaggtgcacatgaccaccatcgggaagatggcggccacggtgccgatggacgtgccgaccacgacgatggtgagcggctgcatggctgccaggaaaatgatgaacggaatcgggcgcacgatgttgacgatgatgtcaaggatgcggtagacgaccgcgttctcgaacaggttgccggggcgggtgccatagagcaccacgccgaggatcaggccgaggaatccgccgatgacaagggtgacgagcaccatggtcagggtctggccgatggattcgaacaatagtgggcgcagcacgttccagtcgctacgcgagttggcgaggatgatcatgcgttgtctccttcatgtgcggcggcggatacagcgggcgcggtggcagtatcggccgccagtgggtcatgggcgcggtcttcggcgtaggaggcatgtccggcaactgcgtcggcgtaagccacgggctttgcggcggtgccgaagtcaatgacgtcgctattggcggcgagctcgcgcaggaattcgtccacgtgccagccgggcccgttgaattcgtaggtgatggcaccgatggcggtccccttgaccgtgtcgatgccgccgtagagcaggctggattcgacgccgtatttggcgatgagttcggagatgttctgtccggatgccttgagttcgtggccatggctgccggaaacgtccttttggcggatgagcacggtgacgatgcggcccgaccattcgtggtgcaatcgctcgacccggtcttcctcgggcaggccggacagggcggtggcgatgaatcgcttggtcaccggctgctggggcgcggcgaacacgtcgtatacgtcgccggattcgaccacgcgtccggcgctcattacggccacgcggccggcaatctgctggaccacgttcatctgatgggtgataagcacaatggtgatgccgaattcctcgttcacacgcttgagcaaggccagcacttcggtggtggtttccgggtcgagcgcgctggtggcttcgtcggcgagcagaatctccggattagtggccagtgcgcgggcgatgccgacgcgctgcttctggccgccggacagctgcgaggggtatttgtttgcgtgctcactaaggcccacgaattcgagaagttcgttgacgcgacgatcctgatagtccttgcgccagtgatcgagttgcagcgggtaggcgatgttctgcgccacggttttggtggagaacaggttgaactgctggaaaatcatgccgattttctggcggatgggccgcagcttggtctcactcaaagaggtgatatcggtgccgagcacggtcacggtgccggaggtgggtcgttcgagcgcgttgataagccggaccagtgtggatttgcctgcaccggaatagccgatgatgccgaagatgtcgccgcgatcgatggtcaggctgacgtcatccacggctcgtgcgatgttcgcgccgcgtccgcgtgttttgaattccttcacgacatggtcgaaggtgatgatggggtcgctcatagtgctccctgatgctggttgttgatgtccggtcacggaagcggagcgaatcccgattgttggctcgggtactcgctccgcttggtggtaatggctatggacaggttagtcgtgcactcgtatcagccacggctcactgctgggctttggcgtccttctcaatgtcggacaggaagccttgcagctcgctggcgctgaacttgtcggcgaacaccgcggtaccgccggagttctcctgcagggcgtcgagcacatccttctgctggtagatggaaacgagcttcttgtaggtctcgttgttcacgtccgccttgcgggccacccacacgttgatgtaggggcgagcttcttcggattcggcgtcatcctggtagatggcgtccttcgggttgagaccggcgtcggccacgtagtcgttgttgatcacaccagcggcgatggtcgggtccttcagggtggtggccacctgttcggccttgagcggggtgaccttgaccttgctcttggcttcgtcgatgtcggccggagtggagaaggcggtccagtcgcccttgagcgtcacgagaccggcggccttgagcacgccgatagcgcgggcctggttggtttcgtcgttcggaatggtgacggtgtcgccctgcttcaggtccttgatgtccttgaccttggtggagtacacgccgagcgggtagatggcggtgccgccgatgggctgcaggtccttcttgttgctcacgttgtagttggccaagtagagcaggtgctggaattcgttgaggtccagctcgccggagtcaagggccgggttttcggaggtgtagtcctggaagtcgacgatgtcgacgtagatgccggccttctcggcgtcctgcttgaacttgacccattcggggttggtagcgccgaccacgccgatcttgaccgggttgcccttgctgcccttggcggacgactcgttggcaccggcaaacgcgcggtagccgaagaacgcggccacggcgataatcgccacgaccacgatggtgatgatgacgttgcggacggtgtggttcacacgcaccggctcgttattgttaggagcggccggagttgccgactgggttgctgctgtcattggatttcctctctccaaaattgatgtcgggtaacaccataacgcgcttgaaccgcgaaagtgacggaaaatggccgattgccgtataggtgtcttttatggcgcgcatgcaatggccgggattcgtgcgtttgataacccgctataggcgtgtcgaacacgccggaaagcacgtcgagaggggctttgacaatggaagctatgactaccgatactgccaatgccgatatccgagccgtattcttcgatatcgatggcacgctcaccagtttcacgacccatacggtgccggattccacaatcgaggcgattcaccggctgcaggccgcaggcgtcaaggtgctgatttgcacgggccgcgcgccttcacagatgcacgtggtgctggataccatgccggtgacgttcgatggcgtggtggcgttcaatgggcagtattgctttgatgacaccggcttctttgcctcgcaggccttggatactgctgatattgaggtgattctcgactggctggaccgtcaccccgatgtggtgtgcaatttcggcgagaaggattacgtgtacttcaaccagtccaatgatctgcttcgcgccacgtggagcaaactgggcaaaaccgcaccgacccggtattttgaggacccgcgcacccgcgcgctggatcatgagactttccagatcagtccctttgtcggacccgagttggaggccgaactggtgggactgtgcagcaatgtgcgcggggtgcgttggcatccggatttcacggatctgattccggccgatggcggcaagccgcgcggcatccagcggttcatggcgcattacggcatcacgcgcgggcagaccatggccttcggcgatggcggcaatgacacggatatgctcgcctacgccggcatcggggtcgcgatgggcaatgcgaccgccgagccaaaggccgccgccgattacatcaccgacgacgtggaccacgacggtgtgcgcaatgccctactgcatttcggggtgctacgcgattattgatgccgtagcgcctcgaccgggtcgagctttgccgcgcgcctagctggatagtagccgaaaatcacgccgacagcgatgcagatgcccactgccagtccgatggactgcacggaaactgctggcgcgatactcatgccaccggcgatgccggacaccaatccagcggcgcccaacgacagcaagtagccgatcaacgtgccgataagacctccaagcactgtgattgcaatggattcggcgaggaactgcgcggtcacgtcacgccgagtggcacccaatgcccggcgcaggccaatttcgcggatgcgttcggtaacgttggtgagcatcatgttcataatgccgatgccgcccaccagcaacgagaccccggccaccgaacccgccagcacctggaatgcgctcatgaagctggaaagctggtcgatggaggattgggcgcttacgaccgacagattctggtcgatctgttcggttgggatacgcatgatgcgagcgacaacggtcttcgtctgttccgtgagctggtcgatatcaaccccgtccttggccagtccgtagatctgcatgtatcccatgttcgaggacgcaaaccgcagcgccacagtggtggcaggcatatagatattcacgctgtcgccgcccatgccgcccatcaatccagacgactcgaccacacccacaacggttgcttcattgccgtcaagcgtgacggttctgccgatggcgtcaatgtccgcgctgccgaacagcttctgcacgccctgcccgtcgagaatcaccaccattgcaccactcgttgcttcactcgatgtgaaggcccgtccacgaccaatcgtcactccggatacatcgaagaaatgctcgtcgacaccggtgatgctcgccgacaccttgtcggtggtaccgggcgcggcgattgacgaggcggcaccatagttcgtcggcgagaagtactcgtagtcggtcagttcctcgcgcatcgcagtgatctgttcgtcgtcaagggtgccgacgtccgtgtaaatcgaaatcgtgcgcgccgcgttcatacccagttcgccgaccagagagtctcgaatgccaccgatcagtgaggtcatggtaatcaccgcggcaatgccgatgacgatgccgagaatggtcagtgcgcttttgcctttgttcgccctcagtgcggagccggtttccgccagcagatcccgtgttctcatcggtacatcccttcacgcagtacgccgtcacgcatgtgcaggcatcggtcggcgcgttcggccacttcggggctgtgggtgatgagcacgatggttttgccttgctgcttgagctgttcgaacgtgtgcatcaccgcatcgccggttttggagtccaggttgccggtcggctcgtcgccgagaatcagcggcgggtcctgtaccaacgctctggcgatggccacgcgctgcatctgaccaccggagagttcattggttttgcggtcgaacagttccggactcaacgccactgattggagtgctttgatggcacgcccttcccgttcacgcaccgggcagtcggaataggccaggggcagcatcacgttgcgcagcacgctggtgcgcggcagcagattgaaggattggaacacgaagccgatgagccacccgcgcagttcggagcgttcgtcatcactcagattctgcacgtccatgccgcacaggcggtaggtgccggatgatgggcggtcgagcaggcccagcgtgttcatcagcgtggatttgccggaaccggatggtcccatgatggcgaggaactcgccttggcgcacgttcatggtgatgcctttgagcacatgggtgtaggtgtcgcctgtctcgaagatgcggttgatgttttcaacctcgatgacgttggctgtggcggtgggcacggcaatggtctcattacgccgtttgccgcgatttgcccggctcgcgtcggaacgaaacgggaacatatcagcgtgccctttcgtccgaagccgcggtttgcgaggtggaagaagcagcatcgccagtattgtcggcagccgaagcgccatcaagcatgatgacatcgcccttgctcacattgccttccacaacggctttggtgttgttcttggctttgaccgtgactcgcacccgcttgaactcatgggtttcggcgttggtctcgagcatgaccgcgctgctctccttaccctcatccacgatggcggcgagcggcaccatcaaagcgttgtcaatgctctgcatggtgattttcacactggccgtcatgcccggcttcagtttcggatcaggggcgggaatgatgagacgcacggcgtatcccacgccgccgttgccactctgcccgcctgccgaggaatcagccaactgcgacgtggtgctggcgatggtatccaccttggcatcgagcgtcagtcccggcaccgcggagaacgtgactttggcgctctggtccttggccactttagtgatatccagctcattgatgttgacattgaccttcatctgactcaggtcggcgatctgacacaatggtttaccgtctgcgccggcggaagtggatgagccatcggaggaagctccgatggcggcaccgggcaccgcgctcatggtcagcaccgtgcccgagaccggagcagtgaccgtacgcttgttggcttgggcgaccgcctcgtcataggtggcttgtgcttgctgaacggcgacctgcgcgctctccacgccgctttgtgcagcgggcagctgtccggccgcatcatcggcagcggcttggccttcctcaccatcctgattacgtgcctgacctatggtcgcattgatttggttcacctgctgctgggcggcattaaggtttgagttcgctgctcgcagagccagatcggcctgattcacgtcgctatcgagcttgtcgttgttgatggtaaacagtacgtcgccggcgttgacggttgcgccttcctgcaccttgacttcgccgatggtgccgtcgatctgcggggcgacgacggtggagttgatgggttctatggaaccggtggagctgacttggtcgacgaaatggccacgttccaccgttgccgtggataccggagacacgcccccatctgacggggtaataatcgcgtgcaccaccataaagccgataatcagtaccgccacgacggcgacggcgatgatgcgatgcaccacgcgctttttcttgcgcgtctcacgttcgcgcattaatcggttgaattcggcgacttccgcgttctccgcctcgccttgggcaagggcgtcgacacttgattccacggtgtcggtagcgtccaacggttgtatgattgcggtctgctgctgatccttctgcatgtgctctcccccatggctggctccgagcctcgtgcccggatactggttccaagcctatggaggaatggcgtggtttccatcatgcgcaggattgaattgatggggagttgtcatccttaaggattagttggggtggggaatttatgggctgttttcagtcttggctctcgccttcgcttccgcttttctctcccccagtcatgcttcgcatgacagcctcctcgtcagagggggcttatgaataagcaaagggctcgggacgaatcccgagccctttggcgttagcgaactaacaacaccgtggaggtgttatcactcgttgtcgccagcggtagcggcggtagcggtgacggcacccttcttgtcggtgttcacgccggagtacacccagtcggtgtagtccgggtggtcgtagcccttgtcgacggcgaactggaaggcctcatcacggaacttctcgagctcgtcgatcttgtcggcgtacttgtcggcgtcgatcatgcgcagggcctcagcggtcagctcgtagcggtcgatgcggttgacacgaaccatgtcgtacggggtggtggtggagccctcctcctcgtagccgtggacgttgaagttgtcgtggttcggacgatcgtagatcagaccgcgcacgtcgtgagcgtaggagtggta

SEQ ID NO: 157 - DNA, 24201 bp, Unknown
  R206_24m  MAG No. k141_52736
aacttcgaaggccgcatcagcccggacgtcaagatgaactacctggcctccccgccgctggtcatcgcctacgcgctcgccggcacgatggacttcgacttcgagacccagccgctcggcaccgacgcggacggcaacgacgtgtacttgaaggacatctggcccaccaactccgaggtggccgccgtggtcgacggcagcgtgagccgcgagatgttcctcaaggactacgcctccgtgttcgacggcgaccaccgctggaagggcctcgacgtgccggaaggcgagctgttcgcgtggaacgacaagtccacctatgtgcgcaagcagaccttcttcgacggcatgaaggccacgccggacccggtcgccgatatccacggcgcccgtgtgctggccctcctgggcgactcggtcaccaccgaccacatctccccggcaggcgcgttcaaggcctccagcccggccggcaagtacctgaccggtcgcggcgtggagccgaagaacttcaactcttacggttctcgccgaggcaaccacgagatcatggtgcgcggcacgttcggcaacatccgtctgcgcaaccagctgctcgcctccgtgggcgaggaggtgacgcctggcggcttcacctacgacttcctcgccaagaagccgaccacgatcttcgaagcctcccgcgactacatcgacaacaaggtgccgcttgtggtgctcgccggcaaggaatacggcaccggctcctcgcgcgactgggccgccaaaggcacggtgatgctcggcgtcaaggccgtgatcaccgaaagcttcgagcgcatccaccgctccaacctgatcggcatgggcgtgctgccgctgcagttcccggcaggcgaatcctatgagtccctgggcctcaacggcaccgagacctacgatatcgccggcgtcgagaagctcaacgagggcgtgacccccaagacggtccacgtcaccgccacccacgaggacggctccaagaccgagttcgacgcggtggtccgcatcgacacgcccggtgaggccgactactaccgtaacggcggcatcctccagtacgtgctgcgcaacctcatgaagtaaccaccttcttggctcccctctcttgaggggagctgtcagcgaagctgactgaggggagcaaggccgttatccgccaacgggtaccggccttttccacgcatgccaaaatgctatactgtatagcatcttcgaaatggaggttgccatgaccatggtccaaatgaacgttcgcattgatgcgaaactgaagaacgaggtcgaagaagtcctcaagggcaaaggcgtatcggtgagtgacgtaatccggtcgctgtggttatacatcgccgaccgcaaggaagtgccggcattggaaacgaccgccgaagagcaagcccgcgaggaggaaaagcagcgcaagctgaaactgattcgagaaggtgccggatacgtgcacaaggaactggtcaaggccggactgatctcagaagacaccgacctcatggaaggccttacctacaagcagttccgcgacaaaatgtacgacgagcaacttgatacgtattacaacatgaagagggccgattgatggccgacgtttccatgcagcgtattttgcttgataccaatgtactgttggactatttgctccatcgcgatgatcacgccaagatggcggaagcggttatggaacttggcgcgaagaacaacgttacgttgttgtgcacgtcattgtcgctgaaggatatcgcatacctatcatcatcggcaattcgtagggaattcaaaccgaatgaatcggaagtggagaatttcactcgcagctttctgtcgtcacgggtgccatggcgttgtatcgagcaggtgaaggagatgtgtgacattgtcgctgtcgatgagtcgacatgtgataaggctttttccctgcaaaaacggcatcgggattttgaagatgatctgatcatcgttgccgcgcaacaatccggtgcccactgtgtggtcacatcggatgccgaattaatcagtcattttcccgaatattgcaaaacaccggctgaaatcgtggcggcgctggaataaatgagcgtgtggctcccctcacggaggggatccaccaatgatgtgccggctactgtagcctactgcgcctgtagacggaactgcttccagatgtcgctgagcttctgaccgttgcgggtgcgcttccacacgtccagaccaccaccgcgacgtcctccggcggcggcacgggccgcggcggtcggagtcggatattcggagccgtcatccagacggagacgaccgttttcggtgaccgtggcgaaccagcgctcgcccttgcgcggccgctcccacaccaggcgctcgcccggcaccagcagacccgcgtcaatcacctgccggatcgtgacgcgccgcgaactatgagacggccgtggagaggtcttcgacaactcatcgacattctgcttggtcagatcacgggcgtccttgtcataccggatgccccagtattccacgatgagtcggaccgactcttcctgccgcgcctccagcagggcaggtgtgcagtcagcgaaatccttcaactgattggtcagcgggaaacgacgtgaatccgcgcgcaacagcatgcggtcgcgacgtgccggatattcactcaacctgtccaactgatcctcagggccctgcaccagcgccatattgccgagtcggtacatccagaaatcatgctgatcctgcggccagtccgcaaacgatttcgaccgttcgatatccaacggcataatcggcagcgcactgaaccggcgtggtcgatccaactgcatgccggccttctgctcgttggcgcgaatcagcagcagacggaccaaatcgccgtcaccctgcatctcgccatgcaaacggaccaatgcgccttcacggtcgccgtccgagacatgcaacccgttcacgcgctggaccaaatagcccttgtcaagatcacggatggcggcgttcgcataaccgcgccgctccaacgctccagcgcgattcagcgtgcggatgccggtcacctgttccaatgcggtcagaatttccagcagccgacgctcgtcatgggcgcccaacgattccaacgtggccgtggttctggcgatacgcgaggcacgaaccacgaacggcgacaaatcggcgtcgcccagcccgcgatacgaattgaccaacgcccacatggctacgggcttccactcgtggctgcggtaatcgtccaatccctcaagccggttacgcacctcggcgggcagtacggtatcgctggggcgcgcgatgatccgccacgccatcgcgtagggtgccagcacctggttgatgaacgtaggcaccgtgcctttgtcgatgtacggttgcagcacgtcggccaggaaatcctcgatgagcttgtcggtggccggcttgtgcgtgagcacgagatgcagataggcgaagaattcctcacagtcatgcggatcgtcgccaagcgggtcaatgatgtcatcccagcgggcggcgtacacgtcaagttcggcggtcgacaggctggccgtggcgcgcgccttgaacacgtcggacggggtgagcggcaggccgcgcatgttcatcacgtcgaagatgcgatgcgcgccgtcgagatcgtcggtggtcacgatgacgagagtcacctcgttgaccagatactgcgcgaattgctggcgttcggatgccgaccaattggagatctcgtcgtacgtcttacggatgttggcgacgatattgcgttgcgctgcggtcgccagatcgtcgtcgttcatgtcgaacacggattcgaggttgtcctcctgcacgtgttcgcggaagaacgccgcgtcgcgctcgcgcaacgtgaggcgaggctcggtgacgatgccgcgcagcttgtcgccgggctccaccagcagcgcgtcgagttggtgcatgagatccgggtcgcgctccagatcgcgcagcacggcgatgatgatcgacagggataccagccgctgctgcccgtcgatcacgtcataacggttgtcgctctcgcgcaccagaatcagcgagccgaggaagtacggggtaccgggtgacttgcaggcgtcgtccaagtcgcttaccagttgcaggatgttctcggccttccatatgtaggcccgctggaatgaggggattgtgaaccggaaatccggggtgaacactttcccgagtggtagttccttcgcgctgattgccatgtcaatcccttcgtcgccggcctttggacggtatgccgacgtgccgactgtgctcaagcctaccagtgttcgcccgacggcgggcacatcacgccggctcgggcaccgacccctcatacaaatagaacgaagacgggtttcctcccggcacggatgcgggcagtgactgctcgcacacctgcgtcaggccgcgatgtacatagaatccgacatcgcacgtggtatccgtgaataggaagtactgacgtatgccggctgcgcggaatgcgctcatcatcgtctcgaacatgcgccggcccagaccgtgaccgcgcgccgccggatcaagtacgaacagcaccacttcagccgaatactcatggccaatgttcgccgcctgcttacgcagttgcctatcgacatgaagagtcccgagaatctcgctcgcagctgccatgccgtcgtgggcaaacgccagttgcaatagcttgcgcaacgaatgacgccggtgcatgttcagcgggctgcgatggtcgagctcgtcgatacgccccacaatcaatgcgacgggtttatcttccagctccgcgacaaaggccgtggtcacacgtgccagacagttctcccaatcggcctcggctgccagcaagccggtccgctcatcatattcggcgtaccaagtgcggcgcaccaggtcgatcagcgccggataatcgtctttacgtaacgttcgaataatcgcttcactcatgttctccattatgactgatatggctcgataaccggacgtgttacagtcgcgccggcaaatcggcccgctccaccagcctcgccatctgtacgcggcccatattgagcttgtccgccgcggaggagagatgcgccttggccgtacgctccgagataaacatacgggaggcgatttcggcgttgggctatgtgctgcaagacgattcgccgattacggtgcatgccacgcgcatggtggaaacgcccgttacgctttgcgatgagcagaacgagccgatcgatcctattcatggaatgttcagctttgttcctctaagattggtattggaacaaacgctaaaggagcgattatgacattcggtcagcagccccagaacaacgggcaatacaacccgcaatacaacacgcctgattacaacgccgcccaacagtctggatatggccagcaatacgcacagtccggttacggccagaactactatgcccagccgcagggcgcccccacctaccagtacgcggcgcaggatgcggccggtgccggcgcgggtgccgccaccatcaacacgacgatgacctacaactacgaggaggcccgccgcgtctccgtagccaaggtgtacggcgagatgaccatcggcatcctcgtcaccgccgtggtcgccgtactcggccagatcaccggagcctactacagcttcctcatggccaccggcatggtgggcctcatcggcctgtgcgtggtgcagattgccctggccgtggtgctcggcatgcgcgtcaccaagatgaagtcggccactgcgcgcgtcatgttctatgtgtacgccgcattgatgggcttcaccttgagctcgatcttcatggtctacgacctcggctcgatcggcgtggcactcggtgtcaccgcagcgttcttcttcgcgctgaccatgttcggcatgactaccaagttcgacatgctcaaggccggcccgatcctgatgatcggcctgatcgtgctcatcgtctcgcagatcgtgctcgccttcgtgcaggtcgacggcatgaccaagatcgtctgcgccatcggcctgatcctgttcgccggcatggccatctacgacgcgcagtccacgcgcgcgctgctgaccgaatacgaggcccagggcccggaaatggtcaagaagatctccatcctgtgtgccctgaacctgtacctcgacttcgtgaacatgttcctgtacatcctgcagctgctcggcaacagggactagcctcgccagccgattggtgggcggcatgtagcctgctcgtcaaacgtcacagcccgaccacattgtggccgggctttttcatgtctgtcacattcgcacgttaggctgtctccccgtgaaaagacaagaactcgtaggcatactgagcctgttgttgaccgcgctgatctggggttttgcgttcgtggcgcaggtccagggcatggatttgatgtcgccgatgttcttcaacgccacgcgcttcacgctgggagcactgtctttggtgccgattctgctgtggcagcgtggccgggggagcgcggataagggcgatacagcctgggtcgatgttgttgggaccgaggcatccagggccgtctccacagatgccgcatcgaacggtgcatccgacgtcgttaccatcaccggtgccgagctgaatgcgaacaagcccgattcggccgtggcgcgattgctcgccaacccggtggtcatttccgtgatctgcggcatcgtgctgttcaccgccagcaccctgcagcagtatggcattctgtacggcaaatcggccggccgtgcgggattcctgaccgccatgtacatcgtgatggtgccgttgctggccttcgtgttcctgcgccggcgcatcggcatgctggtgttcgtggccgtggcgctgtccatcgccggcttctatctgctgtgcatcaccgatggtttcggttcgatcggcctggcggatatcctgctcgtgttcacggccgtgctgttcgccgtgcatattctggtgatcgatactttgggcggcaccgtggacgccatcaagctttcattcggccagttctgcaccaccgccgtgctgagctgggcgggttcgctgattgaaggctcggtcgactgggccggcgctgcccattcctggattccgattctgtacgccggcatcggctcggtgggcatcgcgtacaccttgcaggtggtcggccagcaatgggtgccaccgacgcgagccagcctgctgatgagcctcgaatcgttcttctcggcggtaggcggtgcgttgcttctcggtgaagtgatgaccccgcgcggctacctcggctgcgccctcatcttcctcggcaccctgctggcccaagcgccggccaggctgccgaagtggctgcaacggtgaatgaatcggccgcaggccgattccatagcacctcagtccgaggtcttaggcgcttcacccacttgcggcgcgccgttgatgtcgcggtggatgttctgcatttgcacttcgacgttctgcagcgaacgggcgcagtcgagcagtgtctgtgaatgctcgctgagcttgttgtccggcaaatcggtcttgtagcgcagcgcatgctccagcgacgcccaataatccatggcgatggtacggaattgcacctccaccggcgtgtaatgcgcgcccgaggagagaaacacgggcaccgcgtagattacgtgcaatgaacgatacccattctgtttcgggttcttgatgtagtccttgacgcgcagcacctgaatatcggactgcgacgacagatagttggatacggaatacacgtcgtcgcggtaattacagatcacgcggatgccggccacatcgaacagattgtccttaatcgaattgacactgattggcagattcttgcgctccagcttgccaatgatcgaactcaccgacttcaaacggcgttccatatgatgtatagggtcatggctgaaccgcacctggaactcgtcgtcgagaatctccagcttggtgctgatctcgtacatcgcgccttcatacacctgcatgaggtcaacgaatttaacgacctgttcgggagtaaaggtgcctcccggaagatccaacgctttgagacgggcttgcagatcggaggttttgagtcggctatgtcggtcaagtatcacgtccaccaatatactcggtggattccagccaatctggatgttagcggggaatctttccaagaacccataatttgacatcgtgacaaccaatggcatacgtgaccggagcatgacgaaccccgccgatagaatcggtcgttatgaatgaagacatgatgaccgaggcggagcgtgcctcgattgcagccgatggaaccgatagcttgctgggggagcgtggcaagggcgtattccatatccacacgctcggctgccagatgaacgtgcacgattccgagcgcatcgccggcgtgctggaggccaatggctacgtgcctgcaaccgagggccagatcaatgacaatgacctcgatttgctggtgctcaatacctgtgcggtacgcgagaacgcagccgaacgcatgtatggcaccatcggccgattcaatcgcgtcaaactggttcggccgaacctgcagatcgccgttggcggctgcatggcacagcttgaccgcaagaagatcgcggatactgcgcaatgggtttccgcggtgttcggtaccaagaacatcgaagatctgcccaagctgttggatcagaatcgtgcgaccggcaaggcgcaggtccaggtcactgaacaattgcggcagttcccgagccagcttcccgccgcccgcgcctcccgcatcagctcgtgggtggcgatttccgtgggctgcaataacacctgcacgttctgcatcgtgcccaccacgcgaggcaaggaaaaggaccgccgccccggtgacattcttgatgagatccgccaatgcgtggccggcggtgccaaggaggttacgcttctcggccagaacgtgaactcgtttggttatggtattggcgatcgatacgctttcagcaagctgttgcgcgcctgcggaaccatcgacggtctcgaacgcgtgcgcttcacttcgccgcacccggccgccttcaccgatgatgtgattgcagccatggccgaaacgccgaatatcatgcatcaactgcacttcccgctgcagtccggttccgaccgcatcctgcgcgcgatgcgccgctcctacaggtccgccaagttcctcgatatcctcggtcgtatccgcgaggccatgcccgacgcacagatttccaccgatatcatcgtcggattccccggcgaaaccgaggaggacttccagcagaccatggacgtggtgcgccaggcgcgcttctcctcggcgttcacgttcatctactcgccacgccccggcacgccggccgccgcaatggaacagattccgcgcgacgtggtgcaggaccggttcgaccgactggtggcgttgcaggagcagatcaccgaagagaacctcgccacattcgagggccgcgacgtcgaagtgatgatcaccggcaaactcggcaagaaggacaccgacacccaccgtgtcaccggccgcgagaaaactggcgtgctggtgcacatcggcgtgcctgaaggcgaaccggtacctgaaatcggcgatttcgtcacggtcaccgtcacacacgctggccgccataatctgcttgccgaccccgatgtggccgctggacagacctattccgtgcggcactgagggggcgtatatgacgcaacgagtcgtctccatcgtcggtcccaccgcgtcaggcaagacggggttgggcatcgccatcgcccggcgtctggccgaagcgggggagcgggccgaaatcgtgaacgcggacgcctaccagatgtaccgtggcatggatatcggcaccgccaaacccaccgccgaagaacaggcggtcgtgtcgcaccatctcatcgacatcatcgaccccgaagacacgatgagcgtggcccgattccagcagcttgcgcgcgagaccatcgccgacctgcaatcacgtggcatccggccgattctcgtcggcggctccggcttgtacgccagagcggccatcgatgacatcaccttccccggcaccgatcccgacgtgcgcacacgtcttgaggaacgcgagaaaaccgagggtgccggtgctttgttcgacgagctgcgggccaaagaccccgaggccgccgcgcgcatggacccacgcaacccacgccgcaccatccgtgcgctggaagtcatcgagcttaccggcaaaccgtattcggccagcctgccgcgctaccggtacgtgattccgtccgtacagatcggactcgacctggaccgcccggatttggaccatcgcatcgacctgcgcaccaagcagatgtatgacgatggattcatcgaagaagtcgaacggctgcgcccgcatctgggtgccaccgccgtacgcgcgctcggctatcagcagatcatcgacctgctggacggtatctgggatgtgaacgacgccttcgcggacatcgcacagaaaaccaagcgactcgcccgcaaacagatgggatggttcggccgtgacccgcgcatccactggctgcaggccctgaacccgaaactggtcgacaacgcgatggccattatcgcgcacgccgacgccggcgactacgacccgatcgacgcccgagccgacgaatacacccagcatcatctgggcgatatcacggcgtaggaatcagccaaaggccggtgcaatcacccgcaatcagtgtgcaggcccctgattccagccggcgatcaagaacacgcgcgtcggattcgccgggcgtagtatcgcgtcgaacatcgtctccagtgcagacgtgtcgccccgatatgccgagtgcttggcggcgtgatactcttcgcgcgtcactgagccccagtcgagatcccagccggcgtcatgcgccaagcgtgaaccgaatatacgcagcaccatcgcattgccgccacggaacggatgcagataaccgagctcatcataaatagaagcaaacgcgtgaacgaacacgtcgcgatccaacgcatgcaggttgcgcttgtccgccaactccatcgcgatgttgtgcgcgccggtctcaatgagcccagccgggaagaacgcctcaggattcgcggcccgagcccggtcgttcgtcacctcgcgtgtggtgtttgaggtacgcaacttgcccgcatcctcaaacacgccttcgaacagccccttatgaatggcggtcaactcatccaagtcgccagacggattccatcgacgttccgccaacaacacggtacgtgcgaacaccgcatccgcccgatccgtggcatgatcatccagactgccgacagccagacgatcctttccggcagggtcggcggcggcgcgcagacgcatggcggtctgttcgtccgccacgtcgatgagatgggtcacgggctccaagccacgttcgtaggcaaccgcggcgcgcatcgttgcctcgcccggcgtcatcgcttccagtgcgcagttcttgagtgcaaatgcgactgcgctcgcacgctctgcgggtgtcatgcaacccatgataaggcatattcgcgctccagcggggaatcgactcggacgaatcgcggcgaatcggctgtcgggattcgtcaatcgaccatatcgtcacggtgtcgtcaccaaccatgcacccccgtactagtagaatcagacccgatatggcacgaacagcatcctccaacagcaccaaaccccgtaaatccaaagacaacgggtctacccatgatggcgaaaccaaggtccagcccgagcttgacctcgaacctgagccgttgtggaagaagatcctgctcgcgattccgcgcgcgttcggctccggcgtacgcgccgtcaccggcgtcggcgaatacgacccagcctaccgtcgtgacggtttgtgcttcctgctgctcgtgctcgccgtactgttctgcgcgtccgaatggttccgtgtcagcggtccattcggccagctgcttcacgccatcgcggccggtgtgcttggtctgatgagcgtcgtgctgccggtgttgctcgccgccgtggccttccgactcatgcgcaattccggtaaagggtccaataacccgcgtgtggtcaccggttgggtgctgctcatgtggtcgatttgttcgatcatcgacgtggcgatcgccgccgaccacaccggattcgacatcacgattctgcaatccgccggcggcctgttcggcttcttcctcggctcaccgctcgcctggggcctttccaacgtgttcgccatcatcattttcgtggtcgtcggcctgttctccttgctgatgattaccggcacccacgtcaccgatttgccggaggatgcgcgcaaaatcgcagctaaaatccaacgcaaaccgtatgtgccgatgggccaggaggccgacggaagcgccagccagttccccaacgaggtccgtgtgggagataccacactcgcctttgccgacggtgttccctcgcatgacggcaacgacgacggcaacgacaacgatcaggccggcgatgcacggcccagcctgttcgcacgactgttcggccgcaaatccaagaccgaagacgacaaaacccttgacaagtatgctgccgacgatccgttcgaccgtgccgccagccagcatggtgccaccgccgaaaccccggtggtcgatccgatgaccggcgagattaccggtgcgcgaaccattgcatcgtcttcgtacgacggtcgtccgcacctatccagccctgcgcctgctgccgatgcggatgatggcgacgcttcccgaacccgcgtcatcaccagtggccagaccatcgccacgcccggtgggggagcggtagacgatccgtgggcacccagtgccgcccaggccggtactgtcgcgctcgcaggggcagccggggcgatgggagcggccgcggcagccgcgaccggagcctacgcaggcgccgatgcggatggcagcggagtcggccagggcgtgcccaatacggacggacagccgaatgccgatgccagcagcgacatcgacgacgatgccaataggccgtatcagttgcccgacctgaacctgctgaccaaaggtcagccccatgcgatgcgcaccccggccaacgatcgcgtgattcgggcattgacttccaccttcgaacagttcaacgtggacgccagagtcgtcggcttcctgcgtggtccttcggtcacccaatatgaggtcgagcttggccccggcgtcaaggtggagaaagtcaccaacctgcagcgcaacatcgcctacgcggtggccagttcggatgtgcgcatcctttcaccgattcccggcaagtccgccatcggcatcgaaatcccgaacgaggatcgcgaaatcgtgcacttgggcgacgtattgcgctccgacaaggccgtgggcgacccgaacccgatgctctccggcatcggcaaggacgtcgaaggccacttcgtgaccgccgacctgaccaagatgccgcacctgctggtggcaggtgccaccggttccggtaagtcgagttttatcaactcgatgctcacttcgatcatcatgcgtgccacgcccgaacaggtgcgtctgatcatggtggatcccaagcgcgtggaactgtccgcctacgcaggcatcccgcacctgctgaccccgatcatcaccgatccgaagaaagccgcacaggccctcgaatgggtggtcaaagagatggatgcacgctactccgacctcgaattcttcggattccgccacgtcaaggacttcaacgaggccgtgcgcgccggcaaggtacatgcgcccgccggctcccagcgcaaggtggctccatatccgtacatcctcgtggtggtcgacgagatggccgaccttatgatggtggccaagaacgatgtggaaagctccatccagcgcatcacccagctggcacgagccgccggtgtgcatctggtgctcgccacccagcgtccgtccgtggacgtggtcaccggtctgatcaaagccaacattccatcccgactggcgttcgccacctcgtccgccaccgattcgcgagtcattctcgacacggtcggtgctgagaccctgattggccagggcgatgcgttgttcctgccgatgggttccgccaagccgattcgtgtgcagggctcgtgggtgtccgaatccgagattcgcaaggccgtggagttcgtgcgcacccagcgcaagccgaagtaccgcgaagacatcgaacagatggccaaggaagccgaaaagaaagacagcatggagccggacgagcagatcggcgacgacatggacgtgctgctgcaggccgccgaactcgtggtcaccagccaattcggctccacctcgatgctgcagcgcaagctcagggtcggcttcgccaaggccggccgactcatggacctgctcgaatcgcgtggcgtggtcgggccgtccgaaggctcgaaggcccgcgaagtgctcgtccagccgcaggacctgccgcaggtgctcgccttcatccgaggcgaaaccagctcgcttgaagccgccgtcccgcaacaacccgaactcggcgaataattcacccatcgacctccctctgatgagggaggtgcccgaaggggcggagggagagaagcgcggacagcatcagcacgaaacctgattcccgaataatagcagtcaatatccagccaccactcactcaaggtaggagtatgggggtaacgtgaacactatggatgagaacacaatggacaagcagtcatcgcccaaatcatcgctgttcgacggatggaacgcgccgccgaacctggtcacctactcgcgcatcgtactcgtggtgattttcctgacactcgacattctcgccggttcctggggtgagaacaacctgatcatgcgttgggtcgccgcggtactgttcatcatcgccgcgtccaccgataaaatcgacggttggatggcccgcaaatacaatcaggtcaccgaaatgggcaagctcatggatccgatcgcggacaagctgctcacttgcggcgcaatgattgtatgctccgcgttcggcgagctcggctggtgggtgaccatcctgttcctgattcgcgaaatcggcatcaccgttatgcgcttcttcgtcatggagcgtccgggcggcaaggtcatcgccgccgcatggcccggcaagctcaagaccgtattccagtgcgtgggtctgtccatgctgctgctgccgttctggtcattgggtaacggacaggccacgccgttctggatgaccgcttactacttcctgacctacgccatcatctacgtggcattggtcctgtgcctctactcgggtgccgtgtacctgtacaacacgttcgtcgccccgaagcggaagtgacggatattccaatgcaggaattgtgcgacagtctcgcggccggcatcctcaagatctgcgaggcgaacaatacgaaaatctcctgcgctgaatccctgaccggtggcctgctcgccgatgcgttcgtgcgtattcccggtgcctccaacgtgttgctgggctccgctgtcacctacgacatcaatgccaaggcttcgatcctacacgtggacaaggccctattggatcgagaaggcgccgtacaccccgaagtcgcccggcagatggccatcggtgccgctcgcctatacagccagccggaatacggcgaccgaatcatcggcctttccaccaccggcgtggccggccccggtccggacggtgataagccggccggactggtgtatgtgggcctgcgcatccccgcaagcctcaccgcggaccatgccgaagtgctcaaagccgtcgaactccatcttgatggcatgcgcgaagaggttcgtcgcctcaccgtattccacgttctgcaaaacttgagtctattcacagcaagttttaaggaataaaaccgcgggaccgtcgtgttgtacatagtggaaacactgaaccgaccttggaaggggcgatggcgatggaaacgatgacccgagtgaacgaacagatggatgtggccgccaagaagccgatggctgtgcagccgggtgtcgcccgtatgcgtgaactgactccggcccagcgccgtgcggtgatgttcgcccagcagcaggtgctcaaggcgcaggctgccaagaaggccaaggatcagcgtcaagccgttcgtgaacgtatgtgggatgaggattcgccgtcgtacaagccgactgccgccgccgagcccgtggtggttgaggaggagcctcgcgaggtttcgttgcgtggtgctatcggctacgtgctgcgcgaactgcgtacgcgcgatcgccgcacgttgcgtgaggtctccgagaaggcgggcgtttcgctgggctatctttccgaagtcgaacgtgggcagaaggaagccagctccgaactgctgagctccatcgccgatgcgctcggagtctccacttcgcgcatgctgcgcatggtggccgattatctcgactcggtcgagggctgatcggttggcggtgtgaagccgcatcccgtaatctatgtctagctgtgaacccgtatcgcttgtggcgatgcgggtttttgctgtcctgcgggtggtggcacactggcgtgtatgcgtgaacgggaattctgggaattacttgaagaggtgttcggtcggacctacggtcgttcgctgtcgcgtgatcaacggatgtccaaattggcgaatatgaccgtggtcgaggcgctggacgcgggggaggagccacgcgtggtctggaatgtgctctgtgaccaaatggaggttccggactccaagcgttggggccacgatcataacgcgccgcccatgcccgccgtctgacactgcgggattacggagtcgctgaatcgtgaaattggcgatttcggcgtgttgcacgccaaattcgaacaaatgttcgtgtgtgtggttatagttattcacagtgacaagaagccgcatacgtgtgcacagggtgcttgtcatccgccataagccttaccgcagtaggtcttagggaggtcagatggccgagctcgggcaagctggaaccacaatggttggtttggattgcctcacatggcatgtccgtcatacggtggaggcatccgattcgcgcacgacttcgacaaggagaagatcatggcacttgagaccaagccggccaaggacccggcagccgaggacaagcacgagctcgatcccaagcgcaaggcggcgctggacaccgcgctggcgcaggttgagaagagctttggcaaaggttccgcaatgcgactgggcgaccagcccgagcagaacgtcgaggtgattcccaccggttcgttggccctcgatatggcgctcggcatcggcggcctgcccaagggccgcatcgtggagatctacggccccgaatcatccggtaagaccacgctcgcattgcatgtggtggccaatgcccagaagaagggcggcgtggcggcctacatcgatgccgaacacgcactcgacccggcctacgcccgcaagctcggcgtggacaccgactcactcatcgtctcccagccggataacggcgagcaggccctcgaaatcgccgacatgctgattcgctccggtgcacttgacgtcatcgtcatcgactcggtcgccgccctagtgccgaaggccgaaatcgaaggcgaaatgggagacagccatgttggtttgcaggcccgactcatgagtcaggcgctgcgcaagatgaccggcgcgttggctcaggccggcaccaccgccatcttcatcaaccagctgcgtgaaaagatcggcgtgttcttcggcaatcccgaaaccaccaccggcggcaaggccctgaagttctatgcctccgtgcgtctcgacattcgtcgtattcaaaccctgaagaatggcgacgaagcggtgggcaaccgcacgcgcgtcaaggtggtcaagaacaagatggccccgcctttcaagtccgccgaattcgacatgctctacggtgaaggcatttcccgtgagggctcggtaatcgacatggctcagcaggttggcgtggtcaagaagtccggttcgtggttcacctatgagggtgatcagctcggtcagggacgcgagaaggttcgtcagttccttaaggacaacccggccatcaccgaggagattgagaataaggtcaaggccgagttcggtctgatcggttccgccgaccagttcgcggaagatggcgaagccgcagcagcggccgctgtcagcgaggccgccgctgccgacgtggccaaggacagcaaggccgcagcggcgcctgctgccaaaacgacccgtgccaaggccggcgcagctaaggcctgaacatgattagtgccgaagcattcttgcggcgcaatcctgttgcgtcgcaagacatgcccattgccgagcagcgtgttcagtcgaaaccgctgggacgtttttctcgacgggggagagacgctgccgttgtcgaagatcccaatgatttggacgcttgccgcgaggctgcattgcgtttgctggacgcggccccacgtgcatccggcgcgttgcgcgaacgattgctcagcaaaggctatggcgaggcgattgtggacgaggtcatcgaacggctgattcgcgtgcaactgattgacgaccgcgcttatgccgaatcggccgtacgctattgtgccggtcgcatgatgggtcgtcgtggtgcggtcctggaacttgctcgcaaaggcgtggaccgcaaactggctgaacaggtgtgtggcgaagctgagcaaaatggcatctttgaagatgccgcatgggaattgggccgccaaatagcccgcaaaacccatggcctcgatcgtcaggtccgtcagcgtcggttttggtccgcaggcggccgcaaaggacacagccccgaaaccctccgccgagtcgccgccgaattgttggtgtagccaagaaaaaatgagacctcttataccccgggttctgtcgtgccgtgcgcgaacgcacggcacggatggccatccatctcgacctgacgttgccgccaggctctagcagcctacccgatgacacgggcgagcagcccttaccgccatctgcttggccttgctcccgatgaggcttgccatgcgacctactgttaccagaggcccggtggtctcttacaccgccgtttcacccttacccgtcgaggacgggcggtctgttctctgttgcgctatctctcaggtcaccctgggcggacgttatccgccatcgtgctctatggagcccggaagttcctcagccgatcccaatgaagatcacggccgcggccatcaagaggtctcaagcctgcaattatacataaggtgcggaaaaggcggcatcccgccctgcggtgaggccatgacgttgcccagttatcctgttttctccatagttgggcatagttgggcgattcgtgaacgacgcgccgaatatcggatggggcgtgtcgggcgtgttgtggcgtgtcgtatggagacgaatcaaatctgtaagagcttggtatgtgcgagaaagagcaagaaaacgctgcctatccattgcagtatttaccatgacgaacaaacgagccagcctgataaaccggtatcaaatcttcttataggagactgctgccaaaaccccagtatatacatcgtttcattgcagagaaaagcccgggaataaacatatattctctgggcgagtttccggccgttcacccattgttcgtctacaatgaaacatacccggtcggtgatgatgccgttcggaacacatatagcgggttacaccgcttgagttagaggaggtcaacatggaaatcgtcgttaccggacgccacacgcaggtcaagcaaaggttccgtgatgtggtcgagaccaagatgaatcgtgtgaccgctatcgccccggatgctcagcgcgcgcagatcgtgctgacccatgagggcaacccgcgtcaggccgataccgccaagcgcgtggaaatcaccgttatcgccggacgtaccgtggtgcgtgcggaggcttccagcaccgatgaattcagtgcgctggacatggcgctggataagttgacgctgcgtctgcgtcgtactcgtgaccgtcgcaaggatcaccgtcgtggttacgcaaacccggtcccggtggatctgggtgttatcgccccggagcccgagccggaggtgtcggaggaagagccgaacaacagcccgcaggctgcggtcgcctccgatcttggccctggcgaatccgtggaggtccaggttggggatacgccgattgtcatccgtcgcaagctgcacatcgccgagcctatgagcatcgacgaggcgctgtacgagatggaactgatcggacacgatttcttcctgttcgtgaacaaggagaccggacgcccgtccgtcgtctatcaccgtcacggttggagctacggcgtgttcgaaatcgacactctggagaatgtcaagaaagcctgagggtaagggctgctgacatgatcagctgataccgcatggaccgcttccaatatggaagcggtccattttttcataaaaaggtcgaaaaattcgattgctgacggtgcgaggcgctattctggtacgcggacaccaccacttatcagtcaagggagaacccagtggtcgatattgttgacaaagccctgcgaatgggtgaaggccaccagctcaagaagctggagaacgtggctaaggccgtgaacgccctggaggacgagatttccgccctctccgacgaggacctgaaggcccaaaccccgaagttcaagcaggaaatcgaaaacggcaagagtctggacgagatcatgcccgaggcgttcgccaccgtgcgcgaggtctccaagcgcaccctcggccagcgtcacttcgacgtgcagctcatgggcggtgccgccctgcactggggcaacatcgccgaaatgaagaccggtgaaggcaagaccctggtcgccaccctgcctacctacctgaacgctctcgaaggcaagggcgtgcacgtggtcaccgtcaacgactacctcgccagctaccagagcgagctgatgggccgtatctaccgcttcctcggcatgaacgtcggctgcatcatcaccgagcagaagccgccggagcgccgcaagcagtacaacgccgacatcacctacggcaccaacaacgagttcggcttcgactacctgcgtgacaacatggcctgggagaaggccgacctcgtgcaacgcggccaccactacgccatcgtcgatgaggtcgactccatcctcatcgatgaggcccgtaccccgcttatcatctccggcccggccgaaggcgacgtgacccgctggtaccgtcagttcgccaagctggtgctgaagctcacccgcgacgaggactacgacgtcgacgagaagaagaaggtcgtcggcatcctggacccgggcatcaccaaggtcgaggacttcctcggcatcgacaacctgtacgagccggccaacaccgccctgatcggctacctcaacaacgccatcaaggccaaggagctgttcctcaaggacaaggactacgtcgtcacccaaggcgaggtgctcatcgtcgacgagcacaccggccgtatcctgcccggccgccggtacaacgagggcctgcaccaggccatcgaagccaaggagggcgtggaggtcaaggccgagaaccagaccttcgccaccatcaccctgcagaactacttccgtatgtacgacaagctcgcgggcatgaccggtacagccgaaaccgaggccgccgagttcatgaacacctacaagctgggcgtgctgccgatcaagaccaacaagccgatgatccgcaaggaccaggacgacctcatctaccgcaccaagaaggagaagctggccgccatcgtcaaggacgtggccaagcgtcacgccaagggacagccggtgctgctcggtaccgcctctgtggaaagctccgaagtggtctccactctgctcgacgtggccaagatccctcatcaggtcctgaacgccaagcagcatgagaaggaagccgccgtggtcgccgtcgccggccgcaagggcgccgtcaccgtggccaccaacatggccggccgtggtaccgacatcatgctcggcggcaacgtcgagttccttgccgacgccaagctcaagtccgagggctactcgccggaagacaccccggaggagtacgagaagcgctggccgggcaccctgaacgagatcaaggcccaggtcaaggacgagcatgaggaggtcaaggagctgggcggcctgtatgtgctcggcaccgaacgccacgagtcccgtcgaatcgacaaccagttgcgcggtcgttccggccgtcagggcgatccgggcgagtcccgcttctatctgtcgctggaagacgatctgatgcgtctgttcaacacccagctggtggcccaggtcatggccaagggcatggaggaaggccagccgatcgaggccaagtccgtcaccaagggcgtgcgcaccgcgcagaaggccgtcgaatcccgtaactatgagattcgcaagaacgtgttgaagtacgatgacgtgatgaacaagcagcgcaccgtcatctactccgagcgtcaggccgtgctcaagggcgaagacatccacaaggacatcctgcgtttcatttccgacaccgtcgagtcctacatcaagggtgccaacaagggatccgagaaaccgaaggactgggattgggagggcctgttcaaggcgctcaacaccgtgatccccaccaaggtcgacgaagacgaggtcaggaagatcgtcggcggcctcaagggtgcgaaggccgtcgaggccgtgcgcgacctgatcgtcgaggacgccaggcagcagtacggcgaaatggaggagaccatcggcgagaccggcttgcgcgatctcgaacgccgcgtggtgctcgccgtgctcgaccgcaagtggcgcgagcacctttacgagatggattacctcaaggacggcatcggcctgcgtggcatgggccagcgcgacccgctggtcgaataccagcgcgaaggctaccagatgtacaactccatgatcgaggccattaaggaggagaccgtccagctgctgttccacatcgacatcaagcaggtcgccaccaccgacgaggccgttgacgaggtcgaggagaccgccgaaagcgccgacaccatcgccgtggcctccggccccgacgagaacggcgaatccgtggtcgaggccgccgagggcgaagtcgaggaagaggacgaggatacggacgccaagcaggcgatcgccgaatccgcagctgcctccggggccggcgagtccacgctgcctgttgccggaccggctccgatcagccacgccgccggcaaggtcccggtttccaagcgtccgaagagcgaagagctcaagacgccgtgggccgacggccgcaccttccctggcactggcaagaacgccccgtgcccgtgcggttccggccgcaagtacaagatgtgccacggccagaacgagaagtgacgcatcgctagttagtaactagctcatggctccccacacggggagccattttctatgcggttcatcagcatgtattcgtgcggtgccgtacgcgcgggacggcacgcgattttcgcggattttgacgtcgtatcccacactgttgcgggatggcacgagtgtcaatcgattgactagcgtggcgtcccgcagtacgaattacggaatcgttgaaattccgccattctcggtgttatggtgtcacggtccgcaaagggtgatgtgggacggcacggctcaaacggcgaaaatgagctgccgtcccgcagttttacgggatagcacaaaaaagaggcttctgctgttttcgtgggttgggttcttggttgtggtgggcgtatgtcgagtccgccgcggcggagcatgacgagggcgatgggattgttcgcgtggtggaagccgtaggccatgcggatggtggccttgatcctgttgtcggacgcctcgagcctggcgtttgaacagcccaattcgattgtcccgaggatgtcgggcccatgacggcggatctttcgggcgagttcgacgatctcggggatgcggctgtgggacgcccggaaca

SEQ ID NO: 158 - DNA, 28879 bp, Unknown
  R206_24m  MAG No. k141_52852
cctgctcgatgagcgtcatgatgtcgcccatgtcgaggatgcgcgaggccatgcggtccgggtggaagacctcgaaatccttcaggccctcaccgttggaggcgaacaggatcggcttgccggtcacggacgccacggacagcgcggcaccaccgcgggcgtcgccatcgagcttggagagcaccacgccggtgaagtccacgccctcgtcaaaggccttggcggtcttgacggcgtcctggccgatcatcgcgtcgatgacgaacaggatttcgttggggtgcacggcatcgcgaatgtcgcgagcctgcttcatcagctcctcgtccacgcccagacgaccggcggtatcgatgatcaccgtgtcgtagagcttctgcttggcgagttcgatggaatcgcgggccaccttcaccgggtcgccggaggtctggcccggagctgcgacggcctcgccgccatcggattggacgcccttttcgggagcatagacgggcacgccggcgcgttcgccgaccaccagcagctgcgtcaccgcgttcggacgctgcaaatcggccgccaccagcagcggcgtgtggccggaatccttgagccagtagccgagcttgccggccagcgtggtcttaccggcaccctgaaggccggcgagcatgatgatcgtcggcgggttctttgcgaagttcagcggacgatcgaccccttggccgagcacgtcggtgagctcctcgttgacgattttcaccacctgctgggcggggttgagtgcgtcggacacctcggttcccagtgcgcgctcacgcaccttgccggtgaaggaacgcaccacgtcgagcgccacgtcggcgtcgagcagcgcgcggcggatttcacggatcgtaccgtcgatatccgcctcggaaagcttgcccttgctcttgagatgcttgaacgcattcgagagtctgtctgtcaaagatgaaaaagctgccataatgggcaacagtctagccgccacgcgggaaattgtggtgttggggacgacgctttccggggaatgcgtcgcgtagtagtcagggatgttgggcattcagacggcaaatgccgtgccgtccgctcgtggcgaagccaatcgagtgcttccgataccatggaaaccgtaaagaatcctgtgttttttggaatgcttacgctgttttgaaaatcgctggacaccgcttatacgcagactgccgtgcgctccgaaccatgacgttcgggccaacgcagacatgccgtgcaataaggaaggcccactgatgcccacccaaaaactactcgaacgcaaagccctgatcgttggtatcgtcatcaacgtgctgcaggtcttagccggcatggccgtgttcttcatgaccggcctcaaggccatgttcctcgacttctccttcaccgcgatttccgtcctgtccggaatggtggcggtgtatctctcgtcgcgcacggtgcgaaccaccgagcgcttccccaatggcatgttcgcactggaacccatctacgcgatctgcaaggccattttcaccatgtcgttgttggtgtattcgctgattgacgtgtgccgagtagcgtacgactacttcgtgttcgggtccggcgaacgcattgaaaccggcccggtggtcatctacgagatcctgaccgtaatcgtgtgcttcagcctatacacgtattaccggcgttccaaccgctccatcggcgattccagcaccatgctcaccgccgagtgcaagagcacgttggtcgacggatcgatgtcgttcggcatcggcgtggttgccatcttcctgatgctgctaccggccggcggtccgcttgacttcctgcactacaccggcgatttcttcatcaccgtggctttggtggcattgaccatcaaggagccgttcagcgtgctcaaagaggcgttcgtggaattggtcggcggcgtgcatgacgacgatgagaccaacgcctacgtggaggccgaggcacagcgccatctgcctgccaacaccgactacgagcagacgctgatcttcaagaccggcatgaactacaccgttgacgtgtatctgagcggcatcggcgaaaccattgatgtagctgacctcatcgaatgcaagcgctcgctggagaaggagctcgccaagcgcctgcacatcgtggacgtggacttcgtgtttgactgattgatgggtttgaagcggctacttcaggctccaagtggaaccctgcgggccgtcttcgatggcgatgccggcctcggtcagggcgtcgcgaatctggtcggccttggcgaagtccttggccttgcgggcctcggcgcgggcgttgagctgctcggcaatcagtgcctccagcgccgcatgttcgggcgactcggccgtgccatcagcggcaccgccagcagacacccacggctcggccagcgggtcgagacccaaggtgtcgagcatggcacgcacggcgagcagcgcctcacgcacctcggccttggcggtttcggaatcggcgcggtcagccagctgtgaaagcaacgtattgccggaacggatggcggtgaagatcgcggcggttgcaccagacacattgacgtcgtcattcatggcggccacgaaatcggcgggcaaatcgtcggcggagacggcagcaacctcctcgcgagaaggctgaccgcccagtgccacaccggcgcgctcgatgaagttcgagacacggtcgtatgcggcctgcgcctcgaccaacgcctgatcggaccattcgagcatcgaccggtactgcacggagcccaaagcgtaacgcaccacccaagcggaatgctcggccagcacgctcggcacggacaggccggtgcccagcgacttcgacatcttctcgcccttggcggtcacccatgccgaatgcatccagcgcgcagcagaggggtagccggccgcgcaggtctgcgccatctcgttttcgtggtgggggaagcgcagatccaaaccgccgccgtgaatgtcgaagccatcgcccaggtaacggtgggacatggcggagcattcgatgtgccagccagggcgacccacgccgaacggcgtcgaccaacgggcgtcctcgggatcggtgtccttgggggccttccacagggcgaaatcacgcgggtcgtgcttgtcgggggaggcgtcggccgggtcgaccggattgtacttgtcggcaccggtggcgtccacggacgggcccatgcgatcggccacggcggcggcctcatcgacttcggaggtctgcttctggtgggtgagttcgccgtaatgcggccaggatgccacatcgaagtacacgttgccggtgggcttgccgtccgcatccgtgaccacatagccgtggccgttgtcgagaatgcgctgaatcaggtcgatcatgtccgacatgtggccggtggcgcgaggttccacggtgggcggcagcacgccgagcgtgttgtacgcctcggtgaattcgcgctcgtaataataggcgcgggcccaccaacgctggccggcggccgcggccttatcgaggatcttgtcgtcgatatcggtcacattacgcacaaaagtgactttgtagccgagcttcaaaaaccagcggcgcacgatgtcgaacgccacggcggcacggatatggccgatatgcggtgacgactgcacggtggcgccacacacataaatgccgacttcgcccggcttgagcggcacgaaatggctgacctggtgcgaggcggtgtcatacagattcaggccttctgcggccttggcgacatgcaccggcgtcaggcttgaaggcatgacggaaatgttgaaatcctgcggttcttggctgtttcccataacgctcaagcgtagggtccgaaccagacatgctgaatcgttactcgaagagcttggtgaacgcttcacaggcggggcccgaacgaggtgacagacggatgagaagcgggacaacagtctcgcgagaacacgtctttgaccgctgcggaaactgcgagattcatggatttgccctgcctgttacgcaaacggggaacgctcgtgccacaatagaagtcatggccacaccacaagtgctcattttgcaacatgtcccatgggaacgcccgggacgcatattgtcgaacctcgaagacatcggtcttgagacggtgacgatgaatatcgtcgacaaaaagaaaccggacttgcctgatttcggcgaactggctggcgtggtaatcatgggtggacctatgggagcgcttgattacgacaagtatccggggctgaaggcggaagccaagttggcacgtgccgccgtggcttcaggcaagccgattctcggtgtatgcctggggcatcagattatcgccactgcgcttggtgcgcagctgcgcaagggtgatgcgccggagattgggttcgcgccgatcaagcgtgtggacaagcatgacttcttctccatgtgggataagcagctgacggtgctgcactggcataacgacgtggtgggtttgcccgagggaggccagctgctggcacgttcgtcttccaccaaggtgcaggcattccgactgggatccgcgctgggcatgcagttccatcttgaggtgtgcggctcgctgctggacgaatggctggatgagccgagcatggtcaaggatctcaaggccgcgggtgggtccaagtcccaattgcgcgagcaattcgcccaatacgatcagctactgcatccgctcgccgagcaagtgttctccggttttgcggcccgctgcaactcctacgctcagacgctgggcaaataacgtttgtgggccgccgctgggcaagcgtggcgctacattggtgagtcatgccgacttatgacattggactggaacacgtttcgctcgctttcgctaccaaaaccatcttcactgatgtgacgcagggtgttttcgagggcgaccgcatcggcatcgtcggcaagaacggcgacggcaaatccacgttgctgcacctgttccgcggcacccaggagccggattccggccgcgtgacgaagcgcggcggactcacgttcggcatgcttgaccagcgcgatccgctcgacgacaacgccaccatccgtcaggccgcgctcgaaggccgcgccgactacgaatgggcgtccgacaacacctcccgtgaagtcgtcgaggtattgctcggcggcatgagcctggatgccaaggtcggctccttgtccggcggccagcgtcgccgcgccgatttggcccggctcctgctcaaggattgggatattctcgcgcttgacgagcccaccaaccatctcgacgtggtcaccatccactggcttgccgagcatttgaagaaccgctggtccaaaggccagggcgctctgttgctcgtgacccacgatcgctggttcttggacgaggtctgcgaatcgatgtgggaagtccacgatggcgtgatcgagccgttcgagggcgggtattcggcgtatatgctgcagcgcgtggaacgcgatcgccaagcggatgtgcgtgaaacgaagcgccgcaatctggcccgcaaggagctcgcatggctttcgcgcggtgcccgtgcccgttccaccaagcagaaattccatgtcaaggccgcgcgcgagcttattgccgacgtgccgccgatgcgtaacacacttgaactgaagcaaatggccacctcccgtctcggcaaacaggtggtcgatttggtcgacgtgacgcagattttcgaaaaaccgcagggcatggccgatatcgacccggatgtggcggcgctctccgcgtccgcttcccgcgtggatgtggtcaacgccatgtacgccgagccgcagctgcacggttccgttgaggtggcggtcaccgacatgactgacctgcgcctggtggacgccggcgtgccggaagccgtcgaggccgctgaggaagcgcgtaagaaggccgaggctgagagcggcaatccgcagcttgctgacgatcgcgaggttcgtcgcatgaacacgggtggtgaaaccatcggcggtgacactgctgcaacgaattcggatgatggcactgctgcagccggtgtcacctcggctgcacgcaaggtgacggtttccggccgcgagattcttgacgatgtgacttggctgattggccccggcgatcgtttcggcatcgtcggtgcgaacggtgccggcaagtccacattgctgaagttgattgacggttcgattactccgaccgtgggccatgtgaacatcggcaaaaccgtgaagttcgccgtactctcgcagcgtcttgatgagctggagaaactgggccagtacaagatcaaggaagtgctttcccgctataagccgagctacattgtggatggcaaggaagtaacgccgggacagttgatggagcgtctcggctttgaatccgcccagttgatgacgccgattcgcgacctctccggcggacagaagcgccgcatgcagttgctgctcatcctgctcgacgagccgaacgtgctcatcatggacgagcccggcaacgatctggacactgatatgctcgccgtcatggaggatttgctcgatacttggccgggtacgttgatcgtcgtatcccacgaccggtacctgctggagcgcgtcaccgatcagcagttcgcgctgattggcggcaaggtacgccatctgcccggtggtgtgcaggattacctcgatatggttgaggctattaagaacggcaagggattgccggctgacacgcctggcttcgcgggcaccggtaacagttcggcgaagtctggtaggggtaaggcggccgccgtcaatgctgctgcatctctccctcagtccgcttcgcggacagctccctcgtcagagggagccaataacggtgaggactccacctcgaagctcaccggcaaggccttccacgaggcatccaagcgcgtgaatgccatcgagcgcaagcttgccaaactggaagagcagaagaccgaacttgaggcacagatggccgtccatgacccgagcgactacgagggtctcaacaagctcaatgaacaactcaccgccgtcaatactgaaagcgataatctcgaagccgaatggctcgaactctccgaacaattggagtagcgggagaaaccgtaacgttcacaaggcctcggtagtttgccggggcctaccgctatgcaaactcccacggattaatcaattccacgtcggtaccttcgaagtccttgatattgcgcgtggctatggccgcatcccaggaacaggcaattgccgcaatcatggcgtcttgaatactggtaggtgtgcccctgcgttcgcgttcgacaaggatatgggcataatccgcagctgcctgggtgtcaaatgcgaacgtcctgtcctctaatgtcataagcgccagcttgacggtcgtatctgtgtactttcgtcgtttgccttcaggcatgcgacatattccgaccaacaactcggcgacggtgatggcggtggttgccagattgcttgtatcttggttcctcagccaattggcaacgtgttcgtctggctgtttcttgatgatttcgctgatgacgttggtgtccagaataatcatggccgattcctattcaaaagatactggcggtcgggaatcggcggaatttcgctcggatagtgggagttcccccttgtcgagtccctcaaaatccatgttcttcatgaattcgcggatctcgtcgtagaaattggtctttcgtgtgatttcatgcgccaccgtgccggccagccattcttcaagaatggatcgcacctgagattccatggagcggttgtttttctcggccacttctttgagctgttgaatctgctcatcgggtatttttcggatggtcaatgttgccatgatgcacctccttgttgctgtcataatgctagcataaggtgctgtcattttgcttgcagcacgggtgatgaggtatgcacgcatgaaaaaggcggatatgcatcatgcacatccgccctttgagcttggactgggtctccccgcagtcgccgaatcagcgcccggtaacctcggaaccgacgaccttttcgctcagggcgcgcgggccacgggtcacggctacggcaccggagcgcaccagctcaatcacaccgtaatgctccaaaagccccagcagcgcatcgatcttaccttcggcaccggtggcctcaatggtcagcgattccggattcacgtccaccacacgcacgcggaagaggcgcacgatctccagcacgtcggaacggttggattcgtcggcggccaccttgatgagcaccagttcgcgttccacggtggagttcgggtcgagctccacgatcttcagcacgtgcagcagcttgttgagctgcttgatgatctgctccagtggcacggcctccacgtcggcggtcaccgtgacgcgtgagatgtccggacgctcggtgggggagacggacagtgagttgatgttgaacgcacgacgggcgaacaggccggcgatacgcgccagcacgcctgggcggttctccaccagcacggacagcgtatgacgctgggaaccaggctgggatgcaggatagttagccatgagtgttctcctctcctcagtgctcgctcgcagcggcagcggcggtctcgtgctcgaacacgccggtcgcatgctcgtccggaccggttcccggagccggggtgccgccggtcagcggcttgatgccgggcttgtacgtcacctcgtcgttggaagcgccggcggctaccatcggccacaccatcgcatccttccacacgcggaaatcaatcagtaccgggcggtcgttgatctggttcgccttttcgatggcggcaatcgcctcttcctcggtgaacgcgcggatacccacgcagccgtatgcctcggccaacttgatgaaatcaggcacttcgagcggcgcatcgccgtcgaccagtgccgccgcaccatcggcaccgtgcgcctcgccatcgagcaggttggtctgcgagtagtggtgctcgtagaacagcgtctgccactgacggaccatgccgtacacggagttgttcagaatcgcgatcttcaccggagcgtggtccaggaacgcggcggccagctcctcagaggtcatctggaaggaaccgtcaccatcgatcagccacaccggcttcttgccctcgaactcgcgggccgagcccacggatgcgccgatggcggctggcagaccgtagcccatcgtgccgaggcctccggaggagatccaagcgtgctggttctcgaaatcgatgaactgcgaagcccacatctggtgctgtcccacaccggtcacccagatggtggacggatcggccatctcagagagctttttgatgacccactgcggggccattgatccgtcggtcggctcatcccacgtcatcgggtattcctcgcgccagccgtcgatcgccttccaccagggggccagattcggcttgccctgaatggcctgcgtgcgctggatttcgggaatcaagtcgtcgagcacggtagccgcatcgcccacgatcggcacgtcgggctgacggttcttgccgatttcagccgggtcgatgtcaatatgaatcacgcgggcggtcggtgcgaaggcgtcgagcttgccggtcacgcggtcgtcgaaacgtgcaccgatggccacaagcaggtcagcgcgctgcacggcaccggttgcggcaatcgtaccgtgcatgcccagcatgccgaggttcttcgggtcggagtcgggaatgatgccgcgtgcgggcagggtcgtgaccacgggggcgccggtcaggtcggccagagccttgacctgtgcgccggcgttggagcgggcggcgccgccacccacatacagcaccgggcggtacgactgagagaacagcttcgccgcgtcggacagcacacggccgtgcgccttggtggtggggttgtagccgggcagaatcatgcgctgcggccatgagtagtacatgtcgccggtctgtgcggtcttggtcagatccacgaccaccgggccggggcggccggtgttggcgatgtagtacgcctcggaaagcacgcgaggaatgtcctgcgcgcgggtcacgaggaaggagtgcttggacaccgggtaggtgatgcccacgatatccgcctcctggaaggcgtcagtgccgatggcctgcacgcccacctgaccggtaatcacgaccatgggcacggagtccatattcgcgtccgcaatggccgtgaccacgttcgtggcacccgggccggaagtcacgatgcacacgcccaccttgccagtggccagtgcgtagccttcggcggcgtggccggcggcctgctcgtggcgcataagcacgaagcggaacttcgtgttgtctttgatctcgtggtagacgggcagaatcgcgccgccaggaatgccgaagacgtcctcgacgccgagatcctccagcgaacgcaccagcgcttgggcgccagtcatcttctcgccatcgacgatggtctgcttatcgggggccgcgttgattttcggcacgccgctgaatgcctgcaaaggcgtgggtaaagccatgattcctctcacctcatagattttgccgcgaacctgcccgaccttgggatggggccgggtgcccgcgtgtctgattccagtcgcttctccgagacttgtggccccggcacgactcgtcgctcatgttggtattagtctattcgcaaatctgacagcgagcttacttagtccgcgtcttgagcgagtccagtgacttccagcccgcttcggcggccgccagctgcgccttacgcttgctggagcccttaccgatgccgatgatgtcgccgttctcgcccaatgagacgcgcgcggtgaagatctgcgcgtactccgggccggagacctccatatggtagaccggctcatccttgccgaggccgtgcgccttgacggtcagcgaggtcttccagtcaagtgccgggccctcggtggccacttcggcgagcgtgtcgtcaataagccggtgaatcaccttgcgtgcctcgtcgatgccgtgttccaggaaggtcgcgccgatgagcgattccacgatgtcgcacagaatggagttcttctccgcgccgccctgctcggtttccccgtgacccagcagaatgtaggggcccaccttgagcttggttttggcgatggcgctcagcgcgtcttcggagacggccttggcgcgcatcttggccagttgcccctcggtcatatccgggtgaatggtgaacagcgtttcagtggagaccagttcgagcaccgcgtctcccaggaattcgaggcgttcgtaattggccacgccggggtgctcatgcgagaaggagcggtgggtgagtgcctgcacgagcagatccgggctgagagtggtgcccaacgcttcaagaagctcgttggccggcgtcggctgctgtggggtttcattgctcatgattgttgtatggtccttcacgcgatggtgatgtgttgtgtgttgtgttgtgttgtttgcgatgcgatggtgtacgtaatggtgcacttatgcgaagaccccgccacccgtcgatggcagggccttcattcaagccgttatcgcaggactcacttggtgtgagccggctggatggcggagcggtaggtgcggccgcggtagttaccgcagctcgggcaagccatgtgcggcagggccggagcgccacagttcgggcagttcacggtcgcagcagcggtggccttccagttcgcgcgacgcgagtgcgtgttggcgcgcgaggtcttgtacttaggcagtgccatttgagtatcctctatttcgttcgaacaattgagcttaagcgtccgttatcttaacgcacggctcgtacaaactccgttcaggcgcgcgtcactcggcctgctcgccgttctgctcggcctcgagctgggctttgagccccgccaatccggcaaaacggatatccgtcacatcgtgatgatggtcgggatcctcgttcagatcggcaccgcactgcgagcacaggcccttgcaatccggtcggcacagtggctgcaacggcagcgattcgaccagcgtgtcgcggatcatcgcctcgatgtccgcgaatgcgccgttctccagcagcggatacgtgtcttccgactcgtcctcgccggcgatgatgtcgatctcgtcgtccttcttgttcttgccgcccttgccgttggccttgtcctgacccgactcatacgggaagaacaccgtcacatcaaccggccagtcctcgtcaatcggcttcaggcagcgcgtgcactcgctgacgaatggcgcgaccaggcggccggtgaagatcaggccgtccacaatcgaatcgaactgcccgctcacgtgtacgggctcgccttccttgatgccgacgatgctgtcgccaatgccggaaggtgccgggaaatcggcgtcaatcggcttggattgaccggcgcgcgaagcaatctgcgctaccggaatggcccacggggaatcttcaactcgtgccatggtatgttcttggtgcctttcgtatgttggctggagttattcgttactggcgttattcgcgttactgatgttgctggtgctgctggcgttactgggcttcgggatagtcgttcagcgtcaggtgcggcatctgttcgccggccgcacgctggcgctcttccagcacgttaagaccggcctgcacatcccgactgagtttgccgagctgctgggacagcccttccatcaccgtagtgcagtactggtccgcgccttgggtcagatggtcggctctggtctgtgcctggtcaagaatcgcgcgcgctttctgccgtgcaagctcggtgacgttctcttggccggccaggaactgtgcctgttcgttggcgtccttgatcatgtcggctgcgcggctttgtgcggaggcgacgatggcgttggactgggtctgtgccgattccagacggcgctcggcctcgcgcatgagggcggaggcgcgctccaactgcaccggcagcattttcttcaactcggaaagctggtcggtgaattcgtcgcggtcaaccttcaccatgccgggggcgaatatgctggacttcgcttcgcccagtgccgcctcgagctggtcgatgatgtcatacaccgtggtgaattcctcgcggctcttgaccgtggccgggtcgtcgtccgtggtttctcgcaggtcgggcatttcgttcatgaacgaggggcgagtgccggcggcctgagcggtctgagcttgtgcccgggtctgctgagctgcttgggcctgcgctttggcctgcatctgtgccggagtaggggtaggcgcggcgggcggcgatccggcgagaacatcggcctcttcggtgggtgccggcgcggcttgcgtagacgcgggcggttccggggcggacggctccggagtggacgatgcggcgtccgcattcggtttggtcagatcgacgtatccagtggggtggtcatcgctcatagtcattagtgcatcagtccttccgctgacgttcctcggccagggcatcggccagcatcggcacgacacaatcgggcaccatgccggtcacgtcgcctccatggcgggccacgtccttgacgatggaactggagatgtgttcaagaatcggatcggccggcaaaaacagggtttcgatgccggcgagcttgcgattgaccagcgccatgccgagctcggcttcatagtcgccgttctggcgcaggcccttgacgataacggtggcgccgaccttcttgcagtagtcggtgatcaggccgtcggtggaagaaacagtgacgttcttgcaaccggctttgtcaagggcacggcggatcacgtcgactctggtggcttcggaaaacatcggtgttttcgcggcgttgacggccaccaccacatgcacctcgtcgaaaaaccgcgccgagcgctcgattacatccaagtgtccggcggtaacggggtcatacgagccggggcatactgcgatagtcatgccttatagcctaccgcgaatggtgtgcttcgtgctgccgagcgtgcattgttgtcgcgtcggcgtatgaggcagtgtgtgcggtgccgtatgtggcgtcggtgcggcgttgtgtgcggcattgttatgtggcattgtatgtggcggggtggcgtgatgcgcgacatgggtgtgtggaggtgtgcggattacgcgccaatgggtttcgcgggtaacgacgggaatctatgatggagtgcagtcgaatcgttgaatacgaggaaagaagtgcaccatgacttttgccgagatgttcgttgatgatgccgaaccgctgcgcaacccggaccaaggtgccggcacgtcggtgctggaacgcccggaaaccaaggagtctccggttcgtgacgatggcggcgacgcggatcgattcgcacattatgtttctaaggaccgtatcgccgaatcacgcgcgaccggtcgtccggtggtcgccctgtgcggcaaggtctgggtgcccaagcacgatccgtccaagtacccggtttgtcccgattgcaagcgcatctacgaagaaatgacgcgctaaaggtggtacttggctcccctcagcgagggaagccaaaatggtcaccgagccgaaatctcgtcgatcagcttgagctcctcgtcgctgaagtgggtgttcttcagcgcgccgatgttgtcgagaatctgctgaggcttggaggctccggtcagcacggaggtcaccttaccatcgtgcagcagccatgccaggctcatctcggccagcgtctggccgcgttcggcggccagattgttcaggtccacgacctgcttgtgcagtttctcggtcagggcggaatcgttgaggaatcgcggatcgtgagccatgcggctgtcggccggaatgccgttgagatagcggttggtcagcaggccctgtgccagcgggcagaaggtgatgaggcccttgcccagcttgaaggcggtctccttcagaccgttctcctcgacggtgcggtcgaggatgttgtatttgttctggttgatgatgaacggcacgtgcaggtcggcgagaatcgcggcggccttctccatcgtcggaccatcgtagttggacagacccacgtacagggccttgccggagttcacggcctgagccagcgcgcccatcgtctcctcaagcggggtttccgggtccgggtggtgatggtagaagatgtccacataatccaggcccaggcgttcgagcgactggtcgaggctggcgagcaggtacttgcggctgccgaggtcgccataggggccggcccacatttcgtagccggccttggtggagatgacgagttcgtcgcggtggtgcctgaagtacttggcgagcagcaggccgcagttcttctcggcctggccgggttcggggccatagttgttggccagatcgaagtgggtgatgccgttgtcgaaggcggtgaagaccagggacttcatctggtcgaatggcgtgatgtcgccgaagttgtgccagaagccgagtgagacggccggcagcttgaggccggaggtgccggcgtggttgtaggtcatcgtgtcgtaacggtgcgggttgggagcgtaggtggtggttggctcgaacattgagtctccttacaatgtcatttttgttcttacgaatgctggtctgcgatgggcaaaccgacgccgatcgagtggtattcgtaagtgttcttggatactaaggttccagttcaagtgaacttgaatgcaaacggctgcgacgcttcggcgtgtcgccgcagtaaggagtcatgatgtcctacaccattcgtcaggtggccacgcagttccatatgcagccctctacgccggtgaagactggccggattggcgcgagtacaaaaaccgcgcctattccattgaatgctgaggccatcgagtgctgagctggatgccggctgggcactaagaccgatgtgcgtcgatcgtgggcgcgtctatccgagtaaggccttgctcggcagtgcgcggtcgagcagccagacaacgagcgatatcacgaagaacgctatggccagcttgccgcagctaatgccgaacccttgccagccgagtgcgtcgaggttgatgaagtcgtacggatacggactgccgccggccgccggtccggaccccggccaaatcgtcgcacgggccagcacgaagaccaagtatgcagggaagtacgccagccacgagaacatgtaatgccagcggaaacgccggtgcgggtcgaatagcacgaaatcgataaccgccataatcggggcgattttgtgcagcatcgtattggtcatgatgccaataacctgtggcacgtatgccgggtcgtccggaggcatcaggaagaacgccaccagtgcggtgactatggcgtacacagtcaggcatcccttaggccatgcaggcggctgaatacctttgagcagtgtggccgcgccggcccacagcatcacgatgcccagcacgaaaccggtctggaacgtgaaatacacccagaactgcggtttggaccatgcctcatatgtgcccacgaagcagaaaccggcgatcgcaaagcgccacaacgccacgatgaatctcatgcatcgagtctaccgcttcgccagtgggctgtatggctttgcccggactacacttaggtgcaacttcaccacttatgtaggaaaggccttgcaatggtcgattattcgccggctctgatgaccgacatgtatgaatacacgatgctcgacgccgctctgaaagacggtaccgccgaccgcaaatgcgtgttcgaggtgttcacgcgtcgcctgcccgaaggccgtcgctatggcgtggtggccggcaccggccgcattctggatgcgctggaacatttccacttggacgaagcggacctgaagttcctggccgaccgtcacgtggtaagccccgagaccattaagtggctggagaacttccacttctccggtacgattcgcggttaccgcgaaggtgagatgttcttcccgaactccccgattttgcaggtcgaaggcacgttcggcgaatgcacgctactggagacgttgattctatccgtgctgaactacgattccgcagtggcctccgccgcctcacgtatggcgtcggcagccaaggatcgtccttgcatggatatgggcggacgccgcactaacgagtgggccgccgtggccgccgctcgagccgccgtagtgggcggattcaagggtaccgccaatctgctggccgcccagctgtatggtctgaaggccattggcaccgccgcgcattgcttcacgttggtgcatgattccgagcgtgacgccttcgaatcgcagatcgaggcattgggcaagaacaccacgctgctggtggacacctacaacatcgaggaagccgtgaaaaccgccgtcgaggtggccggtcccgaactgggtggcgtgcgcatcgactccggcgacctagccgccatggcccagcgtgtgcgcaaccagctggacgccctgggcgccacgaacaccaccattaccgtgaccaacgatttggatgagtacgcgctcgccgcattgcagaccgcgccggtcgactcctatggtgtgggcaccatgctggtcaccggctccggcgctcccacttgtgcgatggtgtacaagctcaccgaacgtgaaggcgctgacggcacgatggttccggtcatgaagaaatccaaggacaaggccacagtgcccggtcgcaaactggcattccgctcctacgaatacgcgttagccgaagccgaacacgtgatttccggctcggaggagaagctggccggtttcacgcctgaaccgacgtggaagaacctgctggtcgactttgtggatcatgggcagatcgacgctcagtggcagggccatgacgccatcatggccgctcacgactaccacgccaaggcgttgtccgaactgcccatcaccgcgcagagcctcatgaagggcgagccagtgattcctacggagactcaggttctctgaccgtatctcactggccgcatccctttggttacattggctactcttccctctgtctgtgcccctctgtctgtgttggccgcactcctgtgatcgccgccgaggcggggagatccaaccccggtcgcacccccgtgtttgcaccccctgtggctgtgtcccggggctgtattggccgcgtcccctcgggctgaactgcgtcccggttcgccggacgtggttccagctgagggtggccccccttgtttttttttggggggggggtactgttcaccggggaaatatgtatatgtgcatgctgttgcaatgtacattttgttgtcaggtgacaacgtcttgattcagatgaattggcgggaaatggccatttgtcttatccaattgatttgaagaacgttgtcagttgacaacgttttgtacatggtgcggaacgacacatattcctatcctggtcaggatgccgacgaggtggagtgaaaaaccaaaccatttcagaggatattgcaccgagacgttgtgggattgccgtgttgtcggtgatgttacagagatggcgcagtgttgcgtgagggggtgttgcgtgtgatgttgcgtgtgatgttgcgttgggctgattgggaggaatattctgccggtagaatgccgtgatgcgtgcagagcaatcgtttgcggagcaatcgttgaagaatcgtgtgaactgatgcgatacgaatcacaccgtctctgaattgtgggatatgacgaatcgtattgtcatgggattgtgggatatgacgaatcgtatcgtcatgggattgtgggatatgatgattgcggtttgatgaaatgaccgggaaatcggccgaggcaaggtgacttcgatgagtgaaactctcaatgatgagaacgcggcgggcaacgatgacgtatcagagcggcgcgctgtagagcatcgagcgttagaacagtacgatgtcgtgcatcacggtgtggtatctggttgccctgttaattcgtgtgcggctgtgctgaatgaagtgatgtcgcagactggttggaatgcctatgagcttgcacagcgcactggtttggatcggtctgcaattggtcgcgtattgcgtgggcaaagaggtatgttgtttgatgttttggccgaggggcttgagcgggctggttttggtcttcacctagaagccgtggccccctcgcaaacgattccggaagacgaattgcacatgttgttggcgcaactgcgtaggcctcctgatttcgatgcaatagaaagcggagcgacctggtctacgttgaagatgctctgcgtcaatctgattcatgctcgaaatgttcaacatcaacgtatatcgttcgtccgagcggttgcacgggtgaacgatgcgtgctggattgcgtttctcgctggtttataccattttctgcgttgggatatcaacccaaggaacagacgcttgacattggttcctccgtaccggtatggcttggatggatggtggtccccactgccgagcgcggcaattatgcacgtgcttcatcgatatgaagagccgttgcctgacatggactatacatatttgccgttaatcgattacgaactcaacgctatgcagcgcaagcaattcaaccaagatttcatggaatatggcattcttattccagcggacgatctttcccaatcctcatcaggtacgcaggcattgactctgtaagcgagtggtgcataagaaaatagtggcgtgcatccaagtgtcatgggatggatatgtaagcagggaatgacattgcgctggagtttgatgatggttgacgagttgctatccaggcatagagcggatggcgtatgctggggcgcatggttgaaatcaaagacatgcttggcaatcaccaaataattcgtgccgacggccgcaaggtcgacgaactgcgccccgtgcgcatcacccgccacttcaccgacgcccccgaaggctccgtgctcatcgaatgcggtaacacgcgcgtgatgtgcaccgccacttttacccccggtgtgccgcgttggcgcaaggactccggcctcggctgggtcaccgccgaatactcgatgctgccgcgtgccaccgccgaacgcaccgaccgtgaatccgtacgtggcaaaatcggtggccgtacccacgaaatcagccgactgattggccgctgcctgcgtggcgtcatcgatatgaaggcgctcggcgaaaatcagattcagcttgactgcgatgtgcttcaggccgatggcggcactcgcacggcttccgtaaccggtgcgtacgtggctttggtcgacgcagtcaattgggcggagaagcaccgccatatcaagtccgccagccgcgtgcttaaggactatgtgtccgccgtatcggtgggcgtgatcaacggcactccgatgcttgacctgccatacattgaagacagtcaggccatgaccgacatgaacgtggccatgaccggttccggcaccttcatcgagattcagggcaccgcagaacaccgtccgttcaaccgtgccgaactcggcaccctgcttgacttggccgaaaagggcaacaaggaactgcaagccgcccagcgtgccgctttgtccctagactaagccagctccccttcctttaggggaggttgtcggctggaagccgtacggtctgcaatgtccagctcccctgacaaggggagccttcttaaaggagaacccatgcaaatcgtcgtcgcaacccataacgaaggcaagcttgtggaaatccgccgcattctcgaagaggatcttggcgcggatgccgaaaacatcggactggtgtccgctggcagccttcacctgccggacccggtggaaaccggcgtcaccttccaggagaacgcgctgctcaaggcccgcgccgtggccatccgtaccggtctgcccgctgtagcggatgattcaggtctcatcgtcgatgtgatgggtaacgctccgggcattctgtctgctcgctgggcgggtgctcacggccacgacaaggccaataatgcgctgctgctcgcccaaatcgaagatattccggatggcaagcgtaccgcgcgcttccgctgcgccgccgcgctggtggtcccggacaccgaggccagtgccgacgtgaccggtggagtggctgccgacggcatcaccgtttacaccacggctgcagatgggagccctgccccggtgcatgcccggtacgccatcaagtcggagacagtggaactcggcgacatgccaggtcgtatcatccgcgaggctcgtggtgaacacggtttcggttacgatccgctgttcgtcccggacgaccagcctgccggtcgcgtcagcactgagcctgaccatgaaggcgagccgctgaccagcgccgaaatgactccggccgagaagaatgcgatttcccaccgaggcaaggcgctgaaagccttggtccccgctatcgaggcgctgctgcactaagtcgtctaggctgtctaactgcactgagccgcgactaagccacagttgagtcgcggctcagcaactcagcccctcccgaatcgggcaagtgtctagcaagcgcctatgacctagcaagggcgatacgaaagaaggccggcgcttagtgcgtcggccttcttgatgaacaagagccacccgatagaatcgaactaccgaccttcccacgaacgagggggatgctctaccactgagctaaggtggcgtggctccaagagccaagtagagaatatagcactgcgtttgattcaacgcaagccggacgttcagcatcttcgggccattgttctttgagccattgtggaggcaatagtgcgaacgatgtgcacacctcatctgctcggaccccattcgtcgtgtgcgcgttatgctagcatggtgagcctgattgactcggaggcagagggaagcatgcgtgattttgtgctggtgaagttgacagacgaagagttcgatgatttctccgccaggcatccacaaggcaatttccaacaaacctcggcgatgggacgccttcgcgccgcgcaggggatcgacgtcgaatatctggccctcaaggagggcgagaagatcgtcgcggcggcgctgttcgaaactcaccgctctcgattctctacatttgcggccatccatgatggcccgatgtgcgactatcacgacaccgaagcattgaccttcttcatggatgcgctgaaacgccatgccaaggcaaagggtgcttcacagctggaaatcacccctgaatccccgtatcggcttcgcgacaccaatggagcttctttgccggatgaccagaacggcgctcccgacaataagctgatagaacggctcgaggcgatcggcttcactcatggcggtttcaccgtgggctacacggcggttccacgttggcgctacctcaaggatctgaccggcattaccgatgagaaaagtctgctgaagtcctatgacaagcgcacccagtggagcgtgaagcgtgcccaatcgatgggtgtgcatgtgcgtgagctgtcggacgacgagttgggggtattcgcacgaatcgagcagcaaaccgccgaacgtcgtagcttcgaataccgtggcgaagcatatttccaccgtttcaaggaagcgtttggcaacaaggcgcattttatggttgccgagatccacatcgacgaatatgtagcggacatgacggccaagcgtgaagcactttcggccaaggtggcggcattgaccgccaaaaacgccgaacaccccaccaccaaaaccgaacgtcagctgggggaggagacccgcaatctggcggcagccgaaaagcgcctgaacgaggcggccgagttcgccaaagacggggatgtgctgccggctgcggcatcactattcgtggagcatccgcgcgaggtcatctacctgttctccggtagcgtcgagcagtacaagcccttctacgcctccgcgctgattcagcatgacgcgatgctgcatttctgcgtggaacacgggctgtctcgctacaacttctacggcatcgacggcgtctttgatgatcccgatgacgaggggcgtggtgtactggagttcaagcagggcttcaacggatatgtcgaggaacttccgggcgagttcgtactgccggtcaaaccggtcgcctatgccatgaagcaatttgcgcacaagctgctgtcgcggtaaacggacgcagcacacaggccgttccagagcccagagtaacgatcagagtaacgacaagtaagaaggttcgattatgacgcaatccgatgcaggcgtcgcctcactcacccctaccaagatcactcctgccgagctggatgcgttctccgcagctcaagtgcaaggtagtttccagcagacctcgcagatggccgccatgggtgcgttcaacggtccggtggactatgtgggtgtcaagcgcggtgacaagctgattgccgcctgctacgtggtgtacacgcagtcccgtttcggtttggaaggctcggtctggtgcggaccgctgtgcgattatgacaatccacaggtggttgaggcgatgaccgaagccctgcgtcgttcggccaaggcccatcacgccatcagcgtatcctgctggccggccgcagtctaccgtctgcatgatctggacggcaagccgaccagcgacccggacaccacgatgatggacaacatggcccgcttcggttggaaacatggcggcttcaccgtgggctacgaatccgtggtgaaccgctggaacttcgtcaaggggcttgacggcattcataatgagaaggaactgctggcctcgttctccaagtaccgccgtaagaacatccgcatcgcccaggattccggtctgcgcgtgcgccggctggaacgcggcgaactgagcactttcgtcaagctgtgcgatatgagcgccgcacgtcaaggcttcaagagccgcgatctggcctactatgagcgtctgttcgataccttcggcgacctgatcgagttcaaggtggtcgaaacccatttcgacgaatatctggacaccctgcaatccaagctgaatgcggcctccaaagacaagcgcaacctcgaacgcctgctccagcgcgcgcaacagcggccggaaggcacggccaagaagggtgcctccgacccggcaacgctggaaaagcgcatcgccaccgcagacaagaagatcacggcgctggaaaagaccatcggcgaagtcaatggcatcatcgcctcggacggcccggtcattccggtggaagccggtgtctacttctggcatccgaacgaggtcgtctgcctgtccagcggcgaggacgatcgtttcatggattactacccgtcttccctaatccacttcgaggcgatgcttgactgcatcgcccgtggcgtggagcgcttcaacttctacggcatttccggcattttcgacgccaacgatccttcctacggcgtctggcagttcaagactcgcttcggcggattcgtggaagagcttccgggcaagttcacgctgccggtggacggactgcgcttcggtgtatccgaagccgcacacaagctgctgcatcgctgacaaacagtggcgagcacggacacagaaataaggcacaggtgacgacgagatgagcgcgactgcgaatcgaacagatacgacgtatacgtttggcgtgattacgcccgaagagttcgaccggctttccgaagccacaagccagggcagctttcagcaatggtccgggcaggtccgtcttgccaagattcgtgggcatgaagccgaatgcgttggcgtgtgcgacgcatccggcaatctggtagccggctgcgtgattctgtacctcaatggtcgtttcggtgcagatggctccgtatatttcggccccatcggcattagcgatgatccggctctgctgcgggccataaccgaggcgattcgtgaatcggcccgtcgccaccatgctgtttccgtggcatgctggcctaacgtcgcctaccgtctgtattcctcggacgggcagcccgacggcgagccgaacgatgcactgctgaccggattcaccgatgccggctggacgcatggcggattccataccggttatgacgtggtctgccagtggatgtacgtcaaggatctcaccggcatcaccaacggcaaggaactgctggcatcattcggcaaacgcgctcaatggagcgtcaagcgggcgcagtcgatgggcgtgcacgttcgcgaaatcggccccgacgagttcgacgtgttcgccgatatcgaacggcggaccggtgaacgccgcgggttcgcgacgcgcggcgcggactatttccgccagttcaagcaggcgtatggcgcggatgcgcatttcatgctcgcggaaatccacatcgccgaatatgtggcggatatgaccgccaagcgcgaggccttgcagaccaaggtcgcacagctgcagacgaaatacgatgaacgtccgaccacgcgcatcgaacgtcagctgggggaggaatcgcgcaatctcgcggccgccgacaagcgtctggctgaggtggagggatatgccaagaagggcgatgtgctgccggcagcggcttcaatgttcgtcagtcaccccaatgaggtggtctatcagtattccggttcgttggaggagtacaagccgttctacgcctcggcgctgattcagtacgaagcgatgctgcacctgtgtgtggaacagggtgtgagccgctacaacttctacggcatttccggcgtgttcgacgatccgaacgacgagggccgcggcgtgctggaattcaagcagggcttcaacggctacgtcgagcagatggtaggcaaattcacgttgccggtggacaagttccgcttcggcgtgagcaatctggcgcacaagctgctgcaccggtagcagctggcggccgggggacgaacctatgtgggctgcgtctcgcctgaccgtgtgcccgccgtgtgcccgtcgtgtgcctactcgcgcatttgctcacacgcccatcagcgcgtgagcaaatgccatcatcaccagtgaaatcatcgcggtgattgccagcgagaagccggccagtttggcgttgccgagtactttgtcggtgaacagcgtggagaaaatggcgattggagccaacgcgcagatcaccatcacggcgcgaatcgaagccgagaacggcagcaggaaccacgagatcaacgcgaaggcgacactgaacggtatacgccaagcgatgacggccatgacttccttcacatcatgcttggactggggcaaatccatgagcatgcccaccatcagcatcgacaccagcgcgttggcaccgctcaacggctgggttatagaggcgatccaatcgggaatcttcacgttggcgacggtcaacgcgatcatgagcagatacgtgtcgaacggcaccgagccgaagaagctcttgccgatggtgcgcagcaatgcgcggcgggcaagccgtttggcgtcgcgatccttgggcttttcgtacggcaaggtgggaaccgaaccggcgtgttgttcggcaagtgttttgccgggccgaatatgcagcagttgctgggtgagcacattggtgccggcggccaccatcacgcagttgccgatatcgaacatcgcagccggcaccaccgcgcccgcaccccagaatgactggacgaccgggaaagagaaacaaccgagattgaagccggcgccattgagcatcaggaaggcgcggtcggtcacattgcgcttgcgggtggccagaaagatgaacacgatcgggataaaagcaaacaggaatgcgaataccgaaataagcagcagcgagatgtcatgcggattggtggcgaacgagtatacgatggcaccgggtagcacgatgttgaattccgcggtttgcaacacgcgataatccttctgcccgaacaggccgaaccgcttgaacagatagccggcgagaatgatcagcaataggccaaccggcgtaagaatggcggacatacacttctctccttgactcacacaggctcacggcgcacaggctcagacccacaatgctgtgaccattatatttgccgccttggcattgccatatgtagaggcgtccgcaagggcttgcaattgcctcacgcatatacgaagagcctcccggaatcgttggcgatccaatgtttccaggaggctcaagccggtgcgcgagatgggacttgaacccacacgtcaaagacacaggaacctaaatcctgcgcgtctaccaattccgccactcgcgcgtgcatatccgcgtttccacaggtgtggaagatatacaaaaccctaggccggacagccattacagaccagccagcctagggcatccgagccacttgtcagaatcgaactgacgacctgctcattacgagtgagccgctctaccgactgagctaaagtggcttggttcgcggaaggcatttcgccagccgcgcacaagaaattaagtataagacatctccgcgaaaagtccaatcggcggcttggcagttgtgtcgtgaccgctcggttgaagatgacggttgtgccgcgccacgaactgttcgataatgcaaacgatggcaatccgacatcgctgactgatttttgttctgttcatgtccgaatttgtgagtattctgtttggtgatacggagcgcatccgagccgtgagcgaaggcgctccagtcactgatgaaaggaatggaatcctatggccatcaatccgcccgttgacgccacccagacccccgagtgggccgccctgcagaagcactatgacgagcttcaggccgaaggcgtgagcctcaagaagtggttcgccgaggacgccgagcgtgtcgacaagctgtccttcgacgccggcgacctgcacttcgatctgtccaagaacctgatcaagccggaaaccctccagctgttcgccaaccttgccaaggccgtcaagctcgatgagcgcaccaaggctatgtacaccggtgtgcacatcaacaacaccgaagaccgcgccgtgctgcacaccgcgctgcgccgcccggtcgaagacgagggcaagtacatcgtcgacggccaggacaccgtcaaggacgtgcgcgaggtgctcgaccgcatctacgccttcgccgacaaggtccgttccggcgagtggaccggtgtgaccggcaagaagatcgagaccgtggtcaacatcggcatcggtggctccgacctgggtcccgtcatggtgtacgaggccctcaagccgtacgccgacgcgggcatctccgcccgctacatctccaacatcgaccccaacgacctggccgagaagaccaagggcctcgatccggagaccaccctgttcatcatcgtctccaagaccttcaccaccctggagaccctgaccaacgcccgtgaagcccgcacctggctgctcgaagagctcaaggccaagggcgccatcgacggctccgacgagaagaacgccgaaaccatcaagaagcacttcgtcgccgtctccaccaacctggagaaggtcgccgaattcggcatcgacccgaacaacgcgttcggcttctggaactgggtcggcggccgttactccgtcgactccgccgtcggcacctccctggccgtcgtcttcggcccggctcgtttcgaggagttcctgcacggcttccacgagatcgatgagtacttcgccaacaccccgttcgagaagaacgtcgtggtgctgctcggtatgctgaacgtctggtaccgcaacttcttcaaggtcgcctcccacgccgtgctgccgtacgaccagtacctgcaccgcttcccggcctacctgcagcagctgaccatggaatccaacggcaagtccgtgc

SEQ ID NO: 159 - DNA, 2693 bp, Unknown
  R206_24m  MAG No. k141_53880
aaagtggatgaagccggggatttttgccgccagcggcgaagcggacgagatctggctgcatcgggctacggagtctgctgagttggaggctctgctgacgcggcatcgcgacacgtatatcactgaagctgattttcggaacattgccgcgcatggctgcaatctggtgcgtattcctgtgccgtattttatcttcggggatgtgtccggtcatccgggctgcatcgagtatttggacagggcgttcgactgggccgagcgtaccggtctcaagattcttatcgacctgcacacggtgcccggctcacagaacggattcgacaacggcggtctcaccggcgtggtgcgctggcatcatagcccgcgagcggtcgcctatgcgctggatgtgctgactcgtttggccaaacggtaccgtgatcgtgcggcgctgttcggcatcgaagtgctgaatgagccgattgattggctgacgtatgctgcgtcgtcatcgagcaggcaggcaaaggatagctttgaagcacggaggagtgggccgattccaatggtgttcctcaagcgtttctaccgtgagtcgtatcgccggttgcgcccgattttggccgagaaccaagccatcgtgttccatgacggcttccgactgggccgttggcgggactggtttgtgcgggagggcatgcagggcgtcatgctcgatacgcatatctatctggtcatggccgagcaattctcgctgttccgtctgattccggatcggtggctgatggactggtatcgcttgttcgtgcgctggaacgaacgccgcatccgccgggccgcgcgctatacgccggtgatcgtaggggagtggtgcgtggccaacaatctggtgaaccgaaccccttcagcgaggaatgccgtctatcgcgaggtcgccgccatgcagcgcaaagcgtggagcgcatccgccgggcagatttattggagctaccaattacgtggtaatcgtgatttcttgcctgccatcgacccgcaatccgacacatcacgtctcgacccatgggacctcacccacgtctggcacgccggttggatggcgtgcaaccgcaccaatcagcgatatccctcccaaaggggcagaggcatcagcgcatcctcacagtcggcccacatggtattgagattttggccgggggagcgcagccaacgcagctgaatgccgtccatcatggcgaagccggactgcagcaggtgctcgatattcacatcttccggcacggcccagttgatgttgagcgccatggtggccgtgcggcgctcgcggtcggcgaaataatcgtgcgcggggtgggccgggtcgagcgcctcggcgctcagcgtggagaacatatgcaccaacgtgggccttttgttcctgggcctgccggaagccgcggaatccgagggcttcgaccgcgacaccctcgacatgcccgccaagcagatcgccctgctcgaacaggtcgccgccacgaaccagaacgtcgtggtcgtgctgtccaacggctccgtggtctccgtggccccgtgggccaagaacgccaagggtatcctcgaatcctggctgctcggccagtccggtggcccggcgctcgccgatgtgatcttcggccaggtcagcccgtccggcaagctcgcccagtcgattccgctggacatcaacgatgacccgagcatgctgaactggccgggcgaggaaggccacgtcgactacggcgagggcgtgttcgtcggctaccgctactacgacacctacggcaaggttgtggactatccgttcggtgccaagatcgtggccgccgtggccgccgccggcgagctgacgaagctgcccgacaacgccatgatgcgcatattcctcaactccatgccgatcaactcgctgtccaccctgctgggcgaaggcggcaagaagatcgccaagttcatggtcgacgagtacgccaagctcgcgaagtaagggctgaagcgaggcaatcgcacggcgtaagaaacccccgttgagggggattttgtctgttaacggattacactggaataccgtaaggcagggacaatggagggtttatggacagaactatgccatacccccgtttaagggaagtattcacggggggggggtgcgttcccggcgacaacacccccggatcatcaacgacagggcaggaaagtcataccaggaccggcgacccggccccgaccatcgaggcggcctaccaaacatggtaatggggtggcagcatgaagtgcttttggtcggtaataccgatttcattaccaaacagtggattcagcatgcttttccccgagaccatgtggtgatagcggaacgagaaggcaccgtagacggcaatgaccgtctcagaatcgtcaacatgtctgacgccgacacccttgtcgacaccatcatcacatacgaatttgatcgcatcgtattcttttccgaaaatctgaccccacgcagcgatagagacggcgatctgggagcattgcgaagacttctgcatgccattcgcaacaggcaaacgcaaatactgatggtcagcggccccgaatccgaatttacctatccggaaaacgccgacgtacgtgataccagcaaaagtctgatgtctcgagcgtcggaagaactctgcctgtactacgcacgcacctaccgtctggaagcgaaaatc

SEQ ID NO: 160 - DNA, 5253 bp, Unknown
  R206_24m  MAG No. k141_60764
acgacggcgagtatctgccagtgggcggagccgagccagccgccccacgtgccgacggcaccgccgatcgcatacgcgaacctggcacggccgctgaatttggccaggtcaccaccgctcagcagcagttgtcgcgatacgatcacgccatgcgccagcaggccatagccgaggttgttgatgagccatccgacgcacaccgcggcaaactcgggaaccagtacggcggcaagggaaatcgccgtggcgattgccccgatggcggacacggcgcgcatgccgagttttgcggagagccgcatgtagacaaacgatccgacgatgctgcccacgccgccgaatgcgtagaccacggtcagcatatcgctgccgtaccgggagccgatgcccagcaacgcatagcttgcccacagcgacggaatcagcgcaagcagcagcgatgcgatcagcagtctgacccgggtcaagcgggtgaccggagtgcgctgcggcgcgtgtgacgtgtcggccgccgtggattcgtcggcggagccgtcgccgtcatcgccgcccgcaccatcgttgccgaatcccggcatgaactcgcgggtgcggaatcgcgtcagcgcgcaggcaaatgacagtgccgacgaggtgagcagcatggccatgatggaggcgttggccaaggccgatccggcaacctggcccagcaacgtaccggccacgctggcaatcacggcgacgtagccgctgtacttgacgagcatgtcatcgtcgtcgccggccgcatccacctcgaacacttcggaggccacgtcgatgacctgcccggtcatcagcagcaggcatgacagggccagcagcagccacttccaatacgtccaaccgttgggcaccagcgcgaccgccaggcacagtacgccttccacgccctccgtggtcgcaagcgaacggaacgagccgaaccgctgcacgatccatgcggataccggagaagcgaagtcgatgaccagattgaacgtcttgcggaacgcgatcacccatgccggcagtccgacgatcagaatcgaaggaatcaccgacccctcgaaaatcgcgttggacagcatcgaaaacgtcatacccaccaacgcccatcgcaacgccctgctcaataccgacaatccgcgcataccttagttccttgtccttgccagtgtaacggaattatgacttctcaatcgtccccccgctgtctaaatgaaagtgcaacaccctttcactggttatctggacaatctccaatcgaaagggtgttgcactttcatttagacagcgccccccatatccgcatgtcactgctgccatcataatgagccagtagacgcctttaagcgttctgacaaccatggaatcgaaaatcgctatgcacatcatagaacagcactgccaaggcaagaggtctgaccagtcgctcaatgaggacaggctgatcatcaccgatggtttcgcggcagtggtggatggagtgaccagcaaaagtgtgcaccaccctgccggccttgttcttggccgcgtccagcaccggcgcgaggccggcggcccattcgcgcaccgaacggccggcgagtatgtcgttgccgcccacgcacacgatcagcacatccggccggtcgttgatatcgccgatcatccggtagcgcacgcgccgggcggtcgcgccgagcttgccgaccgtacgccaggccaccggccgaccggtacgcttgcgacgcgcgcggcaagcagcggcataatgcctttcgactggtcgtccacgccacatccggccaccaatgaatcgccgaccatgacggcaagaatcggcttcacgccgttcgcgcctttccaatcggggccgatcggcgccttgatatccaccacgcgacccttggcatcgaacaaaccgaaccgtttgcccttcggctcggacgccaacttcacccggcccttggcccacataccctcaatcggagcaacggcagcatcaaatcacacgcaagattcccacgccacccaacatagtccgccctcctcgacctcgttagcggccagtagcaacccatattcgaaaactcgataaccatcgtcaattcgcatagtttgaacgttttaggcgttttggtcgctttggacgttttatactgtgatagataaaaaggaggtcaccatggcagaatccgacaaactcaccattccacgaacaatccttccatccatcaacattgacgacatgacgacattggaggcattcaccgcacgatttcttgatgagcggatcttcatcaaagatgccagcggcgtggagactcccctaccttcgcagctttgcgacgccgtcaggcagacggccatccttctcgccgaaggcaaaagtgtaatgatcagtgccaccgaacaagatctgactaccgaacaggcggcggcaatgctcggcatttcgcggcaaacactgataagactgcttgataaaggacttattcctttttcacgtccgtccaatcaccgtcgcatccggctggaagacctgcttgaatacaagcgagcctcgaaacacaccaaggattgcgccctgagccaaatgatcggcgtcggggaagacgccgaattgtacgacctgcccgagccgaccccgcaggaagccatgcatgcggtatcggaggtaaggagagtacgggccgatgctgtcggtgtttcttgatgccaatgtcatctattccatcaccttgaccgatgttctgctcaccttggccgagcatgacctttttcttcccctgtggtcgcctaacgtattacaagaagcacaggaagccgcctcccgaacactgcctgacgccgcacaacaagccttccgaaaaagactgataatgatggaccaggcattccccgaatcctccatacatgttgaggaatcggaatggagccaattcgatctgcctgacccggatgatcgtcatgtacttgcggctgcggcacagggacaagcagacgcgcggccacgcgcaatatcaaggattttccccagaaactgcttgactctttctccattcaggtcatcacgccagatgatttgctctgtgtattacttagacgaaatccggaagccacagctagcgccatacgtgagcttatcgattctcgacatcggccaccgataaacattcccgactttgctaaaagacttgaacgctctggcgcaacacagtttgcagccgctattgcgcatatacgacagcctctcggcaatcattcgtactttgaccagtaacccatgaattctggatgaattggggtgaaccggcggggctggaggcgagcgggcggcggattatggggcacaatggtgtcaaggaggccgccatggtcgatgactatactgccaaaatgactgagctgatcgaactcatgcgtctgatcggcaacgatacgcagcagtgcgaggtcaaggaatgcaagcgcaagatctcctcgaccatcaccgatacgctgtccgcgttctccaacggctccggcggctggatcatccttggcctgtccgaaaagaacgggttcacgccggtcgagggattcgacgcgcgcgccatgcaggaggcgctgagccaggcgtgcgagaagatgacgccggtggtgcggcccgtgatcgtcacctgcccgttcgaaggcgcgaatctggtgttcgcgcgcatcgacgagatgctgccgcgcgataagccctgcttcaccaccgcgctcggaccgcacggcggctcgttcatccgcaccggcgacggcgaccggcgcatgacctcctatgaggtcgaccggctcatcgaggagcatctgcagcccacatacgatctggatatcgtgcccggcgccacgaccgatgacctcgacccgcagctcgtttccggattgttggcgcgcgtgcgcgaacagcatccgcgcgtgttcgccgaccgggatggcatcgatgtgctgctggatctgcaggtgttgcgccatgatgattccgacgagtcggaggtcggcggaatactgcgtcccaccttggccggactgctggcgttgggccgctatccgcagaagttctatccgcggctcggcatttcgatagccgtgtttccggggacgagccgggacgatgtgttccggggcgacgagcgattggtcgcctcgaagtcggtggtcggttcgattccggtgatgatcgacgatgcggtcgactcgttgatgcgttggattggcgcgaagaagcccgattatccgccgctcgtgttgcgcgaggcgattgcgaacgcactcacccaccgtgattattcgcccgatgcgcgcggcacgcaggtgcatatcagcgtgttcaccgatcgcatcgagatcaccaatccgggcggtctgtatggcatggtgacacatgatgtgctggcgagtccgcatccggtgacgggcgcgccgttcgtctccacccgaaaccagttcctgttcacgctgctggagtccacgccgtatccgggcggcgggtttgtgaacccggaaggcggcgacggctaccagcgcatcgccgccgcattgcgcgaggccggcatcgagccggcgaccacgcgcaacgacatcaacacgttcacgatgaccatcaccaagcagcgcacgatggcgaacagttcgccgggtgacgtggtcaaggcgattatgaccgtactggaacggcattcggcgatgagcgtcaaggagatcatgcgcgaactgcagttgactccgctggccgccacgtccggcatgcgcgagctgatgaaggaagggcgggttgcccgagtcaagttcgccgatgacccggtgcagcggtatcggttgaaaggctgattttctcactcggccagctgcgtggtggcaggcgcggccaaggtgggacgggatcggcggaagcggccggcggccaggccaatgcagatgaacatcacgccgaacagtgcgaccaatcccagcgagccggcccagccggcgacgctcacgccgctctccgcagccgtgccgaagccgagcgcgttgtcgattgctcggcaataccaccagccaggcaggaacttggctatggtcaccatcacggcgggcatcatgtcaatcggcaatgcaactcccgacgtgaacatgatgagcaggccgaagatattggcgaatccgttggcagccgcctccgaaaacccgaattcgctgagcatgaatccacaggcgacggtcatcagcgcatatacgcaggttgcgcagaacgtcatcagc

SEQ ID NO: 161 - DNA, 2732 bp, Unknown
  R206_24m  MAG No. k141_62721
cagacatcgcagccggctgccgaaagaatcggaatcgcggcggtcagcgagcacttgccatagccacacatgtcatgcacggcggccacgcgcgggatgtacttcggatcgcggtcgtacaacgtaacgtcggacactagaaaactccaatcaatcagacggatgtcacataatcacagttgacattagtctgtagggatacggacacgctaaccggtattcatctggtgaggttccgtcgccgaattcaacagatcgctcaaactcctagcgacagaaatcttggaaataaaaccatccaccccaaaattccgttgctggttccatctgagcgacagaaatttcggaaatcatcccattcgtcctgaaattctgtcgctgacgtcacctcagtgacaggatttcaggaaattgaggatgatttcctagatttctgtcgcgaagagacgtggaagtgtctcggcgtgtcgtgagatttttgatgactattttgcccgacgtaaccgcctcatatcccaatgattccaagggtttataagggtctataggcaaccccgataacgctcagcttgcgacatgcaccttgagcgtcgtaacttcataaccaacacctcgccaaccgcccgaacacggcaggcgggtggcaaggaaaaatcctcgcgacctagcacaaccaaggagaaagacccatggccgagaacaacaagaagtaccgttttgaaaccctgcagctgcatgtgggccaggagcaggccgacccggccaccgactcccgtgcagtcccgatctacgccaccaccagctacgtcttccacaacttcgaccacgccgaggcccgtttcgggctggctgacccgggcaacatctacggccgtctgaccaacaccacccagggtgtcttcgaggaccgcatcgccgcccttgaaggtggtaccgccggtctggccgtcgcttccggcgccgccgccgtcgaatacgccgtgcgcaacatcacccagtccggcgatcatatcgtcgccgccaagaacatctacggcggtacattcaacctgctgcgccacaccctgccgcgcgacggcatcaccaccaccttcgtttccgccgagaacccgcaggagttcgaggacgccatccaggagaacaccaagctcgtctacttcgagaccttcggcaacccgaacgctgatctgccggacttcgaggccatctccgaaatcgcccacaagcacaacctgccggtgattgtggacaacaccttcgccaccccgtacctgttccgcccgctggagcacggcgccgacgtcgtggtcgagtccgccaccaagttcatcggcggccacggcaccaccctcggcggtgtgatcgtcgaaggcggcaagttcgactggaacgccgttccgggcaagttcccgaccctgaccgagccggatccctcctaccacggcctgaacttctacgaggccctcggcggagccgcctttgtgacccgcgtccgcgccattctgctgcgcgacaccggcgccaccctgtctccgttcgctgccttcctgctgctgcagggcaccgagaccctgtccctgcgcgtcgagcgccacgtccagaacgctctgaaggtcgtcgagtacctgcagaccgtgccggaagtcgagtccgtctcccatccgtccatcccgggccgtccggatcacgacctgtacgagaagtacttcccgaacggagcaggctccatcttcaccttcgatatcaagggcggaaaggatgcggctcgcgtcttcatcgacaatctgcacctgttctctctgctggccaatgtggccgacgcaaagtccctcgtcatccacccggcttccaccacgcactcccaggagaccttggaagagctcgaggaccagggcattcaccagggcaccatccgcctgtccatcggcaccgagaacatcgaggatatcctcgatgacctgaagggcggcttcgaagcccttcgcgcttccggcttggccaagtgaggtcgacaggagggttgacggcccgatgagaaggggcgcgatgctaatggggtgcatcgcgaatcatcgagccgcatggggtgccttccgcctgatcgcttgacccaaggagtagaaagctcgcactgacgtcatgcagtgcgggctttcttgcgtctgtatgcctcacactgtttgcgcagaggcatgaatagtgtgagacctgagacgacataatcctcaaggatgagggccggcgcgtggcccctagcccaattcagtctggcgcacgatggggcgcgccgttatttcttcataagttggaatcgtcatccgggcataaggtccggccaaatatggagaggcattatgaacgtgcagaacccgtccgcatcgcgcggcatcgctattcaggccgtcgacttggtcaagaactacggcactggcagcaatatggttcacgccctgcgtggcgtgaacgtgagtttcgaacgcggcaaattcaccgccatcatgggcccgtccggctccggcaaatccacgcttatgcacacgctcgccggcctcgactccgccacatccgggcatattcttttcggcggggcagacctgacccgcatggacgacaagcagctcaccttgctacgtcgccacaagatcggcttcatcttccaaagcttcaacctgttgcccatgttcaccgcagagcagaacatcctcatgccgctgactttggccggtgataag

SEQ ID NO: 162 - DNA, 5827 bp, Unknown
  R206_24m  MAG No. k141_64731
ccagccgggattgaccagcacggtcacctatccgttccaggttccattggacgcgaagatggttgccatagcattccgcgacgtcggagacgtgtattccggcaccggcggggaggacaactactcctatatagtcaccgatccgaattacatggtcaatcgataaaaaaagaattgccctaccggtcttgcacaccgatagggcgagtgaagatcccacgaccaaaagaaaggaggatgcttcgcctacctatcctagccgataggctaggcggagcatacccgaaatgttagttttccgacttgggcttgtcctcgtttttcgaggccttcccggatttgaacgcctcgatgatacggggaatgacgaagccgacacttcctgcgaagctgatgaacgctgccgggttcatgcccagagcgaagaacactacagagcatatgaacgcggcggcgggaaccagagagaatacgacagtggtgaatttgtagacccagttctccgccttgcgatcatcggcatagatttcgactatgcgtttctgactgtcgatttcggaatgcagggagtcctcggccatgcggagaatcctgtccgccgccccgggaagcgtctgctcgtatccggcgagctccttactggacggcaacgggccggacgtcacctccatatgagtcagagaggtggaaactaccggcgatccatcgccttccgaatcgaatcgcctgtcatgttccacgccttggtctgcaattcgagagatgtcatgattttcggagcctctgatttccgtgttctgcccgtcagccccgctgtcagccccgctttgaatccgcgaatcaccgcttgcttcattgatgtcctcatggctcatcagtcctccaagatcatgttgtacgttttccggtttcgattaaaggctcctatgcctcgtgcgtcttttgcgcgagtcgtttctgtcggttcaacgcagcgcggcgcagcttcatccatttctcgtccacggcgttgcgtggcttgccgtcctcgggcggcgcgtacgccggtattggcttcacgccggtttcggtcgtggtcatggtcgtctcctttccgattttggcgtaaagggattagtttaccgatttccctgttatccgtcaaacctcattaaaacacattaataccagttaaaacacgttaaaaccgaaaaaccgtgcaagtgggtgaaacaatggcgaacatcacgaaatacaggacgaccaaaggcgaaaacagataccgcgtccgctacaggaaacccgacggcacccaaaccgacaagaggggtttccgccgcaagatagacgcggagaactgggctgccgaacacgtcaccatcgccaaagccaccaacaactatgttgacccggaggacggcaaacgacgtgttggcgacctctacgagcaatggctgaaggagaaatggcccttttggaaggaaaccacgcgggtcaacgccaccgactcatggcggctctactgcgagaagcgctggtccgaccgacaggtcggcaccatcacccgcgccgaggtccaggcgtggatcagcgacatcatcgcgagcgccggcgctccatccgtgagccgcccgtaccagaccatgctcggcatctgccgcatggccgtccgggacaagctcatactcaacaacccctgtgaaaacgtcgaactccccaaactgccgaggcgcaagagccgtcgcgtgtacctgaccatatcccggctgctcgcgttcgccgacgaatgcgccagaggaaagcatctgggggcggagcggcgggcgctcgtgctgacgctgggcttctgcggattgcgctggggcgaggcggcggcgttgaaggcccgcgatctggatttcgacggggaagtgctgcatgtgcgcggcaacctcgtatatgtcggggctagatgggtcgagggcactccgaagaacagcgaggaacgcgacgtgcccatgccgcgcatcgtcatggacgcgctgaaatccatatgcgaggagcgcgaaccggacgaaagggtgttccacgacctgcgcggcggccccatcatgaagcagagcacggcgaagaccacaggctggtggcaccacgctctggtgcgcctgggctggccgaaggaggaatggcccacaccgcatgacctgcgccacaccgccgcatcgctggccgtgcacgcgggcgcgaacgtcaaagcattacagaggatgctgggccataagaacgcgagcatgacgttggacgtgtacgccgacctgttcgacagcgacctgatggatgtggcccgtatgctcgacgccgcggtgcaggtggagacggacgtgaaagaatgtgggcaaaatgtgggcaaaagcgttttggagccagtatgaaaccctcagaaacgttggaatcacgccattcccgtgaatggtggttcttcagcaagttgaaggacgcgctgagctgagagtggatgcgttcttggctcccctcagagaggggagccaagtctgttacttcagcagggagcggcacatggagcggtattcgttgacgtagccgccgccgaagaagacacagtggccggcgatggggtagagctgccagagcgtgatacgctcctgccatccggccttcaacggatgcacggactggtagccctcggtgatttcgctcagatagctcatgccgaacaggtgcagcatagccagatcctcctcgcgatgaccgccatgtgccgccgggtcgatgagcacagcctcgggctgcccggaatcggcggtccacatcacattgccgctccacagatcaccgtggatgcgcgccggcttgtcggacgcggctcggcccatcagatccggcaacgcttcaatcacgcgctcggtcagttcgacatcgcgcttatccagctcgccgcgcctcacaccaaggttgaccatcgggcgcagacgtccatcagcgaaatagctgatcgggtcggtccactcgccggtatccattttcactgggtcctgcaatggcccgaaatagcatgtgccgttatatccgtcaggcgcagacccgaaatattcggcacccacatcatgcatatgtgccagagccgcaccaaaagctcgtgccgcctgaggcgtgggggacgcgctgcccacacgttcgatatccagataatccttgccccagccgtatacctgcaccacgcgcgggccgccctgcgcatgagccgctcccaaccattcgagtcctcgaccctcgcattcgaagaatccttccggtgcgaatgccctgcttttgcgatacgtggccataatgctcccttcgtcgcttacgtactatatccactttcattgtagaagccgtggatgttaccgattcttagtgttgttctacacccccttgggtagggtgttcatcgtcataacacatcaaatacttagaaatcacgaggggttatgaattttttccaagcgatcattctcggcatcgttcaggcgctgaccgagtatctcccggtatcctccagcgcgcatatccgtattttcggcgatttgatgctgggctctgatcccggtgcggcgtttaccgccatcatccaaatcggcaccgaacttgcggtgattctgtatttccgtcacgacatcatcaatatccttactcactggttcagctgcctgttcggcaagaacggcaaggattggaaggcccgcatgggccgcggcgacaattacgccacactcggctggaacatcatcgtcggctcgattccgattatcatcctcggcttcactctgcagaacgtcatcgagacctcgttgcgcaacctgtggattacggtaaccgtgctgttggtattcggcattctgctgtggatggtggatgccaaggctcgccagaacaaaaccatgaatgatatgacgtatcgtgatgcgttcctcttcggtttgggccagtccatggcgctgattcctggtgtgtcccgctccggcggcaccatcaccgtcggtcgcgcactgggctacacgcgtgaggccgctgtacgtctgagcttcctgatggccatccccgcggtgttcggctcaggtttgctcgaagccatcaaggccgtgaagaactacaaaaccgatgcgatgttccccggctggggaccgaccctcgtagccatggtcatcagcttcgtactcggctacatcgtgatcatcggattcctgaagttcgtatcgaacttctcctataaggccttcgccatctaccgcatcggtttggctgtggtcgtcgccttgctgctgattgtgggcgtgctgccggccatcgatccctccgtggcggctgcggcataagacgggtcgatagacgactccaatataatggtgctcccgctggcgggagccgtcagcgaagctgactgggggtggtcactggaatatgccagcagaaccaccctcagtctcgctacgcgagccagctcccgacattttgtgcgacgtgcacatggtgcactgctatgaacagcccacagggctgttcatccagcgggagcacaccatatatgggctaattgcccatctggcgcagaaacgcttctgcttctttgactagttgttcggcctggggcgctcccaaggaagcctccgcctcggctttctgctgcaagtcgtagtcgtgctccaaatgctccacgtaatcgtgaagctggtcattacaacgaaccagtatcgaggcttgcgccttccactgttcggctttctgcttcagatctgccgtatcgaaggtgaagccgatatgcttgtccaacgcatccagcaatcgcatagtgccggcagaacattcgtcgctgcccaaatattgggggatggacacccacatcgaggaatgagcaaaaccttgctgcgcggcggccacatccaaaacggtaggaatgcctaccgggccgttatacgaccggtctccttcgcattgacagtctccgtcgctgacggcgatgggcaacggacgggtatgcgggcaatcggagaacatcgaacctaacgtaatgatccgattgacatccagctcatcggcaatggccagactctggctacagtattccttccaccgatagttcggttcgggggcgatctgcgcatagatatgcttgcctgcgtccaacgtgatgtcgtagaacgtggtctgcggccagataagattggtgcgtcccgcaacatggcacagcataggacgggcaacctgatagtcatagaaatcatcacatctaatatgacgaatctcgcgggactcatatcgcttgaccagatggcgcaccgcgttcgtcgccgcctgacaggcatcattccatccctcgaatgcggcgatcaatactgcgccggtgtccttcgctgcttcactcatacctctagagtaactggaattcattgcccgaagcgcacgctttagccataagcgagagtatgcaattacaggcgacacgccgcagctggacgaactacacgcatgtgagtatagtaaacactcgtgcttcggcagggagacctcgccaaggaaacacacgcggacatagcttagttggtaaagcgcaaccttgccaaggttgagaccgcgggttcgagtcccgttgtccgctctaggtccgtgagttgacagaccttacggtgggttagccaagcggttaggcagcggcctgcaaagccgtatagacgagttcgactctcgtacccacctctcagaccagcgaagcaattcaatgggatgaaatatgacccgggcggttggcgcagtggtagcgcacttccctgacacggaaggggtcacaagttcgaatcttgtatcgcccacg

SEQ ID NO: 163 - DNA, 12247 bp, Unknown
  R206_24m  MAG No. k141_65235
cgtggcggatagtggattcgaaccactgaagcacgaagcggctgatttacagtcagctccctttgaccgcttgggaaatccgccagtctgtttcccgccgcggtgtttgacctcaacaggcaacttggctatataaccacatattttccaagtacgcaaatcgacctctacgcgaaccttgttttaccgcggaattctgcggttttatcggcgtgtctcacagcgtggtttcagggtccgcttcggccctgcaaacagccccgaccaaggctgcaccccgcacttctaccaatcatttttcttatatggtgttccagaaccttgcaatggcacggttttcgagtggcgtcgcctgcttgcggcggcacagcgcatgccggcatgctgggcgcatggcttctgatcttgtacatcacggacaatcattcgacgaccagccgctcggattcggcacgctggccattcacctcggcaacggggtcgacgccgaaaccggcgcgatccgtcgccccatcacgctggcgaacacctacgcgctgtcctacgacgcctcggccttggcgattgccaagcatctcgaatcgctggatgtggtgcgtttcgtggcgtaccccggtctggaatcgcacctgcaccacgaggtggcggccagccagctggcccgcccggactccgggttcggcggcgtgctgtcgttcggcctcgacaccgaccacgacgggcacaaccgattcgtttccaagctcaatgtgattacgtctgccgtctcgctcggccatgactaatcgctgatcgtgttcctcggtgaggatgacgagcgccagtacctgtacccgcctgagttccaccgcggcttcttccgtctggccgtgggtctggaggatacggacgatttgattcgcgacatcgatcacgcgctggtggaggccggattcgaggtgtgagaccgcaccgcgcgcatgatttcggcctcttccgccctgctgccgccgtcagtgagtcacaagatggctcggtgacgacgatggcagggctttttacgtcggcacagggacaatacctggcggtctgccgacgatgacggcacttatcgtcggcagaccgccagtttttggaccgtcgccgacacaaaacgccgatttgccgtcggcaatggtccaaaaactggccctataacgacgccaacgcggctcagcatcggcacatcgccatttcgtggcccactgccgacgctggcctcatgccacggcactcagcgtcggtagagagacaaccattggcacagcgacgacaccacgaacctgcgacacggaaaaaaacaacataccgtcgacctactgccgtcttgtgcaaaatgtcttaagccgctcggccaagtcgccgactgagcctcttccatagggaccccaatccgttacccagtgtagatgcggtgcaacgccgaactcaactacgttgcgcgcatgcacctttatgcatagcaggcatggctgggcgtttggcgggagcggttttcggctcccctctctgaggggagcccctttccgcctgacaagagaaaaccccgactgttcgtgggaacagtcggggttgttgaagttcgctaggcgactaatcagccgaggatggcgagaatgtcgcgcgcgccgacgatgaggtagtcctcaccctcgtagtggacttcggtgccgccgtacttggagtacagcaccttgtcgccgaccttgacatccatcgggatgcgctcgcccttgtcgtcacgacggcccgggccaacggccaggacttcaccctgctgcggcttctccttggcgttgtccggaatatacagaccggaagcggtctgggtctgggcctcggcctgcttgacgatgatcttgtcttccaacggtgtgagcttaatcgacactgtgggtcacctcgtatctacttgtagttcgataatgccgcgccagaacgcctcaagaggctgacgatcacttgcgttgtccctttgcgctaggacacatcgtagcgcgattattagcactctgccaactcgagtgctaacgctgtgagagaaaatcggcgaatcgcaacgctcagttgccgcggcgggcaagaatggagtccaggcctgcgcccaacgaatcggtggtcgccgctggcgcttcgacgtcggcacgctcctcggattcgtggaatgcggctcgctgggcggcgtttgcagcctcgtcatcggcgtccgtagcggcgttcgtatcggcatcatcgcgctgctccgactcagtgtctacagcgtttccggcactgacagccttgcccgcatcggcggccttggcatcgtccgcggccttgacggctcgggcctcgtcaatcaacttttccgccactgcgggttcgacaggttccgccttggacacctgacgggtcgacttgatctccaagctttccggagcgttgtcggcgttatgttccccgcccaaagtgaaggagatgagatcctgcgaggtggccatatcgaagacatccagtgctcgggcagggcgtacgctggccagttccgacgtagcgtcggcagcggcatcgtcgcgctcatcacgctcgtcacgcaccgtaagcgatggttcaactcgaggggcgacggacttatccgacttagtcgacttatccgtgcgagcggaggcatcgggcgcggcggaagattcactggtttcggcagcggacttacggtcagcggattcatcgaccatagcagacggttcggcggcaggcttattggcggcggactgtgcagtatcagacttctcagactgtttggcgtgctccgccgcggcctgatatgcggcggcggactgacgcaacgccttggccttggcctgctcaatctcggcatcgcgtaacgcgcggcgaatctgccgctgttccatgacctcggtggcagcatcctcaacatgctcggaaagctccttggcaggcgcagttacggccgcaaccggttcggccttgttcacacgcttgctgtccttggactcggcagacggtttcttggaccagcccgtaccgctatgagtccgctcgtagcggaccaccttgcgctcccattgccgggcctggcgtgaggcattggctcccagcaccagcaccagcagtaacagcacgaacggaataagagcaagcagcgggctgaaatgcagggggaacgatacggcaaacaccaacacggttatggcaagcaggcatacggcgagaatctgccggcggcggatggccgcgcggcgcagttcccgcacatgggcgatgtgctcaggtgtcagcctcgctgacggtgttgatgctggcattgctgcccctttcgccttatgcggcttgatgtctccgaatcgtctgccgttctctgcatcaacgatatgcagggaaggcgaataacgatcctgccggtgctcgtccacacgtttcatgccgttggccgtacgtacgggcagccatacaacgataataatcgccacaatcaccagcacgacgacagtgctcagtgactcataacccatagagtcaaggataggagacgtaccgacgaactggggctttccgtccgggcgtgtcggagcggaattcttccggtcgacgcttatctggaaccggtggcggcgagtctggcagagaacccttgccccatatcttcagccaacagcgcaaatgttacgtggtcgcgccactggccattgacatacatataccgctcgcgcagtccctcatgatgggctccgaccttacgcactacagccaaagagcgcgcgttatccggaagaatggcgatttccagccgatgcaacgcgggcccgaatgggtctccgagtgcccaatcggcaagcatggccagtgccatcggcgcaaatccgtggccggcgtaccgttggtcaacccaatatccgaccacaccggtgcgcatggcaccatacgcgatggctcccaacgaaatctggccgacgatacgcatctggtattcgatggcgaaaatcacgccgacgccatgctgctcattacggcgctgtcgctgcacccattgattgaaggtgatggagccgccatgcatcgggtcgccggattcccaaggcgccagccagtcgttgttgcgccagcgcacttcgttccagccgtcctcatcgtccatggtcagggggcgcaggattatcgggaaaccgggatgggtgaggcgcggcggacggatctggtggtccagcttgaacgcctctttaatcgactggaaaactgacacggcctttattgtagccatatgaagggcttgcgccttcgcctcggccactttcgttttacggtggaaacactagattgtgcggtatgagcgaagcggacaatggcatgaatatcggcagcgaccacagcggcacggagaaaacagaaaagatggataaagcgacgctgcgccaccatatactgtctcggcgcaagcgcattccagcggaagaacgtggagcggccggtgaattgctggtgcgacggttcccggcacacatgattcaggatggttccacagtggcggcatatgtgtcgatgggttcggaaatcgaaacccggccactgttgcgatggctgttggctcatggctgccacgtgttggtgccacgattgggatctgggttggaaattggctggagtgtgctggattcattggaatccttgcgctcgatggatgcagtgggtggcgcgaacaatgccggtagctgcagctctcccagcaccgtccatcacagacccgatgagccaactggcgcagttctaccgcccgaagcgttggagaaggccgatctggtcatcgccccggctttggcagtggacccgcaaggcaatcgtctggggcgtggagccggctggtatgaccgggccttggctcgacgcaagcccgcgtgccccctgattgcggtgtgctggccgtgggaggtgttggacaccgatttgccggccgaaccacatgatgtgccggccgacggagtgctgacgccggggggataccggcggcttggcgaatcgggccggctgagttgaccggccggccaagatactcggcgcaagccagactgaccaaccagccacgcacactggccgatggaaccagagtggcaaaagcaggctggctagtaagaccgtaacgccaatgtgtcagggcggcgactaggatatgaacggttgcacggcatggtgttgcacgccatgcgcgagaaatatgactttgttggaggaatccgttgcctacctatcattaccgttgcaagaactgcggctatgacttcaccgaacagcagtcgttcaatgacgacccgattaccgtgtgccccaagtgctcgcaggagcaggtgcgcaaggtgtattccgccgtgccgattgagttcaagggtcacggattctaccgcaccgacaaatccggcaagtaaggtcggctccccgtttttcctctgtaaacgacggtgtcgacggcggtatgccgcggatattggcactacgggcactgtctgttgcacgggtttgaagcgttgtggataacttggcaagctagaaccacataggtcgattcagcttgcgcttacgaaaaacttcaggtcaccatggttgcatggtgaccttttcgtttattaagccgcctgcgcgcggctcattgcggcgacggcgcatggcggatgccttgcgccgactcactgctgcgttgtgcgtgggactcgcagtgttgtttgggcttgaagccgtattggccgtggtggagaccgagccgatggtggtggccgctcgcttgattcgacggggtgacattattctggccgccgacgttcagttggctgatatgccggtatctgcgataggcccatcttgggcgtgcaatattgaggatgtggtgggcaaggtggcgcaaatcgatatcgaagcagccgatcccatttccacgcatatggccagagatgcgcccgtagcaccgaccggcactacggtgattgaagtccgcttggccagtagcgtcgacgatgtattggccggcgatcaggtgagactggtttccgccgtcggttgcgaaggtgccgattgcacgctggccgagaacgccacggtgatgaatgtcgacaaaccggatacgactggcgcattgggaagcaacgaccgactggtgtcgttcgcaatgccgccggaggccgcggccaaggttatggagctgcaacaggccggagcgattatggccgttgtgcggtaggaagcggaatcggccttcggccgatgttgtgttttccgcagccatacggctgcggaaaacacaacatcagagcgcacagagtgcgcctcaactcctactcgcgctcgttgaaaacagcccagtgtggaggcagttcgccgaggatgcgtttgtcgtcgtcggattgccgttgttggtcggtctgcatgtctccgggctcgagtttgacgccgtcagcgtcaaactgctcagtgcctttcatcaccacgcgcttgtgcttgcgcggtgtgcgccgtgtagccgagtattccgccatgattattcaacctcgcggtagatctcgccgatacggctgacgatacggtcgacttccttatcggggttcacgaaggcggcgacactccagacggtcatcacattccagcccaaggaaatgagatcctgtgccgacaaacgatgacgcctgcgcgtggattgcacggacataaagttcgcgtcatcggtctgcacggccaaggcaaacggcttgtccttcaatcccaccacgagcggaatcttcacgcccttgtcgaatccataatcaacagcagcgttcagtcctcgcgcgcgcaacctgtcggcgatatcgtcgaacagcacgttgccgcctgccgcaccacgcaacggaagcaccggacggtcgtcaagctgttcggcccacgtcaacatggtcttcaggaaccgaggaccggactggtgcagtcgttcttcatccaaatcttcggaaccaaaggccgacacaatatccaagctgtggtccgccaatgccagggcatccagcaacagtccgcgaccgcctgtgctttcgagcggaccgaactgctgaagcagacgtccgtgcgtggttttcgcatagcacatcgacagaatcacgtcagtggcacgacctccggccacgtcacgcaaggaaaccagccgcacatggcgcaggaatcggcccatcgccttggatttgcctgccaacgacttcaattcggcacccaagcgtgtgcggaatgcgtcggtcaacatcacgaccacaagtcgatagctggaaggaaccacagcaaaaccggcggcacgttgtgtaatcagacgcaccacttcatcaatctccgactggctggattccaccagaccagaagacataaccggcacaccgctcgcttccacacggtggaaccgcacctcaccggcagccggctcggtggccacatcatagcgaacaggaccatatccctcggattcaaggaatgcggacaggcgcggcgcacggcgagacggggcagcatccacctcgatatgaggcaacgtgtcgatcagctgcttgacgctttcgctggttaccgtcgcgcagtgggcgatcaccaccacctgctgcacgcggccgatgatggacagcaactcgatagcgggaatgtgcgcgcacgcatcgagaatcgccacatcagccagcacacccggctcggtgagtgcggcgagcgtacccggcgaggccaccagaatcggcttggccgcggccagaatctccggatgatcacggcgaatcctgctcagcgacacactggcgcgccctgccagcacggtgtgcatctggttggcttcctgagtgcgggagaacagcatgtcgcacaggcggcgcatggattcctgcgacaccatcggtccgatggagcgcacgtgctccacatcgacctgtgcgaagcggtcggatgcggtctgcagcgcagcaccatcctggttggagatgatggcggaagaacgcacaatgtcctcgaacacggtggtccaccatgccagctgcacttcgccacgcacctgctccacgcccacccggcgagcgttgagatcggcgaccaactcgttcagaccggcagaagcgaattcctgctccagcaggcaacgctccggcaaggtgtccagtgccttgcgatcatccagcagtgctttcaggcgtgcttccaccttctcgaaatcggcggtttccagattgccaccagcgggtgtggtggaaagcacggtatccagcgcggtcatattgctgaccagcgcctcttgggtggagatgatctcgtcgagcttgctgggcagcaccggccaaccgccgtgaggcacgaactgatgccactgctccccttgcttggcgactaccttcaacgcttcgtgcaagtcctcgacctgcgcgccgacgcgcagcagatccttggcttccttgacgtggcggcggcgctcccagaatcccatcgacgtgccctcggccttgcgctggctcttcggcttggtggcctcgatcatggagctgatgtctcgctcgaaaatctctggctggaacacgtcaagcactcgtcgcagattcttcaaaaccgtaacctgacgctcccactcgcgagtggtgggaggaaccgggaatccgcaggtctgcacggtacgtgccacctgctcacgggtggcgggcaggaagcgacgcagcaaatcgtccacgcgctggtaagcggttaccgcttgttcttcagtggtgatggacgccttgtaccatgcggtgtcttccgggccgatggtgtattcgccgagctcgccggcacgttccatcttgctgatccatgtgtcaatatcgttggcgatgctcagggcacttgactcgtcaagtcgaacgtgggtggcggggtgtgtcgggagcacggagatacgggccaggttctgaatggtctcgtatgcggacacattccacttatcgttgcccccgtgcaggtcgcccagatagcgggtcaagcgcgagcgcacgcccacgagttcgtcggccagctggtcgaatcgctgggtggcgactccgggctggaatccgactgcggcaatcagctgcttatcaagcgcggcgttggcgtgttcatcggatacatccagtacctgcgccttcatctcattggcggaggccgtctggatgaacagacgcttctgctcggccacgccgggcacgtacagcacggaacgaccattcatcaggcagcgcgatgcgatggccacagcctgctccgcggtgcccttcgggaaggtgccgtcgaccacgatgctatggccattggcagcaagtgacgcggcatatcgcaccgtattgtccacatcgccgacttcgtactcggcatgcgggtctacgtcgaaaggactgtattgcggaatattggcatctttgagcgcggtgcgggcggatttgtcgccggcaagcgcgtccaacagcacattgccggtggggccattctccagctggtcgatgaactgtcggctttcgctgatcatctgcgacgaggggtccatgaagcatccgagcacaatctggcgctcgatggcgaagccggagatacgctccgatgcttcggacgaaatacgggcgaacatcgcggaagtttcgggagtgccactgtcatagctggcaccgtcaaacagggaatcctcatccaggaacaccccctgctcacgcaatgcattgacgaacgcggcgttcagggtcacgcgaccggtgaatcgaatggtggtcgacaagccatcatcctcgatcgtgacgctcaccgggtacaacagcaccggcaacgcgttgcccctccacgtggccacaccaaccacgagcgacaactccgccacgccggaaatcctgcgcttggcggcctggtcatccagtacgcgcccgatatggcgttcggcggccttaagcacacccgtgtcacggaacaacgaatccaaccgaacatggccggaagcgaacagctgggcgatgccggagggatgggcatgggtcatctccagcttcgcggccagttgattcacatcctcgagcggcgatggcggctgcatgctgcggtattggtcacgccagcgacggatgcgattcagaccttccgtgagattctggttctgagtctggctctgggtcatctctcgactcactttccaaccgcttcgcggtattcctgatagcccttgttgtgagacagggcttcgtcaatatcggcctcgccacgggcggcgagccaagaatacatgtcgtcgtacaggtacggattcatggcgaggaacgccagtaattcgggatgacgggcgacttcgaactgaacgttgaaatcttgcgtggtttttgcctcgtcagaggtcaggccatcgacttcgactgccggctcctgtgctttcagctcgcccttggccacacgctcgaacaccgagccgggctcgaagaccggagtgtgtacgcccgtggagtagatatcagacgcttcatacgcttcggagaccgactgctgggcggtttcggtttcggtcgccagctgctgatcctcgggtgcgtcggttgccggttgagcggtttcaggctgggtggttgtcggctgggcggtctcagactgagtgttttcagactgggcggcttcggactgagtgccttcagaatgctgtgcaacagcgtccaccggctgagaatcgtcggtattcggagcggactgaacgttttcggctgacttgcttgcgccagccgctgcatcggattcaacaaccgccgccgatgccactgccggctcgcttgtgctgggagagtgcttaacgacagcatgggcgatggcatctaccgggacaatgccggagattctgctgtgcttggacgcgggcgctacggtcgacgactcgggctcagtttgctgcttcggcagtaccacggagtccatggcctgctgggttttgcgttcggtctcctgctcggcatgctgggccagcgcatccgcgaacaggtcacggggtatggccggctcatcgtttttcgtcacgggctgcgtgatattcagtgagccaagttcaagttcgtcaaccttgcgtcgcacattatccgcgctgaagatggcggtcggctcgccggcccgcaaatcaagaatatcgtcgacggacatatccgccgcatccggctcctgcggtgcttcgtgaaccgcatagccaaacaaatcaggcaccttgaggtcgagcggctttgccactggatcgtcgagacgaatgaagtccgcaggcacatcaccgaactgcatgcgcatgggagacgccggcaacaggaactcgacattggccggcaagcgcaacaaatcgccattttcccgcaccacatacgatccattggtcgatccaagatcgcggaccgaggccgtaccgttgctttttaccgtgaacatggcgtgccgtttggacatcgatttggtttgatcggcgacgtcaaggcgggtgttgccatcatcggcaagggggcgtaacggcttacggccgatttccacgcactcccccggcttgacgctgatccggtcgacaccgttgatcttcaccgtccactcgctcaccgtgaccgccttcctggacacactatttgaccacactacgtgccattgtgtcatcttttaccggcttttggcggattactgggcacagaattgacaactttcgctcattgccagctttgtgattccacgccggatcgcgttctccgcctcgccctcgtcaactagtctactcagtatgcggaaaccccgcagcctgaaacacaggtgcggggttcctcgaaaagctgtgattgcggcttatgccgcacaaatcacttgagctcgacggaggcaccagcctcttccagctgagccttggccttctcggcatcttccttcttggccttctcgaggacggccttcggagcgccgtcgacgagagccttggcctcggccaggccgagggaggtgatggcgcggacagccttgatgacctggatcttcttgtcgccgacggcggagaggatgacgtcgaactcatccttctcttcctcagccggagcagcagcgccagcaacagcggcaacagcggcaaccggagcggcagcctcgacgtcgaacttctcctcgaaggccttcacgaactcggagagctcgaccagggtcatctcgccgaaggcttccagcagctcatcgttggtgtacttagccattatggcttcctttcaatcttggc

SEQ ID NO: 164 - DNA, 42385 bp, Unknown
  R206_24m  MAG No. k141_65430
aaccggaatggcgtacgccggtgcgttctcccttaccgtcacaggtggcgacatcaacgtggacgacaacagtctgcaatgttcgaacatcaccggattatcgctccgcttccgcagtatgagcggattcaagggaagcgaccagcagccggaacgaagcatgtcggttatcgccgaccatcttgagaaaaccaatgacgattggtcgactgacctgcagaccatgctcgacagccatatcgcggactaccgcagatatttcgacagggtggccatccatctcggttcagcccatgatgacgatacggaactaccgttctcggcgatccttcgctcggatgagaaaaaggaaccgcatcgtctggagatgctggcggaggcgatgttcgatttcggccgatatctgcttatctcctcgtccaggccacacacccaacctgcgaatctgcaggggatttggaaccataaggatttcccgaactggtacagcgcctacacgacgaacatcaacgtcgagatgaactattggatgaccggcccctgcgcgctcaaggagctcatcgagccgctcgtctccatgaatgaggagctgctggcaccggggcacgatgccgctgacaagattctcggctgccgaggatcggctgtcttccataatgtcgatctctggcgtagggctcttccagcaaacggcgatccgatgtggtcgttctggccgttcggccaggcatggatgtgccggaacctgttcgatgaatatctgttcaaccaggatgcatcgtacctgtcccgcatctggccaatcatgcgggacaacgcgcgattctgcatggatttcctatcggagacagagcatggactggccccgtcccctgcaacatcaccggagaactgtttcctggtgaatggagaaccggtatccgttgcgcaaagcagtgagaatgccacggccatcgtgcgtaatctgcttgatgatttgattcaggcttctcacgatttggaaaaccttgacgaagaggacagcgctctggtccgtgaagcggaatccgtccgttcccaactggctgaaacgcgattgggagctgatggaagaatccttgaatggaacgacgaattcatcgaatccgatccacagcaccgtcatctgtcccacctttacgaactgcatcctggcgcaggcatcacgtctaagactccgcgtctggaggaagccgcgaggaaatccctcgaagtgcgtggcgatgatggttccggttggagcatcgtatggcgcatgatcatgtgggcgcgtctgcgtgatgcggagcatgccaagcgaatcataggcatgttcctgcggccggtggatgcgaacgctgaaaccaatctgctgggcggaggagtgtacgacagcggattatgcgcccacccgccgttccagatcgacgggaaacttggattaccggcggccttgtcggagatgcttgtccaaagccacgatggctggattcgcgttcttccggccctgccggaggattggcatgagggaagcttccatgcgctccgcgcaagaggtggcatccaagtggatgcgacatggacggatcagacagtggaatatacgttgcgctgttcgaagcctacggagattacgctgaacgttctggggactgatatgggacgtgtcgcattgtctccggataagccattcaagggaaccatccggcgttaacgtattgcgttatatccgttactaaatgttgcggaccgtctttcctaatagaggaggacggtccgcaatctttttttgatgggaaaggagattccgccattttccacgattggtatgcgcagatgaacctgtacagtgaaagctatgcgtgtaatttctggacgattcaagggtgtggcgcttgctacgccgaaaacgggtacccggcctaccacggatcgcaccaaagaggcgattttctcgcacctcgactcatggggagtgctggatgatgcccgtgtactggacctgttcgccggtactggtgcgttgggcatcgaagcgctgagccgtggcgcgcgagaactcgtggccgtggaaagttcccggcctgcggcggcgctgattaccaagaccttgtcgcagttacagaagaatcgttcgtgggatgcctcgctcaaggcccgtgtgttcaccaaaaaggccgagcaagtggctggcggctttggtgaatcctttgacgtgatattcattgatccgccctacgcctatgagaccgctgaatgcaatcagttgttggccaatctggcggtgggcagcgccaccaacgagaacaccgtgattatgctcgaacgctcggtacgctccgacacccccaccgcccccgaaggctggcaaatcactgaaagccgcaactacggcgaaaccgccgtcttctacatcgagcccgcggatgacgactcggatatagagcgttccgacaattccgccgcgtagtgaatctcccaccgtgtggtgaattaatcggcgagccggcgcggatgggtggcggagacctcccagcccaaggccatcagggtcttgcggtcggccttatccagcgccttgcaatccagtgccgcgataaggtctggccggatctcggcggtgcgggccagcgcttcgtcgcggcgaaaacggtccaccctgccgtggtcgccggacaacagcacgtccggcaccgcaataccacgccacacggccggcttggtgtactggcgatgttcaagcagtgcgtcctcgccggtgtaggattcctcgacaatcgaatctgggttgcccatgaatccgggcatcaggcgggtgatggcctcaagcatcaccgacaccgccacttcgccaccgttcagcacatagtcgccgatcgaatattcgcgtacgtcgacgccctgggagcggtagtagtccgggatgcgcgcatcgtagccctcataccggccgcagccgaacagcagatggtcggcatggctgagctcggtggcgtcgcgttgggtaaacaacggggccgatgggttcgggaagatgagcaccggtgtgccggatagggcggaggattcagacggccgcgagaatcccagcagttcgtccaggcattcgctccacacctcgggcttcatcaccatgccggccccgccgccgactggcgtatcatccaccgaatgatgcacatcgtgggtccagtcgcgcaggttgtgcgctttgatctccaacaatcccttggcctgggctttgcccatcaggctgaggttcatcacctcaaagtattcggggaacacgctcacgatatcgatcttcatgttatccagcctaacggtagccccgcccgcattacacggccaccactacactattgcggtgatgaatacgacgatgaacctccccacccgcaaaaagcccgaagtgttgtccccggccggcaacctgaggggcctgaaaaccgcggtcgattatggtgccgacgccgtctactgcggcggcaaagccttcggcatgcgatcggcccccaaaaacctaagccttgaggactttgaggaaggctcgcgctacgcccatgaacgcggcgcccgcgtgtacgtgacctgcaacgtgctgccgcgcaacaacgagatcgaagccatgcgcgagtacgtcggccagctcaaggacaccggcgtggacgcgctgatcgtctctgacatcggcgtgatgatgatggcccgccaagtggctccgaacctggaattgcatgtctccacgcaggccggcgtcaccaattaccaagctgcgaacgccttctatgagcttggcgctcgccgtgtggtgttggcccgcgagatggacttgcaggccgtgcgtgatattcgcgccaacattcccggtgacctcgacatcgaatgcttcgtgcatggcgcgatgtgcatggcgttctccggccgttgcctgttctccaactatctgaccgggcgtgatggcaatcatggcgaatgcgcgcagccatgccgctggaagtattcgatcgtggaagagaagcgccccggccagtacttcccgatcgagcagaccgagaacggcgcctatctgttcaattcgcaggacatgaatatgctggggcacttggatgatttgattgactccggtgccaccagcctcaaaatcgaaggccgcgcgaaaagcgcctactatatcgccgccatgaccaacgcctacaaaaccgcggttaatgaatacatgattcaacgcggttttgaagacgctgatggcaatgttctgaagcctttccgtgaccgtgtgattcgcccgggcgaccccgattttggccaaggaaccgaagatcaagtgatgagcaatgccgatgccgcgttcgccggtgtggccgatgagggatatgaccgtggctctgatactgcggttgccgattcggtcaccggctcggttgccgcagaacgtgaccgcgtgacggttgctgatgccgccgactcaactgcctctggtacgtcggccggcaccgttgtcgaacccgacggcatgagctcccacgcccgctccacgcgccgcaagtccaacaccgcggtcgaacagatcgagaccgattggaagcatgcggccgttcgcccggccccgcacgtcgaactgcccgaatggctgctcgaggaaaccgacaaggtggcccaccgcgactactccaccggcttctattacccggagcacaaggtcacacagaacaccgaccgctccgcctacttccgctcatggctggtagtgggcgaagtgctgagctggagcgcggacgaaggcggacgtgtcacgctgatgagccgtaacaagatcgagcccggtcaacaggttgaattcctgctgcctgacgagagaccattggtctttaccgtgccggaaaccggcctgcgcgatgccgatggcgcgccagtacccgccatcaataatccggcgcacgtgttctcgatgccctgcccgcaccaggtgcccatcaacgccgccatccgctcgcgcaccaaaaagcccaccctcaaagccgaataacctaccactccgcccccgctgactgggggtggtcatgggaatcatgaacaccgcccgcacccaagaaagaatgccttatgcctgaatacagcgaagaaatcctcgattccaacagcatcagctctaccgataaagccggtcgccctattccggtgaccatccccatcgcactggcccccggcatcaaggtggtgtacaccacgcgactgggcggactgagcaccggcgattacggcaacctgaacctcggcggcaagtccggcgacgaacctgaggccgtgctgtcgaaccgcatcgcactcgccgaagcggtgcaagcccgcctatcgctggtctcccaagtacattccggcgtggctgtggacgtggacgactcgttcgtcatcaacacccccttcggcttcgacgtgtccggcacacacggtgagactgacactccgcgcgtcatcgaggcggacggccaggtcaccgcacaatccggcatcgccctaggcatgttcgcggccgactgcctgccggtgctgctgggcgacccggtcaccggcatcatcggtgcggcccactgcggccgtcgtggtctggagcgtggtgtgatcggcgccacggtagacctgatgaagagcaagggtgccgatccggcgaacatcgtggccacactcggcccgcgcatctgcggcgactgctatgaagtgggcgacgagatcgccgaccagttcatcaagcgcttcccgctgaccaagacgaagacccgtttcggtggtgccggcatcgacatcgccgaagccgcgatgattgacctcgccttcgccggcgtacaccaggtggtcgattcgatgccgcgcgtgcacgccgccacccagtaccttgaggaagacccggaactcgccgaactgtgccgtacggacggcgaaggcccggccgagctcgcggagcgcatcgacaacatcagccacagcatgtgcacgctcgaaaacccactgtggtactcgcaccgccgcgccgcgctcgccaacaaaacacacgaaggccgcctcctcgccctcatcgtgcgtgactaaacggagaatgcgggcacattccgtggagaagatgtgatgcagttcacggacggccagccctcaccctacggtggtgcctatgactgagagagatttcgatacccccgtcgagacgcctaccgtccagccggcccccgctcagggcgccaaaccggcacaaaccgtgccggtggtggccgtggtgctggccgccggcttcggtacgcgcttcgaccccgacaatcccaagcagcttgtctccgtgggcggcaagcccatcgtgtgctggagcattgatgcctttgaacattgcgatcgcgtcagcgacatcgtggtggtggtcaatcccaaggtgcgcggtgaagtggaaacgttggttggcgagatgggctacaccaaggtccgcgtcatcattgacggcggtgacgaacgtgtggacagtaccgccgccgcgctcgacatgctggctactgctggcattccggacgatgccaagattctgatccatgacgccgtccgtccgttcgtggaacagtccgccatcgacggttcgattgatgcgctcgaccagttcacggccgcgaccgtggcctacacctcaaccgacaccgtgctgttgaccgaggatctgggcgatttgaaagtggtcaagtcggtgccggaccgcccgaacaccttccgcgcgcagaccccgcaatccttccgcttcgcgacgattcgtcacgcttacgatctggctgccgccgacccggacttccatcccaccgacgacacgcgcgttgtggtcgattatctgcctgatgaacccgtcgccattgtctccggtgcggaaaccaacctgaagatcaccacgctggaggatattcccacagctgagcgtatcgccgaggagattctcggtcgtgatcccaaggaagaggcccgcgcccgcatgcacgccctgctggcccaagcggccggccagatgcatcgctagactggcattatgcgtgaactcaatgttgtgatctccggcttcgaccactatgacggcgtggaggtcaatcccgccgtcgaagtgcccaaggccatcgccgagcaggggttgggcgtctcctctgctccggacgatccgttggagcaggtcgccgtcaccgtccatgccgtcagcatcccggtgagcttcgccaaagcctggcccacgctgaaagagacgattgaggccaccaagcccaatatcgtcatcgccaccgggctcaagcacgcagcccgaggcgtgatgcttgaacgatgcgccaccaacctgatggacgcgatcaagccggacgcggacaacgtgaccccacgccgcgaacccatcgaccccaatggcccggccgcctattggacccgcctgccgttgcgctcgatcctgaatgatttcacggacgattcgattccggccaccctgagttcggacgcaggcacgttcgtatgtaattcgctgttctacaacttgctgaactggaccgccacccaggagcgggtgctgggcggattcgtcagcttcccgccggtcgtgccggcggattccagccagcatggtctgccactcgaccagcagatcgccgctggccgtgatgtggtgcgcgaagccgtgcgctactatctcaagccctccagctccggcatcctcatcgcctagcacgctgcgcgccacgccggaatagaacatggttcgcacgcattgtaacgattgcgcgtcactcaacgcccagcgctagtgcgatgcgctacagtgcttcaaggatgtgccaagagctttatgcgtgtgcgaaaggaataaacagcgatggtggatcgtttcccggtggtgctgcgaggatatgacaaggagaaggttgatgctgccttcgacgctactcaggagagtgtgaagcgtgcgcagcagacgttggccagcatgcgtgagcagattgcggcggatgacgaccgtattctgcaactgcaggcccagcttcaggaagagaagaacaagaagccggaaggcaacagcttcgcttccctgggggcgaacgcccagcagatgctcgcctccgccgagcagacgagtaccgaactgttggaacgcgccaagcaggacgcgtcctccatccgtaccacggctcaggctcaggccgaaacgctgatcaacaacgccaagctggatgcccagcatattgttgacgacgccaatgccaaggccgcctcgattctgacgaacgccaacaatcaggccgaatcagtgaccacctccgccaacgaggacgccgcacaactgcgctccgaaaccgccaagaccatcaccgaacagcgtcagaccgtcgagcttgagctcagcaacgcgcgcgaagagcacaccaagaagatggcttccgaacgctccacccaagagcgcgaaatcgccgatatgaaggcggaagctacccagcaggtcgccgcaatgcgcaaaagcgccaatgaggagatcaccaagcttaagtccgattccaacgatcagattgaggcggcgctcgccgaggccaacaagaagctcgccgacgtgcgcgagcaagtgtccaagatgatgaccgaagcccagcgcaaggccagcgaaatcattgatgcggccaagaccaagggtcaggaaatcactgatgaggccgaggtcaagcgcaccagcacgatgagccaggtcaacgccgaagtcgagcagatccgtcacgacatcgccgctcagcaggatgaggccacgaagaaggtcaacgaactcctgcagcacctcgaagagcgtcgtgtggcggccaagcgggaagccgatgagttggtcggccaggccaagaacactcgcgaccaagccgattcatatgccgcgtccaagcgcgaggaggcggacatccaggccgccgcaatcgtgcataaggcgggcgaggaagccgatgcgcagatcgaggagcgtcgtgccgccgcccaaagcgagcttgacggtctgtccaagcgcatcgccgatctgcaggaacgcgagtccgtcatcacccagcgtgtttcggaactgcgttctatgttctcgcaggcgttctccggattcgctttcggtggtaatgcggcggcctctggtcagagtcaggaagccgctgccgtggcgtcattgccggtggtcgcgcccgtcccggaagtcaagcctgtacacaacgaggccgatgatcagccgggtgagttgagcggaaacgagtcggctgccgacgatcacaatgagacagatgcggcaccggctgattcggctgattcagctgcgcagaatgagcagtccgaatcgtctgagccgtccgagcaccagacacagggcgaaccggaggccccgactcaggagaatccagccgtatctgagcagaacggcgaatgacaggccttcgattagactactagcggtaagaattacggcacctgcgctttcgagccaggtgccgtattcgtttggatctgcgccacaagcgcaccatcacagaaggagtatgacatgagtgaattgacgcctctgaccggcgaagcattgaataccctgcgcggcgatttcgcacagagcggcaccaaccgtctggccatgaacgcggtgaccgccgccggcatcgacaaggtggctcgcaattatgaccgcgctcgtctgatgcagcgccgtttctccaccatcgttgacaatggcgaagccacccatcaggatcgctccggccgctgctggctgttcagctccctgaacgtggcccgtttcgtggccaagaagaacatgaacttgaaggagttcgagttctcccagaactacgcgatgtactacgacaagctggagcgcgtcaactacttccttaaggatgtggccgctctggtggctgccggagagccttccgactcccgcctgatgcagcacctgctcgccgacgtgatgggcgatggcggccagtggaccatggccatgaacgtgtacaagaagtacggcgctgtgcccaaggacctgttcccggagaccgaatcctccaagaacaccggtgaaatgaacacccagctgcgccacatgctgcacaccgccgtggcgcacatgtacgccgctgacggcgatgcctccaaggtcgaggcgattattgccgacgccactgctgccggccaccgtattctgaccatccacctgggcgagccgccggtctccttcgactgggaatggaccgacaaggatggcgaattccaccgcgacggcgagattacgccggttgagttctggaagaagtacgtgggtccggctggtcttgaggactacgtgtgcctggtggatgatccgcgcaccgagcacgccaagggcaagaagatcggcatcgagcacctcggcaatgtggctggcggcgacgccaccgagtacctcaacgtgccaaaccagttcatgaaggactgtgtcaagcagattctcgttgatcagggcatccaggtatggttcggtgccgactgccacccgttcatggaccgtgagaacggcgcttgggccaccgacctgttcgagtacggccgcgtgtacgacgtggacttcgatttggacaaggaagcccgcgtgcgcttcggtgactccgccatgaaccacgccatggctttcgccggcgttgacgtggccgacgacggcaccacccgccgctggcgagtggagaactcttggggcaccaagatcgccgacaagggctacttcaccatgtccgacgactggttcaccgaatacgtctacgaggtagccgtcccgaaggccctgttgccggaggaataccagaaggccctcgaagagccagccaccatgctccccgcatgggacccgatgggcgccttggcctgacttcgccagcctcccggaatcggcctgacggccgatgctgtgttttttcgcagcctgccggctgctagggtctctccctctgtcagcgcgaagccgctgacggggggagaggccgcggtcgcaggccgcacaacaacacagcatcgccgcaggcgagtccacgcaggcgagttcacccaaagtccataaccgccggcccaacaagcagtccccgtaacagactgctatagttgggcttttgcgtctatagcgccataccgacggtacgtatacaaggaaaggagtcgagcaatggcagcactacgtggtccggatagttccgaggatgaacgtcgtttgggggagcaggccgtctttcccgagaccgtcgatgtcaacattcgtcagcttgaccccattcccgcgccgcgtgccttcctcagggagcagccgctcaccgatgagatgagcgagctcgtgctccactcgcggcaggaaatccgcgacgtgctcaacggccgcgacgaccgactgctcgtcatcgtgggcccctgctcaatccacgacccgaaggccgcgcacgagtacgcagaaaagctggctgccgtcaagcgcgagctggaagaccgactcgtgatcgtgatgcgcgtgtacttcgagaagccacgcaccaccatcggctggaaaggcctcatcaacgaccccgatctggacggtcgcttcaatattcgtaagggcatgtggctggcccgcaaggtgctcaccgacgtgctgagcctcggcctgcccgccgccaccgaatggcttgaccccatcaccccgcagtacatctgcgacgcgatcagctggggtgccatcggcgcgcgtaacaccgaatcccaagtccaccgcgaactggccagtggcctgtccatgccggtgggcttcaagaactccaccgacggctccatcaaggccgccgccgattcctgcttcgcggccggcttcgagcatcacttcctgtccattaacttggacggtcgcgtgatttccgccgaaaccaaaggcaacccggattgccatctggttctgcgcggttccagccacggcccgaactacgatgccgaatccgtgcgtcaagctctggaagacctcaaggtttccaaagcgtccggcccgagccagcatggcctcgtcatcgatgccgcccacggcaactgcggcaaagacgaaaaccgtgaagccgaagtcatcgaagagatcgctgagcgtctggcgcacggcgaacaaggcatcaccggcgtaatgatggaaagcttcctggtcggcggtcaccagaagccggccccgctcgaccagttggtctacggtcagtccgtcaccgactcttgcgtgccgtgggaacgcaccaacgagctgctgcacaccctagccgacgccgtcaccgctcgcagctcggctaaatagctttgtctttgtaaaaatgctcactgagacccactcagtgagcattttttgccaataacggtggtcatgtcagtttgttcccgtgacaccttatccttgggaaagatactgatccaaggagagatgttatgcagcagcaggaggaagcagcacattcgctgcatccgttgcaagtcggtccgcagccgttgaacaccccggaagagcttcgcgccattcgtcaggcgatgggggaggggaagaacccgctcgttgccactgatgtgccgcgctgggaagatcaggtgggtgtcagtcgcatcatcaaccgccgcgtattggagctggagccgctgcccacgcccgcgcaagtgctcgctgaactcccgctgaccgatcaggctcaggaaatcgtcgcctactcgcgtgatgagattcgcgcgtgcctgtacggccaagacgacaggttgttggtcatcgtcggcccctgttcggttcatgacccgaaggccgcgctggactacgcgcaccgattggccaagctgaaagacgagctcggcgagcagctgctcatcgtcatgcgcgtgtacttcgagaagccgcgcaccaccatcggctggaagggcctgatcaacgacccggatattgatggcagccacaatattcgcaaaggcctgttgcttgcccgcaaaaccttgcttggtgtgctgaaggaaggattggcggccgccacggaatttctggagcccaccagtccgcagttcatctcggacgcggtgagttggggcgccattggtgcgcgcaacacggaaagccagatccaccgccaattggccagcgggctttccatgccggtcggcttcaagaacgccactgacggttcggtgaaggcggcggtcaacggttgcttcgccgctgctcagcagcacacgttcttcggcattgaccatctggggcgtgcctgcgcggtcgagacccttggcaacccggactgccatgtggtgttgcgcggctcgattcacggcccgaactacgatgccgaatccgtggccaaagccatggaagacgtacgcgccgaaatgcccgctgaatccgccgcttcgcgtggtctgattgttgattgctcgcacggtaactccggcaaggacgaacatcgtcaggccgaagtcgtgcgcaatattgccagcagaattgcagctggcgaacagggtattaccggcatcatgatggaaagctttattgaaggaggcaatcagaaggccgcgccgcttgatcagctggtctatggcaagtcgattaccgacaagtgcatcagctgggaagaaaccgaggccttgctgcgcgagcttgcggaagccgtggccacgcggcgttggcactgagttgcgtcatcggctctctcgcaggagcaatgcaacgaaacgtctctacccctcagcctgccattcggcggccacctcccctgacatgggagtcgaaagtgttgtgaaaggaacttacgtatgggtatgaaaactgtagctattattggcgcattggatgaagaagtggcactgatcgccaaatcgctcacgcatgtgacgcacaccgccaagggcagccttgacatcgtgtccggcacggtcgactccttcggttctgacgtcatcaaggttgccgcaacggtaggcggcatgggactggtcaatgcggccgccaccacgcagctgctgattgacgagttcgccccggacgccgtgattttcagcggcatcgccggcaacctcaacacccacctgcacatcaacgacgtggtgctcggcggcaccctgcgctacctcgacactgacatgcggctcgtaggccagtggaagcccggcactgcggacgctccggtggaggaattccactctgatgaccgtctgctggaagttgccgacgaggcgcttgccaatgcgggcattacccacatcaccggcatcatcgcctccggcaactacttcgtggacacgccccaaaaggtcgaggaggtcatccgactcaccggggctgacgccgtggagatggaaggcgccgccgtggcacaggtcgccgcccgcaatgacgtgccggcactggtgattcgtgccctttccgacaacgccgacaccgattacgaggtattcaaggagttcgacatctccgagtacgccgataccgccgcccgtctggctgtcgacatcgtcaagcgcctgtagtcggcgggctggcccatctcaccatccacgttttgggtatgatgaccacaatatgagcgttttcaaactattgcttataacctgagccatactcggtgttcggcacagcgatgtgcggggttcatcgctggggccacaagccgtaccagttcttctcccgcatgccggtcgctgtgctcaattcgttaagcgacgacaacaccgtcgcgaagcattgaatacacaatgcgcacgctgcactgggtttatctgcagcatgaggagagaaaaaatgactgcaagcacaaccgcggctgtgaccaaaccggtgaagaaggattcggttcctgagatcatcgccgcttccatggtcggtacggccatcgaattctacgataactactgctattccattgccgctgctagctacttcggcatgatcttcttcacggacgtcgccaagtccaaccagaccctcgccacgctgatggccttcgtgaccttcgccgtttcgttcctcgcccgtccgttcggctccatgctgttcggccacttcggtgacaagctcggccgtaagaagacgctggttatcgccctgatgaccatgggtatcgccaccttcctggtcggctgcctgcccggttatgagcagattggcgcatggtccgtcgtgattctgtgcatctgccgtgcctgccagggcgtgggcctcgccggcgaatggtccggtgccgcgctggtcgccactgaaaacgctccggccgacaagcgcgccctgtacggttccttcccgaaccttggcgccccgattggcttcttctgcgcttacggcctgaacctgctactcgaatccaacctgagcaaggaacagatgattgccttcggctggcgtatcccgttcctgtgctccgccgtgctggtgatcattggcctgtacgtgcgtgcccgcatgtctgagaccccagtgttccagaaggccactgaagagaagcgcacctccaagcacccgctgcgcgacctgctgccgtactggaaggaagtcgtgctcggcaccgtagccatgggtatcacctataccctgttctacgtactcggcacttggtcgctggcctacggcgtcaagggcttgggcttccagcagggcgagtacctgctcatgcagatgtgctccgtggtgttcttcgccatcttcatcgtggtctcctgcgtgtacgccgacaaggtgggccgcaagaaggtcatgattgccgtgaccgccgccgccttggtgttcagcttcttcgtgccgatgctgctcgtgcactccgccgcccatatcatgatcttcctgtgtgtcggcttcatgatcatgggtggtttgttcggcccctgcggcgcctacctgcctgagctgttcccggtgcacgtgcgttactccggcgccggcctgagctacaacctcgccgccatcttcggtggcgcattcgctccgaccatcgcccaggccctggtcgcctccaagttcggcgttgccggtgtgggctggtacatggccatcatggccgccctcgctctgctcgctctgttcctgattaaggaaagcaaggacaaggactacgagctgtaaatagagctccccatattatgctcccgctggcgggagctgtccacgaaagcggactgagggtggccaatgggatttcggttctttgaccaccctcagtctcactgcgttcgacagctcccgccagcgggagcattttgttatgtcgtcccaccaaaaatgaacaatagacgaacttacgtagtttgggcatctcactacgccttgcacgttttactctggaaatcatggatatctggcagatcgtcgtgattgtggtgctcgccgcgctgatactggcgtgggttgccgtcatcgcctacaacaaaggccgcgtttcaggtcggctcgccgccgaacaggacctgtccggcgacgaggatacgcgttctctattcggtgatgatgcgcccgtgcgccccaccgagcgtcgcctgattgaagtcctgcccgaagccctgattgttaccgaccgcaacggcttggtccaatattcaagccccggctcagtgccattcggcctggtctccggcgaccgactcaactcgcgcgaagtcgaggacatcctcactcaggccgccgccgacggtggcgtgcgtgagcgtgaggttcagctgccggtcaatcgcaattcctatccgtcctctaatggccgaggactggaggccggccagtcacgcccgtccaacatgctgtatttgcgtgtgcgcattggcgatatcggcgatgacctgtacgccatcttcatcaacgacatgtccgagcagcgccgtttcgaggccgttcgccgggactttgtgaccaacgtttcgcacgaactcaagactccggccggtgccatctcgctactggccgaaaccgtgaccgacgccgccgatgatccggacgccgtacggtatttttccggccgtatctccaaggaatccgcgcgcctgaccgaactggtgcatcatcttatcgacttgcagaaagcccaaagcccgcaaagcgtgatcgatgcgcggcgcatttccgcgctggatgtggcacgcgccgccatcgccgccaatcagacccaagccgactcccgccatgtggatatccgactgagtgtcaacggacagtcagtacccacgaaggtcgaggagccggccgatggcgaaggttccttggaagaatcaggcagcccagccacgaacggtccgatgatcaaggccgacaaagaggccatgcaaaccgccgtcaagaacctcgtagagaacgccatccattactcgcccgaacacaccactgtggcggtcggcgtgggggagcgcgatggcaaagtcaccattcgcgtggtcgatcagggcatcggcatccccgccaaatcgctggaccgcattttcgagcgattctaccgggtcgacccggcccgttcgcgcgagaccggcggttcgggactcggcttggccatcaccaagcactgcgtgcaggagaacggcggtcggatttcggtctggtcgcgtacgggggaggggtcgacgttcaccatcgagctgccggccgccccggatgaggatgacgacgaggtccggccggacgagtcgacacaagcgtagggccttggttggtgcccgatatggtgccattccattgccacacaatcacacagtgggcgaggtgcgcacaccgcgcgtagcccaattacgcaattacgtactttcgggaaacagcaggctaacggagaacaaatggttacgataatgtcggaaaactttgcgcctatgcgcacgggaacatacccaagaaaggctactatgacacgcattcttatcgtcgaagacgaggaatcctatcgcgagccgctggtataccagctcacacgcgaggggtacgacgtgtccgccgccgccactggcgaggaaggtctggaactgttcaccaagggcggcatcgatttggtgctgcttgatttgatgctgccgggcattgacggcactgcactgtgccgccgcattcgtgagcagagccgtgtgccgattattatgctcaccgccaagagcgccgaaatcgataaggtcgttggccttgagattggtgcggacgattatgtgaccaagccgtactctttccgtgagctgctggcacgtattcgtgccgtgatgcgtcgcaatcaggccactgcccaggcttccggcactgtggatgacgatattccgctggtgtgtggcgatatcgccatgcaggttggccagcatcaggtcaccgtacgcggcgaagccgtgttcttcccgctcaaggaattcgaactgctcgaatacctcatgcagaacaagggccgtgtgatgacgcgtcaccagctgatcgaccgcatctggggttcggattatgtgggcgacaccaagacgctcgacgtgcatgtcaagcgcgtgcgctccaagatcgaggaagatccggcgcaccccaagtatctgactaccgtgcgcggtctcggatacaagatcgatactcccgcggagtaaatggaaggcggccttcgggtcgccttttttgttgtggattgtgggctcgctgtggactcgccgcaggcgagcccgctccaaaaactacgtagcctcaacgtagcccacaaacatccaagtgttcatcttctgtttactgatttcggttttgggcccttgaaaccaccaatacgcttgtagttgtcatgaattgaccgggcagcgctgagccgcccgcgaatagttgatagagggattaagtaataatcatgcagaagaacatcctcgttcgctccattgccgctctgtccggcattgtgatgctcgcttccgtggccgcctgcggcgataacaccgccaccacgaccgacaacagctcctcctccgattccacttccaagtccaccccgatctccggcaacttctcgggcgccggcgcctcctctcagcaggccgctgttgaagcttggatcgccggcttccagggcaccaaccctgaggccaagatcgcctacaacccgtccggttccggcgctggcgtgcagaccttcctgaccggtgccaccgcttgggccggctccgacaaggcccttgccgatgacgaagttgagcagtccaagtccgtgtgcactgaaggcaccgccttcgatgtcccggtctacatctccccgatcgccgtggttttcaacctcaagggcgtttccgatgccggcaagcacatcaacatggacgctgccaccatcgccaagatcttcgacggcaagatcaccaagtggaacgatccggccatcgccgatcagaacaaggacctgaagctgcccgacaccgccatcaccgtggtgcaccgctccgataagtccggcaccacccagaacttcgtctcctacttcaaggacgtcacccctgacaactggacctacgacctctccgagaactggccgaacgaggttggccagggtgccaagggcacttccggcgtgatctccaccgtcaagcaggccgacggcaccatcggctacgctgacttctctcaggtcggcgacctgggcaccgtggccgtcaaggtcggcgacaagtacaacgagatttccgccgaggccggctccaaggtcattggggattccaagcaggacgacaccgttaagggtgacaaccgcatcgtcatcaagatcaaccacgccaccgaggccgagggtgcctacccgatcgtcttggtctcctacgacatcgtctgcccggcctacaaggacaccaagcaggctgagttcgccaaggcttggctgacctacgtgacctccgacgagggccagaaggccgctcaggatgccgccggcaccgctccgctgccctcctccctgaagtctaagatcaccaagtccatcgaggccatcaagaccaagtgatgacgtcggcccgcaagggtcgtgtggactggacctgacaactgaacgatagactgtagtagtaagagcagtcgccgccaactttaagccgcagtcgtaaaccatacggctgcggcttaaagcgggtcaggacccgaacggtttggcaaagtcacagacgaaaaccgcaccacttgaatacttgataaccaccctatataaggagaatccgtgagttcgcaagacaaaacggctgtgcagccagttggaggcaagaccgccgacaaggtgtttcgcggtgtggcatacgcctgcggcatcctgatcctggttgtacttgccgctgtgttcctgttcctgtttttccgcgcctggccactcatcggtggcgatcaggccgccaacagcgacaccgtgtccagctttaccggcggcaaggccagcagcttctggggctacgtgctcccgctgttgttcggtactgtgctcgtgtctttgctggcactgctgattgccttcttcgtgtccatcggcattgcgctgttcatttcgcactatgcacctaagaagctcgccaccgcgctgagctatgtggtcgatctgctggctgccatcccgtccgttatctacggtttgtggggcggcctgattctggtgccggccatctacccgttctggaactgggttgccaaccacctgggcttcattccactgttcgagggcccggccgccaacccgtcgcgcaccgtcgccaccgtggctgtggtgctcgccgttatgattttgccgattatcacctccatgtcccgcgatatcttcatgcagaccccgcgcctgcacgaagaggccgcgctggcgctcggcgccaccaagtgggagatgattcgtctggccgtgctgcctttcggcaagtccggtattgtgtccgcctccatgctggctctcggccgcgcgcttggtgagacgatggccgtgttgatgatcctgtccccgggcctcaactactccatcaagctgctgcaggcctcgcagaaccagaccatcgccgcgaatattgccgcacagtaccctgaagccaacgatctgggcgtctccacgctgattggaaccggtctgattctgttcctgatcacgttcgtggtcaacttcatcgcccgtaagcttaccgagaaagcgactgcgtgatgactgctgctgagaacactgaaaagactccgatggacggcacgcccgaaatcgacttcgatcgtttccgcccgacccgttccgccatccagcgccgtaatatcatggaccgcttcatgtgggccctgatcgcggtggcgtttgtgatcgcctgcatcccgctgatctccctgctgtggaccactatcgtcaacggcatcaagcgcctgaacctgaacttcctgagctacaacatgaccggtgtggtcggtggtagccagaccccgtccggtggttacggcggtgtgctgcacgccatcatcggtactctcgaaatcaccgctggcgctatggttatctccattccgatcggtttgatgtgcgccgtgtacctggtcgaatactcgaaccgcggcaagctcgccaccacgatctccctgctcgtcgacgtgatgagcggcatcccgtccatcgtggccggcctgttcgccttctcgatgttcacgattctgctgggccccggtaccatcaacggtttcgaaggctccgtggctctctccctgctgatgctgcccaccgtggtcaagtccagcgaggaaatgctgaagatcgtgccgaacgatttgcgtgaggcctccttggctctgggcgttaccaagcagcgcacgattaccaagatcgtgctgcgcaccgctctgccgggcatcgtctccggtgccattctggccatcgcccgcgtgattggtgagaccgcaccgttgctgatgaccgccggctacatctccagcaccaacgtgaacctgttctccggccagatgaccaccctgccggtgttcgtctaccaggagtactcgaagctcagcgcgaactgcccgcccaacgccgacgccacctgcgtgaccacgattccgatggaacgtgcgtgggctgcggctctcgtgctgatcgtcatcgtgctgctgctgaacctcattggccgaatcgtggcgaaggtcttcgccgtcaagaccgagcgctaagccagtcgctaagcctaagccttaagaacacaaggaaatataaggaaacatcatgggacaacgtattgacgtcaaccacgagaacatctattacggcgactttctggccgtggaagatgtgaacatcaacatcgagccgaacaaggtcaccgccttcatcggcccgtccggctgcggcaagtccaccgtgctgcgcaccttggaccgtatgcacgagatcatccccggcgctcacgtcgagggcgaggtgctgctcgaaggcaagaacctgtacgacaaggacgtggatccggtggccgtgcgccgcgacgtcggcatggtcttccagcgcccgaacccgttcccgaccatgtccatccgtgagaacgtgctggccggtgtgcgcctgaacaaccaccacctggccaagtccgacgccgacgatctggtcgagtgggctctgcgcggtgccaacctctgggaagaggtcaaggaccgtcttgacaaccctggcatcggcttgtccggtggccagcagcagcgtctgtgcatcgcccgcgccgtggccgtccacccgcaggtgctgctcatggatgagccctgctccgccttggacccgatttcgaccttggctgtcgaggatctgatcaacgagctcaagagcgactacaccatcgtgatcgtgacccacaacatgcagcaggccgcccgtatcgccgactacaccgccttcttcaacctgaaggcagtgggccagcccggtcacctcgagtacttcgcggacaccatcacgatgttcaacaacccgcaaaacgaagaagccgagcgctacatctccggtcgcttcggctgatcgtttcctgcgcgcagcgtaatgatttgtgcgtaggagaaacggcaaagcccgccgcaaggcgggctttcgcatattgagggcgagtattgccgagtattaccgttctcgcaacggagcgagctggaatacttcgtcggactgggcggcgacttcccgcttcggtcgatcgacgggagaacggcgggtaaagcggtacaagacaagtccgcacgatgaatactctgtgatgaatcttctgtttacggtgcgagtgtggaagaatggtcacagcaaggtccagcaaaggagcataggtgagtactggtctgatcgtcggcattgtcgttgtcgttattatcgttgtcttgattggttggggcgtcagcgcctataacaacctggtgacgctgaagaaccgtgtgaagaacggttgggcgcaaatcgacgtgcagttgaagcagcgcgccgacctcatcccgaacctggtgaataccgtcaaggggtacgcatcccacgagtctgaagtcttcactcaggtgaccgccgcccgcgccggcgtagtggctgcggccagcaacccgagcacgaccactgctcagcgcgccgccgccgaaaaccagctgtcccgcgccctgttcaacctgcaagccacggctgaggcatatccgcagctgcaagccaaccagaacttcatggatctgcagaaccagctcaaggaactggagaacaagatcgcctacgcccgtcagttctacaacgacgtggtcctgaagctcaacaccgccatcgaaaccgtgccgacgaacatcatcgccggtctgttccactttgagcaggcgcaatacttcgaggccgatgacgcttcccgtcaggtgccacaggtccagttctgacccgcttcaggcccgtccggtaagccgccggccgggcccgtattgtcttaagagagggaagatatgcggatacgattcattcgcgccggaatcatcagcattgttgccacggtggtgttggcagttatcaccttggcgataatcgggacttccgcgttcggcgattcggccgacctcagctaccgcacgctggactatgacgtgaccgccaccgcgaacggtgatttgaaggtcacgcagcatatcgacgtcaagatgcgtgagcgtaccgacagtgacgacaacaccaagccgtggaagcagctgttccagcaatacacgctgaactccggcaccttgactgatatcagcgatatcagcgtgcgcaacgtcaccgacggcatcgactacgcacaacagagcgagcccaagctgcccagtgacgtctcttccgacaaggaatggaacagcgactacgccaaccattggtatgtcgccgatgtgagcgatggcagcgaccatccaaaggcatacacgcccggtaccgatggtctcaagcccagcgcctccgccaccgaagatgacacaaccgtggagatcggctggaatattccggtcaccaccgaggccgacagcatgaagttcgatgtaagcttcaccatgcacgatgtggccaccaaatggaaagacgtggcctccttccaatgggagccgttcggcaagaagaaccaagtgcctatcggcacggtcaccggcaccgtccatttccccaacggcatcaccggcaaaacctcatggacatggctgcacaccgagcgcacctcggaaaccaagcgcaacagcgacggcagctacacgttcacggcctacaacatccacaatggcgactacctcgatgtggtcgcggcgttcgatgccgccaaagccaagggcatcgcccgcaagggaaccggcaatcatctcaaggacctgaaacaggacgaatataagcaacagcagcgctggctcgacaagcaacgattcgctgccagagctcgtctcgtgttctggattgtcagcatcgtgctcggcatcgcgttgtgcgcgtggggtatctgggctgtgatctccagcaaccggcgtgcgcaatacagtggcagcgtcgaatactggcgcgaccagcccggcatcagtccggcttccgcagcccgtctgattcgcgtggtcgatccgtcgacgcgccaatccgatgaagaccgccagctgaccgccaccatgctgtcgctcgccgtcaagaaggccatcgccatttatccggggccgtcggacatgtatcgcggcatcgacatgagccaggccacgccggtgggcttgagccaaatgattgccgccgaccaaggcaagcagtatgcggcaggcatcaccagcaccatcgtgattctgccgctcgccattgatgaggcacccaacgcgcaacagttgggattgagcgaatcggaagatgcgctgctgaacctgctcatcgtcatttctcagcgcgtgggcagcccggtattcgacctgaaccagatgaaggcgacctgccagaactggcaagacggctatattgagctcggcaaattcaccggtgcatgcagcatggaataccagcggctgggtgccacgcgctctgtgggctggcaatggatcctacccggcgtattggccgccgtgctgggatttggttcgctgctggccaacagctttatcggatacccggtggctggtcttatcgggctgccgatattcctggtcggactgttctgctcgatggccggcgcgatgaccgtgctcactgatcaagggcaggatatcgccggccggactctgggccttaagcgttatatggaagacttctccaacttcaccgaccggggtaccgccgatttggccttgtgggattggtatatggtctacgccgccgcgtttggcatttccgatcgcgtgatgcgtgaactggccaaagcatatcctcaggtcaacgacccggcttggctggatgccaacgcctccaactcgttgttctactggaactaccgcccgtatggctggtacagccaccgtcataatggtccattcgactacgatgctgccgggcagatggacctaggcgttggcggcccagctccggcttacggaggcacgtcgtttgccggcggattctccgacctcggctcgcagctgaactccggtctggcggacatcagctcgaccatcagcgcggcagcaccatccgccgattccggtggcgatttctccagcttcggttcgggcggcggctccggtttcggcggctcgttcggtggctcaggtggcggctcgttcggcgggcggtagcgcatgcctatgtcgaaacgcattgttcgtgccctgggcttaagccttgtcggtgcgctgattcttgccgcactctgtgccggtgccttgattctcggcacagatggtgccgacctgagctaccgcacgcttgattacgatgtgaccgccaccgccgacggcgatcttaaagcacggagcatatcgatatcaagttgcgcaaacgcaaggatgacgatggcaagaccaaaccgtggagatcggctggaatattcccaccaccgtaaaaaccaacagcatcaagttcacggtgagcttcaccatgcatgacgtggccaccaagtggaaggacgtggcgaccttccaatgggagccattcggtgagaacaatcaggtgccgattggtacggtcaccggcacggtgcatttccccaaaggtgtgaccgcgagcaactcgtggacttggctgcacactgaacaaacctcggaaaccggccgaaccaaggatggcagcttcaccttcaccgtaaatgatgtgaaaagcggcgagtacctagacgtggtggccgctttcgacgcggccaaggcgggagatatggctcgtgtcgagaccgacgatcatctgcaggagttgaaggaagacgaagccgacgacgaacggttctggcgcaatctggaacgccaacgcgccacaaggcgcctgaacaactggatgaccaccatatcggccggcctgatattcgggattattggtgttgttgcagccttacgctcctccggacgttcacgttaccgtggctccatcgaatattggcgcgatcgccccgagctgagccccgcatcggcggccaaactcatcgatatcgtgacttccggcgacaaacccgacatttccgagcgccaactcgtcgcgaccttgctttctctggccgtgaagaaagtcattgctgtgttccccggttcggcggacctgtatatcggcgtggatctgaaacaagtttctccggtggagctcagtcagcgaatcgggtccgatccatacaagcgcaataatgcgcgtaccaatagcacgattgtgatgctgtggcagtccgattacggcgtatctgagggatttgatgaatcagtattcgtcgaatccgtatttgatggatctggatctggcggatctggatctgccgcatctagcgtgtccgatgcacaccagcccgatctcagtgcttctgagcgggcattgctctatctgctcaccgtgatttccgagcgcgtaggtcgtacggcatttgacatggatgacatcaaagacgcctgcaaggattggaaagacggctacaaggaactcgaaaagttcaccaatgcgtgcaagaccgaattcgcggcggcggatatcgcgccgaaaaccgagaacggatggctcattcccggggcaatcaccgtgctgatcggtggcgccagcatattcatcaacggtttggccggatatctggtggccggggccctcatcggcattcccctgatgacggtcggcatattctgcttcctgatggggaattcctacgtgctgaccgatcatggtcagcagatggccgggcaatgcttgggtctcaaacgatatatgcaaggcttctcgaacttcaagtaccgtggagtcgcggatttgacgctgtgggattggtatatggtctacgctgctgcatttggcatatccgaccgggtgatgcgggagctggccatggcctatccgcaagtatccgatccggaatggcttgatgccaatgcctccgacacggtgttctattggaattatcgtccgtacgactggtatgggttgcgtttctacaatggctcggcgttcgcggattccgtggctgacagcggattggccggagcggtgccagcgttcgggggcacgtcgttcgcggctgggttctctgacctcggcacgcaattgtcgtacggatttgcggatatcaccgcgacaatcaatgcggcctcgccatccggtggctcaggcggctttggcggtagcagcggcggttccggcggcggttcgttcggtggacggtaagcgatgtgcttctgaaagtccctatagctctgaaagtaaaaggcccggtgtcataagacatcgggcctttctctcaaaatcgaggtgaggagacctcaacagtcaggtccaacggggcgaaagtctgtggcgccgccgagaagattgcctcgaagctagcgtgacctttctgctacaacacagcataccagcctccaccgaagctcaccagtacactgggctgaccaaaccaaggtctactagcgtgccactttggcgcggtgtcgttgtgtcaaccggcataatgatgtctcaaaattcaagaggaggttctcatggtaggcaacgaccatgacaaccgtccgagacaagaccggcaataccgggaaggtctgatgaccggcctgttgatcgccctggccaatcaagttggacaggggcggtcgacggccatcatcattgccgcactggtattgctgggaatgagtctcagacgaggccactgatctatcagcggaacagccggaatccatggggttccggctcctcgttttcgctgaactgggtatgagtaagttgcgttttctattccgtgaagttgcggaaatttcatagattgattgtgcggacaggccgagagtgtgaaatccaacgggatgcttaggcttgattgtggatatcgagtttccataagtttcacgaagggaatcaccatggcattgttccgtaacctcggaccgttctccaccaccgccatcggccacggcgaaatgccgctgaccatcgaaaacaaccgcggccatgaggtcggcatcgaaaccctgcatgcctcgctggacgccggctgccgccacatcgacaccgcttgggcctactactgctccggcggcgaggagcagaccggtgaaaagctggtgcgcgaggcccttgagacctggaaggggccgaaggacgaggtgctggtggccaccaaggtgggccacttccgcaacttcaccgacggccgccccacgtgggatgtggacggtcgcccggagaacctgattcggcgcggcaaggagagcgcactggcgctcggcgtggacaccatcgacctgctgtacttccaccgcccggacccgaaggtgccgtacaacgagtccgtcgaagccatcaagcagctggtggacgagggcgtggcgcaggaggccggtatctccaacgcctccatcgagcaaatcgacattgcgcgcggcattctgggcgacaagctcgtggccgtgcagaaccagtactcgccgattcacctggagacccaggacacgctcgactactgcgccaaggtcggtctggccttcgtgtgctggagcccgctcggcggctaccgtcacccctatgatgagaccaagttcgacccgttccgcgaggtcgcggcggcccacggcgtgagctaccagcaggtcgtgctggcatgggagctcgccaagggcgaccacatgttcgtgattcccggcgcccaccaccccgagaccatcctcgactccctcaaggccgaccagctcgaactcacccccgaagagctcgccaagctcggctgattgcccattccccatcctcccgaatttgtgccgctgacgttggcttaacgtcacaaattcgggaggattgattcgtcttgaaggaaccgccatgcgcaaaaaactcatcctcgacctcgataccggcatcgatgacgcgctcgccatcgcatatgccctaggcagtgccgacgagatcgatctgatcggtatcacggccacctacggcaatgtcgcggtgccgctggccgcgcgcaacgcgctggcggtggtgcacttgttcggccgtgacgacgttccggtctatcccggagtcgaccatcccatcgccccggcaacattgccgaaaatgcgtggcaccacaccagacgagcggacccaggcctacgcgcgctggcagaacggcggcgcggacggctggcaaacggacgcttcgtgggcaccaactcccggctcggtggcggtccaccatcccaacggcatcggcggcgcaatcatccccgactccccgcgcgctccggaagcaccaggctcggcggtcgatttcatcatcgccgccgcgcgcgaatacggcccggacctgaccatcgtacctacgggcgcgatgaccaccatggccaccgtgttccgtaatgccccggatctgaaggattccggcgtgaacgtgacgttgatgggcggtgcgttgacgctgcccggcaatgtaagcccggccgccgaagcgaacatctcccaagacccagagtcagcagactatctgttcaagtgtggcgcacgcaccaccatgatcggcctcgacgtgacccaccagaccgcgctcacccgtgagaaagcccatgaatgggcgtctctggggacgccggccggcgacttcctcgtcaccatgaccgactactacatcgacttctacctgaagaaccagccggagattcgcggatgtggactgcacgacccgctggccgtggccgccgcgctcgacccatcgctggtcacgaccttcgggttcaacttgcaagtcgatctcgagggcccgttccgaggccgtaccatcggcgatcgttcacggctccaggaccccgacaaacacacccaagtcgcattgggcgtcaacgtgccggaattcctcgaccgtttcatgacccgcgtcaccgccgccgcgcgcgggtgaacgattacgcttcggcagggaatagagttctgcgtcaagtgcgtctgcgactcgcatgatggtgttgaacgagggctgcgaattcgggcgaagcgccttatataaggattcgcggccgaggccggattttcgggccacattggtcatgcctcgtgcgcgtgcgaccacaccgaacgcatcttgcacaaatgcgggatcatcctcttcgagtgcgccattgagatatgcgatggcatcctcgtccgaattgatgtatgagaatcaccaaaactcaaccacctatttcacatacccgaaaaatcagaaaaagaatcagatggtcgctggattttccctgctcttttcgatctgacgtttgagatattcgcccagcccatctacgcaccaaagtgggatgttcgtcagccaagattgctccctatagcctatttctcctatacggataccgtggagcccgtatctgttgcagacatacgagagacttctcgcacgaatattggaagaggacttcacttcgatgggaaaaacctcgtctccctgttccattacgaaatctatttccgcatttccttgaggatttgggttagcccaatagcggggtctgattccttgagctaccagctgctgacatacgtattgttctacgaacgcgcccttgaattcggaaaagagcttcgacttgttcaccagagtattcacgtcgagaccggacagtgcgcccagtatgcccgtgtcttccagatagatcttgaacgtgttaagactctcatatccgggcagaggaatatgcagagcatcgaggcgggggactttggtaatgatcccgtagtccgtcagccaagtgagcgcttcctcatattcgcgggcgcgggctccttgcctgacaacaccgtaaacgaatttgcggttctccttggcgagttgtgatggcagtgtgttccatacaagccggatacgctcgcccagcgtatatgcggcatgcttggaaaaatcaagatcgtaggcgttgagaatatcttgttggacagttcgcacatcctgcggaatcccgttatccaggtgagcgcttaatgctgctggcatgccgccgacccacatatatgttttgagtaggtcattcatctgaggttcgagagcttgtggaatgtcctcgaaccggccttcacgtatggtgtcggcgatcatgtcttgtccgatgctgtccagatattcggcgaaggagagcggatgtaggttcatcatggtgacttttcctacaggaaaagaggttttgccgtgcttggatattcccatgtaggagccggtggcgatgatgtcatagtcaggtgcctgctcggtgaagtatttgagagaggtcaacgcgagcggactttcctgtatctcgtcaaagaagagcagtgttctgccggggagtatccgttgattggcggcgagttcgagctgacggattattcgttgcgggtcaagatcctgctcgaatatcccggatagggatggccgctgcatgaaatcaaccgagacgatgttgtcgtattgtccattcgcgaactcgttgacaagccatgtcttgcctgtctgccgtgcgccacggatcaggagaggcttatggtcaggtgtggtcttccactgcttgagcgttttcagtgcttttcgctggagcttcatgacgaatatcctatgataaatgtgcgatgcttacacatttatcatatcataaatgtgtaagcatcgcacattttttatagtttattgcagtcgcagtagttttagcgcaacggataccagccgatcggtacgggtcttgatcgcttcggcatcccatttggttatctgtgaggctcagccatcttacgcggtataaacgttaaggagcaaccaaagggcggtctttctgagactaatctcagaaagaccgccctttgcgatggaataaattgagtgtggaactcggtattggtttgaaagactgtttacagcccgggaatcagaccgccgggcggatcgagcgtgaggtattgctcctccagatcgatgtcggggaccaaggcctccacgaacgggaccaacgcggtcttttcgaccacatcctcgcccttggagttctggccggttaccaccggctcggtcaaacgaatcttgagcagggactgagcgggggagtcgaccacatccaccactttgccgaccacttggccggcgggcagtcccagaccgttgccctcgactagacgggcctcaaggccaataagatccttgggataccattcgtcggcttcgagcatatcttctgcgtcgtcgacctcgccgtagagttcgacaccgtttagggcctcggcggcattgcggtcgtcgacgccctcaagcttgagaatccaacgatccttgaacgtgcgtgagccctcgacgatgtactcggtctcgccatcttggctgtagagcacggagtccggctcgaagcgccactcgggatcatcggtgtacaggcgcacggtgacttcgcccttcaggccctgtgcgcggccaatacgagcgaccctcagcaactcgagctgctgagggtcgtcgtgcatgtcttgctgtgccatgctgtgaatcgttccttatcggttatcgacggacgtccatgatgtcaacgcggaccttgtggtcagacagtgcctgaatcacggtgcgaatcgcgttggcggtgcggccgccacggccgatcacacggccgatgtcttccgggttcacgcgtacacgaagcagttcgccacgcgcgttctcatgggacttgacggaaacatcgtcgggaaaatcaacgatgttcttgatgaggtgttccacagcctgtgcaagcatagctagcctttcgtttccgctcaggcctcggccggagcttcttcggcggcctcttcagccggggcttcctcagcggcggcagcggcttcggcttcagccttggccgtggcggcagcttcggccttggcggccttcagcttctgagcctggttctcaacggccgcgatgcgggcctcggcgtccgggccggcctcaacggtcttcagggtgccttcggcaccttcaaggcccttgtacttctgccagtcgccggtgatgttcagcagcttgaagacgggctcggacggctgagcgccgacgccgagccagtactgagcgcggtcagacttgatctggatggtcgagggctgggtgttggggttgtaggtaccgatctcctcgatgaccttgccgtcacgcttcttgcgggaatcgacgaccaccacacggtagaaggcgtagaacttcttgccctgtcgcttcagacgaatcttggttgccaaaatggctctccttgtaatgctaggtgtgcgggttctcggtttgccatgtggggcatggccggccggaatccacgtgtcctcgcggctcggggtgtagagggcgccacgcgcgcgcgaataaccgtactagtgtaacgcggaagccggatattgcgcatcggtccggtcgtgacgcacggaatcgccggacggacggcgtgtcggcggcgcacctaccgtcttcatgactgatagcctgattgatggcagtgcgagacgggaaaggggacgctgatcgatgggtgagtgcgtgatcggccctggtgcccgggcgcgtgtggatgcggatgacggattcttcttcggcatgggggccttcgagaccatcgcggtatccggcggcgcgcccttgttgttggacgaccatctgacgcgtttgggtgagacgttgcgatacctcggcatcgaggcgcgtcgcgccgatctggagacgatggtgctccgcgcatgcgccggactcggcgcatcggacgattcggccctcaagctcacggtcaccgagcgcaaccgcgtcgtctcgttgagacgcaacccgtatgccgcgccgggggcgaagcgcgtcttccgctgcgacttcgccgatgtgcgcaggaacgaatcctcccccctcgcgcgcatgaagacgctggcgtatgccgaaaacatcatggagaagcgtcgcgcccgtgaccgcgccgtcgacgagccgttgttcctcaatacgcggggcgaggtcgccgaaggggccgtctccaatatcttcgccgtcatcgggggagacgtcgtgacgcctcccgtctcctgcggtctgctgcccggggtcatgcgccatgccgtgatcgggttcacgggggccgtcgaacgcccgatcatgcccgacgagctgcttcgggccgacgaggtgttcctcaccaactccctgatgggtgccatgcccgtggccggtatcggcggcgtggaattcgaaccggggagcgtgtcgcgcgacgtgaacgacacctacgcccgcatggtggcgcggacgcgggtccgggcgcagacgaaggagttccggtgagcgcgcaggtgttcaagctcaggacgttccgaccgcttgccgacatcgtggagtgcgtgcgcggcgaggaacgcttcgcgttcctggactcctcgatgccgggggcgcaggggcgctactcgatcctgggactcttcccctatcttgtgatcgaacatgggcggggcggatgcctcgtcgacggcgttgccgtggagggtgatttcctcgatgtcgtgaagaagcggcttggaccctgcgatggcgcgcgcgatccgcgtctgcccctcacgggaggtgcgatcgggtatctgggatacgatttcggccgcgaatcgtgcggcgtgccgaccaggcacgatcccgtcgcggccacaccggaggcgagcatggtcttctacgacctgctactcatcgaggacgtccggtcgcgggcgttgttctgttgctgccaggggcggacgatgacggccgcccacgccctgacatgggcgcaggacctggtggattcatgcccgcccgcccctcatcccgcgcgccgacgttcgctcgccccatgctcctccgatttcacgcgggccgggtacggcgacgccctggcccgtctcgtcgatcatctgcgcgccggcgacgcctacgtcgtcaacatggcgcagcgcctgcgcctggagacgtccgggagcccctatgccatctaccgttatctgcgcacccacaacccggccccgttttccgcctatctgcgcgcaccgggtctcgacgtgtgctgttcgagcatggaacggttcatggagattcgctcggggcatgtggtgacgcggcccatcaagggaacccggccacgcggcggcacgccggacgaggatcgggcgaaccgcgaggaactcgcccgcagcgagaaggaccacagcgaactgctgatggtcgtggacctcgaacgcaacgacctgtcgatcgtctgcgaaccgggttccgtcggcacggaccccgactttgccatcgaaacgtatccttccgtattccatctcgtcgcgaccgtcgaggggacgctgcgcaaggatcgttgcgccgtggacgcggttcgcgccgcgttccccaccggttcgatcaccggcgccccgaaggttcgcgccatgcagatcatcgacgagctcgaacgcgcgccccggggattgtacacgggcagcatcgggtatttctccgatacgggcgattgcgatttcaacgtcgtgatccgcaccatcgtgcgggagggaggcgggacgtcgctcggcgtgggcggaggcatcaccgtggaatccgatttcgacttcgagtacgacgagacgatgcagaaggcccgggcgctgcgtgaggccgcttccgttgacagggggagcgtcggcgagtacaatcacgggcaaaacgaataactatcttcagggcagggtgcgattccctaccggtggtacagcccacgagccgcaaggcatgatttggtgagattccaaagccgacagtacagtctggatgagagaagatgaaagtacgttcatgctttgtcgtacgccctgaaatgatgccatatcatttcagggcgttttcgtgttcgcatgaaccttcttttgtatgccttggatagcgtatgggcgcaacatgcttggaggcgtacatggacgatgcgcagtacatgggactcgcgatcgagctggcgaagcgaggggccggatacgtgaaccccaatcccatggtcggcgcggtgatcgtcaaggacgatcggatcatcgggcaggggtatcacgaggagttcggcggattgcacgccgagaggaacgcgttgcggcattgcacgcagtcgcccgccggggcgacgttgtacgtcacgcttgagccgtgctgccattacggcaaaacgccgccatgcacggaggcgatcgtggaaagcggcatcgcaagggtcgtcgtcggaaccttggaccgcaatcccgtggtgtccggcaagggcgtgcgcatgctcgaggaccacggcatacgggtcgatgtgggggtgctggccgacgagtgccggcatctgatacgggtgttcagcaaatacatcaccacgcatacgccgtatgtcatcatgaaatacgccatgacgatggacgggaagatagcgacccataccaatcaatcacggtggatcagcggcgaggagtcgaggcgtcgggtccatcagctccgtcgatccgtcgcggcggtcatggtgggggtgaacacggtgatcgaggacgacccgttgctgacatgccgcatggcacacggaaggaacccggttcgcgtcgtctgcgatacgcgattgaggacgcccctcacctcgcggatcgtgcagacggcgaatgacgtcaggacctatatcgccaccgcctgcgatgacgaacgcaaggcggaggactaccggcggcacggctgcgaaatactcgccgtcggaaggaagggcgaccacgtcgatctggcggatgtggtgcggcgcctgggggatatgcggatggacagcgtgctgctggaaggcgggagcgcgatgaattggagcgccctcgaacagcggatcgtcgatgaggcgcatgtgtacatcgcgccgaagatattcggcggcaccgcgaaaagcccggtgggcggccaaggagtcgccctgccttccgacgccgtcatgctccggccccgcgcctgctcccgagtgggagaggattatctggtggaaagcgaggtggtgtattcatgttcacgggaatagtggaggaagtcggaacggtggcggacatacggaggagcgccgccaactgcacgctgtcggtcgatgccacgaacgtgatggaggacctccatatcggcgacagcatggcggtgaacggcatctgtctgacggtcgtcgatttcgaccggcgacgcttcaccgtcgacgtgatgaatgagacgtggcgcagaacctcgcttggcgtattgcgccacgggagcggcgtcaacctggaacgggccctgccggtgaacggaaggttcggtggccatatcgtcaccgggcacatcgacggcacgggcagcatatcctccgtgcggcgcgaaggcaatgccgtgtggtaccggatcgcggcgcgaaacgagatactcgaaggcatcgtcgagaaaggctcaatcgccgtcgacggcatcagcctgacggtcgcggaggtcacggaaagggacttctcggtatcgatcatcccgcacaccttggcgcagacggtgctgggcgagaaacgggtcggcggcgtggtcaatctcgaaaacgacgtattgggaaaatacgtgcggaacatgatgacgacccggacgggactgacgcaggatctgctgtcccggtgcgggttctgagaaaggatgtatgaatcatgaaccatcagtcggtgcaagcggcgttgcaggcgctgcgggaagggaagctcgttctggtcattgatgacgaggaccgggagaacgagggggatctcatctgtgccgcgcagtcggccaccacatggaacgtcaatttcatggcaacccacgccaagggattgatctgcatgcccatgagcgagcaactggcccacaagctgatgcttccgcccatggtcgagcacaacaccgataaccatgaaaccgcttttacggtgtccatcgattaccgtggcaccacgaccggcatctccgccgaagaacggggattgacggctcgcatgtgcgtctccgatgacgtggaacccctcgatttccgcagaccggggcatatgtttcccctggtggcgaagaagggcggcgtcctggaacggaacgggcacacggaggcgaccgtcgacctcatgcggttggcgggattgcgtgaatgcggcctgtgctgcgagatcatggacgacgatggccggatgatgaggacccccgacctgacccggttcgcccaggagcatcagatcccgctcctgaccatcaaggaactgcaggaatacaggaaagcgcacgatacgctcgtcgaatgcgtctcgaccgtggcgatgcccacgcgatacggggaattcacggcgcactgctatgtgaacaggttgaacggcgagcatcatgtcgcgctggtcatggggaatctgggcgatgggaccgatgtgttgtgccgggtgcattcggaatgcctgaccggtgacgtcttcggctcgttgcgttgcgattgcggtcagcagttggacgcggcgatgcggacgatcgcggagcatggctcgggcgtgctgctgtacatgcgtcaggaagggcggggcatcggtctggtcaacaagctgaaggcctaccgtctgcaggacgagggcatggacacgctcgacgccaatctcgcgttgggattccccggtgacgcgagggagtactacatcggagcgcagattctcagggatctggggatacggtccatgctcctgctgaccaacaatcccgacaaagtgtatcaattggaagactatggaatggagatccgcgacagaataccaatcgaaatcgaagccaatgcttacgacagtttctatctcaaaaccaagaaaaaccgcatgggacatatcctgaacatggaggaggaataaatgcacacgttcgaaggcgatctggtagccgaaaacatcacgataggcatcgttgtggcgaggttcaacgagttcatcacctcaaaactgctggcaggggcgctggacaccctgaaaagggagaatgtccgcgaacaggacatagcggtggcctgggtgccgggcgcctttgagatacccctgatcgcgtcgaagatggccaagagcaagcgctacgatgcgatcatctgcctgggcgcggtcattcggggcagcaccagccactacgattacgtgtgcaacgaggtctcgaagggaatcgcgcagaccagcctcgacaccggtgtgccggtgctgttcggcgtgctgacgacggattccatcgaacaggcgatcgaacgggccggcaccaaagcggggaacaagggttccgagtgcgcgcagggcgcgatcgaaatggtgaatctgatccgctccatggacctctgacggcgaaccacccggctgcgggcgggggtcttccagacgttcccgcccgcttcgcgccacacggccaaggcccgatcgatcgccgcgcccgctaccgcagggtgagcgttgcggccaaagccagatggtcggtgtccggcacttcgaaggacgtcacgccggacggtctgagcccttgggtgaacagaatatggtccagttcgatgcgcggccacttgagccagcgcgggaaggtgaggttcgggccggcggcttgaatcagactcgcgtccttgaatccggacttgagcaacgcacggaagctcgggtgatcggtgctcgagttgagatcgcccataacgacgacgatgttgcgattgctgacggattttgcacgggcgagttctcgcagacccagaatgccggccgaccaatccgcgcagccgcgcatcggcgatttcgggtgagccgaacaaagcgtcaccgtgcgattaccggaggttttgagggtgatggcgggaacgtcggcggcagggatggagaccacgttgggcaccgctgcgctcggctcgtagcgggaatagatcacgttgaatccgccgttatcggtctctttggcgtctccgaactgatggtaggggaggagttcgttgatgtcggcttcggtaagacgtgtgatgaggtcgtcggtgacttcctgcaaggccaatacgctgatattgcgttcgcgaatattgcgaatgatttcagcggcgtcggcgcgtccgtatcgacaattcatcgtcataaccgagaactggggcgggagtgtttcacgcgttgtttcacggtgcccatcggggactgtttcgggtccttccttcggagtgtttgaggtgctcgatgtattgctgttatggctttttgacagcgtcggcgaagttgtttcacgggctgtttcacggtgggattctctgcgtttgccggctgggtcgattgacgtaccccagtagttgatgcgctgtgagctggcaatcagcgcgaccacaataagcgacgacatcgcagtccattcatgttgccatgcggcgaccgcggccagaatcatcaaaggaacccacagcagcggagtcagggcaatcatgtacggaagcggcatacgggcctcgagaccggcgggcagcgcgcttaaggccgtccataacagtgcgatgattgccaccgcgctgaagattgtcgtcatggaagttcctttcgaaatataaattgaaccgagatataacttggctcccctctgcgaggggagccaagttgtgagatcagcggccgaacagtccgccaaggcctccgccgaggttcggcggcagttcagtgccaccgtcgacgttgcccatcatctgctcaaggccagcgggcagggccgggttctgtggcttcttggcgaaggcggaaccgccggtcgaaccggaggatttgccggccagcttgtcgcgcaatgccttctcctcggcctcgcgcttcatcggattgccggatttgccgcctttcttcttgttcttgcccttcttcttgccgccgcccatagccgggccgccgaagccggggatgccgccgcccatgccgccacgattggacatgcgcttcatcatctttgcggcctgctcgaaacgctgcagcaaagcgttcacctgagaaaccgtcacgccggaaccataggcgatacgggcgcggcgggaaccattgataatcgacggatcgcggcgctcggccggggtcatcgagcgaatgatcgcctcggtgcggtcgatttccttctcatcgaactgctcgagttccttgcggtgctgggccatgcccggaatcatgccgagcagcgacttcatcgagcccagcttgcgtacctgctgcagctgatcgaggaagtcgtccaggccgaaggagccttcggagattttctcggcggccttgcgggcctcttcctcatcgaactgcttctgcgcctgctcgatgagcgtcatgatgtcgcccatgtcgaggatgcgcgaggccatgcggtccgggtggaagacctcgaaatccttcaggccctcaccg

SEQ ID NO: 165 - DNA, 11586 bp, Unknown
  R206_24m  MAG No. k141_65732
cggtgaaggccgcggcgatgacggaggaggtggctcatacgatgtgggccgcccgtcagctgggtgacatcatcgagattccgcaggcggacatcgacaagctgaacgaccgttaccagaacgtgtacggccagcactgacccgctcccgctgacggggcacatgaggggattgtgatttggtttcgattgcgagcgaggtatgggagtctgtgcttgtgacatgcccggagtgcgtagcgcaatcgtcgcggttcaatatcgcgattggctttatcgcaccattcgcatggcgatacccaacaattgtgctgcacactccgggcgtgtcggctcgttccatcggctgaacgggaggcttccgttacggagcccggcctaagttgaggtcaattcagtctcgtccatatgaatcaatagaatgctgttttgctgtgtcaagggtcggccgccgcataagccgcctcttcatgagtccagaccgaacgggcgcaaagccgctgtttcggcggattgacaggcttcctgagggcagacccgagggagttacagacgtgttcgtgatgccagtcatcaccgaaccccaaaccaatgcgctgatatgcggcagcactgaaggaaaacaatggttaacgctgttgaggcttttgacgccaagcacatgaagccggccgaggaaatcccggccttccgtcccggcgacaccgtcgacgtgaacgtgaagatccaggaaggcaacaactcccgtatccagaccttcaccggcgtggtgatcgctcgtaagggcgctggcgtgcgtgagaccttcgtggtccgcaagatcagcttcggcactggtgtggagcgtcgcttcccggtgcactccccgtccatcgactccatcaagctcgtgcgtaagggccgtgtgcgccgcgccaagctgtactacctgcgcgctctgcgcggtaaggccgctcgtattgccgagcgccgcgacaactccgctaagtgagtcgattcgcgggtgcaatcgtgggcctgatgatgcaggtgcgcgaataaaccgtgaaattcagcccggaaccgtttcggtttcgggctgtttccgtattttccacgtatgatggacgggcgccggcacccctcatatccggcagcatgaatcgcgaggagatggtatgcaggacgatcaggataatggcgaattcccggtttccgacaatccggagagcaaccagacctcgtatgatgacgaggccgatgcccgcgattcccgcacgttccaagtcgccgaccacggcatcgccctgtccccggttcccccggcaccggcgcgcccggcgcacgccgcttcttccgctggcgcgaatgccgcggcagcatcatcgatggatgatgaccacttcaccctacgcgactttttcctgtggtgcggcgttcccgtgcttatcgtgctgctgattcgcattttcgccgtcggcttttacgagattccttcgcgctcgatgatggacaccatggtgcccggcgatcgcgtggtgaccagcaagctcacccccaagatcttcgatctgcagcgcggcgacgtcgtggtattcaaagatcccaacaactggttgaacgaggagcagagcagcgctctcggtggcgggtacctcatcaagcgactgatcggcctgcccggtgacgtggtcgaatgcaagggcgcgggccagccggtgaccatcaacggcgtggccatcaatgagacctcctacattcgccccggcgtggatccgagcgccttcccgttctcggtaaccgtgaccgaggaccacgtgttcgtcatgggcgacaatcgcgccaattccgccgactcccgctatcatcaggatgacggcgatcgcggcttggttcccatctccgatgtggtcggggtcggaatcgcgagatactggccgcttgaccggcttggtgcgattgatgaccaccacgaagtcttcaaggacgtgcctgacgcttccggctcaaattcctgagtctttgttgaaccgtgtgagtctttgaactgattgagttccgggccgtctgaatcctgaaccatatgaatcctaaccattgtgagacgatgggagccgcgcatgattaccccgacacttgacttggaacgcagccttgcggcccagggctatgaccttattactggattcgatgaagtcggccgcggcgcgctcgccggcccggtgatggtcgggtgcgccgccatctgggcccgtgatttggagccgttggatggcgatgatgccgtcgaactgtccgggcggacctacctcggcgtgccggacggcgtggccgactccaaaatgctcaccgaacataggcgcgaggcgattttcgacgaactgcgcgactggtgcacggcctacgccgtaggccaggccagcaacaccgagatcgacgaatggggcatcacctacgcgcttggcgtggccgccctgcgcgcgctcagccaagtcgaacgcgaacttggcttacggcttggagggggattggcggcaagaaaggcttcgatggagtctgcgggggagattgtggaaggtcgtccgggagactccgtaggggaatccattggaaattgtggggaaagcgttcgcgccctgcccaaagtcgccggaattctcgacgggccgagcgattacatcaccaaggcgctcaacacgttcgacgcgccggacgtgccgattccagccgatataacgaccaaagtcaaaggcgaccagcattgcgccaccgtcgccaccgcggcggtcatcgccaaagtgacccgagaccggctgatggtcggcctcgcgcaaagcaacccacgttacgccgcctacgaatgggctcataacaagggctatggttccgccgcacaccgtgccgccatcgccgaacacgggccgactccgctccatcgtgtctcatggcacctgacctgagccgcgtgcgacacgacagtgtgagcgctaacgcaaaactgttgtggacgcgctaaagtcagtattgattaaggtacaagcctggccgcgcatgggtgccggccgccagcggggaggttaggtagcatggtgaccagccgcaagccaagcaaacgtccgtccatgttcgaagtggccaagctcgccggagtcagccaccaaaccgtctcccgtgtgatcaatgactcgccggacgtttccgacgccacccgtgcgcgagtccaggccgccattgaccaactcggctaccgcccctccaactccgcgcgcgcactggcttcccgccgttcgcgcaccatagggctgatcgccggaggcctcaaattcttcggcccgatttcctccatctcatccatcgaatccatggcccgcgaacacggtctgttcatgagcgtgatgatggtccacgaggccttgtgcatgcagtccgaattcgacaacctgtgcgacaccttcaacgagcagaacgtcgacgccttcatcttcctgaccccgaccgacgtgatgttcgccgccgcctgccgtgcgcgagtcactcagccacgcgtcatcgtcacggccacccacggccaaatgaccgtgcgtgagggattgggccttatctccaccgaaaacaagcgtcgcactgcactggtcggtatcgaccagtggggtgcaatggccaaagtggtggccttgctgggcgaatacgggcacaaatcggctctgtattttgccggtcccaacgaatggcgcgacgcccacacccgactggatgcgtggcgcaagctcgccgcctcccgatccatcgattcacagatcgtgcgctgccatacgtgggatgcctctgaggcatatgcgcacatgaatcatctcattgatgagtatgggcgtcgaggcacggcgttgcccaccgcggtcgtcgccgcgaacgacaatcaggccgtcggcgtcatgcgcgcgttgcatgagcatgggcttcggattccgcaagacatcagcgtggtcggattcgacgacatgtctggcgtggataacatgtacccaccgctgaccaccgtgcatcccgatttcgaggggctcggcgtggccgccatgcgcgagacgctgcgcttgctgggggagggcggcgagccgaccttcctgaccacccagcacggcatggggctgattcccgccgaggtgcgtgctcggcggtccttggggccggctcctcggcggtaaattggcgctgttatcaaaccgttatgatgtgtgacacggtataagttgtgtcgaatgcaggttatcggtacaatgtttttttgaaattgtgagcgctaacatcctccccaaggaaggggataacagcgccggcgctccaaggcaaaggaaagatatggcagcaaccgacaacgcggccgagcaggccgcccacatcgccgagaagattcgcgctggcaagaccacgctgggcatcgaattcggctccacccgcatcaaggccgtcctcatcgacgacaacttccagaccatcgcctccggcgactacagctgggcctcccacttggaggatggtctgtggagctacgccaccgaggagatctggggcggtttgcagtccgcttacgcctccatggccaacgacgtcgagaccgcctatggcgagaagctcacgcacgtcggccacatcggcttctccgccatgatgcacggttacctcgcattcgacgaggccggcgaactgctggtgccgttccgcacctggcagaacaccaacacctccgaagctcacaagaagctctccgagctgttccagtacaacatccccgagcgttggtccatcgctcacctgtaccaggccgtgctcaacaaggaagagcacgtctccgaggtggcttacttcaccacactcgccggttacgtgcactggaagctcaccggtgagaaggtcctcggtgtgggcgatgcctccggcatgttcccgattgacccgaccactcacacttacgaaaccgcattcatcgagaagttcgacgctctgcctgaggtcgcagcccagccgtggaagctggagaacctgcttcctgagccgctcgtggccggcactccggctggcgagctgaccgaggaaggcgccaagctgctcgatccgtccggtgccctgaatcccggcatcgtgctcgccccgcctgagggcgacgccggtactggcatggtagccaccaactccgtgcgcgtacgcactggtaacgtctccgccggcacctccatcttcgccatggtggttctggagcacaagctcaaggccctccaccctgaggttgacttggtcaccaccccggccggcgatctggccggtatgagccacgccaacaacttcacctccgacctcaacgcttgggtcggcctgttcggccagttcgccaaggccatcggccagtcggttgatgccggtatgctgtacggcaccttgttccgcgcggccatcgccgacgacgtggacgccaactgcggcggcctgctgaactatccgttccgttccggcgaattcctggccggtctgcctgaaggccgcccgctgttcgcccgcagccccgaagccaacatgaccctcggcaacttcatgcgcgcccagctgttctccgcgttctccccggtcaagatcggcatggacgtgatgaccaagcaggagcacgtgcaggtcgactctctcgtgggccacggcggcatcttcaccactccgaaggtggctcagaagattctcgccgctgccttcaacaccccgatcaaggtcatgtccaccgccgccgaaggtggtgcctggggtatggccgtgctcgccaactacctgtggaacaccaacgaggatcacagcaacctcgctgacttccttgatggtttcgtgttcaaggacgcccagtccaccactgagaagccggtggcttccgatgtggttggtttcgaggacttcttcgcccgcttcaccaagggcctgcccatcgagcacgctgccatcgaaaccatcaacctcgaagataagtaagcctttctgacctccctctattgagagaggtccttgagattttgaaaaaacgtccatccatcacagtggaaaggaaaaccaataatggcaactttggctgattacggccccgaggttcgcgccgaggtcaagcaggttcgtgaggtcgtctccaacctgcaccagcagctgatcaagtggaacctggtcgtgtggaccgcgggcaacgtttcccagcgtctgcacaccgccgacctgttcgtcatcaagccctccggcctgcgctacgagtacctgaccccgtcctccatggtcgtgtgcgaccttgacggcaacgtggtcgacggtgccgaagccccgtcctcggacaccgcttcccacgcctacatctaccgcaacatgcccgacgtctacggtgtcgtgcacacccattccacctacgccaccgcttgggctgccactggtcagaacatcccgtgcggcctgacgatgatgggcgacgagttcggcggcccggtgccggtcggcccgttccgtctgatcggctcggaggcgatcggcaagggtgtcgtcgagaccctcaagaagtacccgaagtccccggccggcctcatgcagaaccatggccccttcaccatcggcaaggatgctgaaggcgccgtcaaggccgctgccatgaccgaggaagtcgctcacaccatgtgggccgcccgtcagctcggtgacatcatcgagatcgaccaggccgacatcgataagctcaacgaccgctaccagaacgtctacggccagcactgatttgatggagtgtccgccgcgttgcggaaggctcgacgtaccttcgtacgccttcgccttccgcgtcttgcgggcacacacatcaaatcagcgctgactccgccagcacggtggtgtcttggctcccctctctgaggggagcctcggtcggcgaatgaaacttaaacaaacccccataaacaaagaagtaaaggaagtaaccctatggttatggaaaaccccttcgagggcaaggaaatctggttcggcgttggttcgcaggacctgtacggcgaggaagccctgcgccaggtcgccattcactccgctgaaatggtcgactacctgaacaacaccggcaagattccggccaagatcgtcctcaagcccaccctgaagtcctccgacggtgtcaaggagttcatggtcgaggcttccgccaatccgaacgtcatcggcgtcatcacctggtgccacaccttctccccggccaagatgtggattcgcggcctcgaagtgctgaccaagccgctgctgcagctggccacccagcaccacaaggaaatcccgtgggagaccatcgacatggacttcatgaacctgaaccaggccgcccacggcgaccgtgagttcggttacatcgtctcccgcctcggcatcaagcgcaaggttgtcgtcggccactacaccgatcctgaggtcgtcgagaaggtcggcacctgggcccgcgcctgcgccggctgggatgcctccaacaacatgaaggtcatgcgctggggcgacaacatgcgtaacgtcgccgtcaccgagggcgacaagaccgaggccgagcgcgtgttcggcgcctccatcaacacttgggccgtcaacgagctcgtcgctgcgtacgacgccgtcaaggacgaccaggtcaaggagatcatcgaggactacaaggccaagtacgacgtcgacccggctctgctggacgccaagtacgactccctgttcatcgccgccaaggaagaggccgcgatggtcaacatgatgcgcgccaacggctgcaccgccggcgtcgacaatttcgaggacctcggcgctctgccacagctgccgggcgttggcccacagcgcttcccgtccgagtacggctggggcttttccgctgaaggcgactggaagaccgccgtcctcgtgcgcatcggcgccgtcatgggctacggccttgagggtggcgcctccctcatggaggactactcctacaacttcaccgagggcgacgagctcgacatgggctcccacatgctcgaggtttccccgtccatcggcaccatcgccaagccgaagctggagatccacccgctgggcatcggcggcaaggccgacccggtccgcctggtcttctccggcaagcccaccaaggacgccgtcgtggtctccatgtccgacgttcgcgaacgcttccgcctgctcatggacgtcgtcgacgtcgttgagccgcagggctccctcaaggagcttccgtgcgcccgcgccgtctgggagccgaagccgagcctgaagaccgccgttgagtgctggatcaccgccggtggttctcaccacacctgcatgaccacctccgtcggtcgtgaggcttgggaagacttcgcacgcatcgccggtgttgagctcgccgtcatcgacgagaacaccaccgctcgccagttcgagaaggaactggagctgtccgagatgtaccaccgtctcaacaaccagcactgattggcggagcgtataccgcctttcctcaggttcgacgtaccttcgtacgcccctcgccttcggacggcggtctccgcacgcgccaatcagcgctggcaagccagcaccgatgactaaatcagtctgctgactgctaccgctgaaaaagggctgttccggaaaaccggagcagccccttttgctgttatcggcaactccctacaaacgcatcaaaaatcgcctgcgagcgtggatctaccttgtagagaaactcgggatgccactgcacggcccacaggaagtggcttgccggccggtacagggcctcgatcacgccatcgggcgcaacggccatgacttcgagaccgggtgccacatcacgaaccgcctgatggtgatagctattcaccgcaatctcagtctgccccgagaacaatgaagccaggggagtgccgggcaccaaggaaacgttatgtccgaacgcatcgtacggcggattcatatggtgttcgatatcgctcggatgctggcttggcagatcctgccacaacgtgccgcgcagcgctgcattgatgaactgaatgccacggcagatgcccagaatcggcttgtcccaagccattacagctggcagcagaatcgattccattcggtcgcgctcaggagagagcacctcgctacggccggtggcggaggccgctgcaccaaccatcggtcccacatccggcccgcccgtaaacagaaacgcgtcaaaccgttcggcacattgtgcaagaatgtcggcgtcatcggtcagcggcaacatgatgggcgtaccgccggcccgcattatcgcctccatatatccgggcagcatccacagactatcgcgcccgtaatccatcagcggagtcaccgcaatgagcggtcgattcgtagtcatgcctgcctcttttcgcccaagtgtcgctttcgtcgttctgccgcaaatcgcttgatccagtggccaataatgccgtcactgtaccgaaccaatgtaaccggtcggccagcattatttcgtcagccagccgcgacgagatcgcacaatgtgccaatgatgggggcattcggtgcggccttgtcaatgttcgggccattgcacgttcggcggggaaagcatgcccccgtccgcgcatcgtgatgaacgagtaaggttgacggggagggagaatcacatgaaccaggcatgcgtacgcaacgacaccatcgacgcgggcaaccatcatggccgaccgcaataccggtcgttcctgcgatttctgacatcgcaggaacgcaacgtcatttggctgttgctggccgtcgcttttcttccggtggacggcaccacgcttggcctgtacgcgccgttctggtcgccaatcagtccggcgctgttcgccgtgtactgcctatgcaattggcggcaactgcgcatcgcagccaaccggtacctgccaatgttcctcctaccggtggtctgtataatcctgtccatcccgggatggctgaagttcggcatccacctcaacgccgcgttcatgagcatcaccggattgctgggcgtgctcgccactttgggtgcgatcgcccttgcgttcgacatcaaacgcattccgtggcgtacgccattgcggattctcatcgcatcatactgggtttccttcggagtgggcgtcgtgcaatggctgtccatccgtctgcgcgccaaaccgttgaccgactatttctcgcacctcatgtaccggcaatacatcagcgacaactcggtgtggggcggcggccgtccgcagttcctgttcgccgagcccagctatatcggcatgcacctgttcggcatactgcttccgctcatgtggctcatgcgcgggcgcgaccgcatctacgccaaacggctgcgtgacctcatcgtcacgtatgccgtcggcgcggtgctcatgcaagccggcaccagaatcgtcatcgattccgtcgtggcgttgctgatcgcccttgtggcgcgcaccgattggcatgacggcgcacgccgcgtccggggcatgctgcagattctcggcgcatgcgcactgggcctgctgggtgtgctggcggattccagactctccgccatcgcggagaacggggccgagggagacggctcgttcttcgcgcggatctaccaaagcctcgatccgatatgcggattgctcacccatccgtggacgctgctcaccggttatggcgcgggcaacatcatcaatgcggtgtgggccggcacggccaaagccggatggctgctggacggtcttggtatgaacggcggcgcggccacgggattcgcggccggcgtgaacgcggacacggtgtggacgatgtgcgcgtataccagcgtcatcgccgaatacgggctgatcgggctggccatgctggtcggagcctcgatggtctgcatgacgcgcgggaggacggtatgccgtggcggtgcggatggcgcatcgtccgacgggctggcgcacggtgtttgtgtcaccgacgttgccgacgttgctgatgttgccgggggcaatagtggtgatggcgttgccggcgcgggttcgggcgaatccggcgtctggcacaagaccgtcatctgctggctcgtcctggtcgcatacctgtacatccaatgcgagaactatgcgttcgccgctctgccgctcctcgtgttcgccgcctcgaaggtgaggcgcgagcgctgattcctctcgggccgacgcatcgacgcggcccgagatggaccaaaatccagaataaacgacattcgccgctgttccgtttttcgcccaaggcgtatctcttcccgtatcttgaggtgcatcatgtattgtcgcggctaactaaccggcgaaacgcggcatgtttcgcattttgggcgaaaagcccaaggcccacaggaggtattgatgacgttcgttgcacggtcggtgcgctatgtgctcagaaaacgagtacgaaccatagtgctccttatagtattgaccatcataacggcgagcatgctatccacgatcgcggtttctcgggcagctcaacaggccgccggacgaatcgagaaggaagcggtcggcgggttcgtgctggccagcaacctgcagggcagcatgctcac

SEQ ID NO: 166 - DNA, 3016 bp, Unknown
  R101_18m  MAG No. k141_108
gcagaccctgctcacctacaaggaaactcagcagtggcgcgatctcggcaccaaggccggcaagttcctggccgacatgaccgacttctacatcaaggcctacgagactacgtccccgcacctgggcggctgcggtctgcacgatccgctcgccgtcggcgtggcggtggacccgaccctcgtcaccacccttgacatcaacatgaaggtcgacgtggaaggtccgacccgtggacgcaccatcggcgacgaaactcgcctgaacgaccctgtcaagaccatgaaggtggccgtcggcgttgacgtgccgcgcttcctgaacgaattcatgacccgcatctccggcctcgcggccaaagccgaataagcgtaaccagccaaacaatcgcgtatcacaaatcgcgtatcgcgcaattcgagagaatcaaggatttttacaatgtctaacaaagcaaccgctgtgaccagcgccgcattcgctgatccgttcgacgatccggtgaccagcaacaagatggccatccgctccctgatcccgctgctgatcaccttcgtgctcggcaccctgtgcctgcagggcttcaacctcgtgttccagcaagtcggcgccgacgtcggcgctccgaaccaggcatccctgatcaccgcattccccagcatcgtgctcggcatcgtgtgcttcatctacggttccctgggcgacttcgtctccctgcgtaagctcgtgaccgtcggcctcgtcacgctgttcatcggttccctcttcggtttcgtggcaaactacttcttcgccgcaaacctgtggaccgtgatcatcgcccgtgtgctgcagaccgcaggcgaacaggtggcgggctcagccttcctggtggtggccactaagtacttgcgtaacgatttgaaggtcatcttcttcggcctgttcaccgccgcataccagctgtccgcttccatcggcgtgttcgcagccggcatgctcagctccatcgcatggcagttcctgttcctgatcccggccgtcaccatcctgttcctgccgatcctgctcaagaccctgccgtccaagagtggcaacggccagaaggtcgacgcattcggcttcgtgatcttcggcttcgccaccgcattcctcaccctgttcttctcgtacatggcatggtggatgctcgtggtctccctgctgctgttcgtggcattcgccttctacatcaacaaggcctccaacccgttcatcaccccggcgttcttcaagaacacccgttggctgcgcgccatctgcctgatcctcgtgttctacttcgtgaactacgcactgagcccgatcttcaatgccattggtaccaacatctacggcatgaccaccacccaggtttccctgcacatcgtgtgggccttcgtggtcgccgctgtggtgggcacctgctccggcatgatcatccgcaagatcggcatcaaggccggcatcgtgaccgcaggcaccctcatgttcctgggatggaccggcgcggcattctgcgtgaactccggttttgtggtgctgaccctgtgcgcatgcgtgttctacgcgggctgtggccttatgtactctccagtcgtttccaccgtgctcggcaccattgagaaggacgaatctggtcgtggcgtcggcatgaacgatctggctatgaacgtatctccgtccatcggcattgccatcatcggcagcctgctcggctccaacgccctcgccggcggttccatcaccggtgctaccggtgacgccgccaactattccaacctgctgctgatcgccgccggtaccgcactgcttggtctgatcgtgttcttcgtcttcaagaaaaagatctacgaaggcaaccatgcgttggaaaccgaggaatcggctaagtaatcgcacataacatcctcgatataaacaatggagatttgcgataattgcgaatactgaaaaacaatattccgcaaatctcctttttatttaactaatgtaaggaagtcaaagatgagcgcgactgaagttctctctgcattggaccgcatccacggcacggtgtccgtaatcggctcgatgaacgcggattacaccgtcaccgcacagcgtctgccagggccgggggagaccatcaccggcggcccgctgcagttgctgccgggcggaaaatccggcaatcaggcggccgccgcagcgcgcatcggcgcaaccgtgcagatgttcggtgcggtaggctccgattccaacgccgacttcctgctgggtgccctgggcgaagctggtgtgaacaccacgcatgttcgccgcgtgctcggaccgtctggcacaaccgtgatcaccgtggacgcagccggcgaaaacactatcgtgtactcgccgggttccaacgcgcaggtcaccgtggattatgttgaatccgtgcgcgaggcgctggtacgttcttccgtgcttggcctgtgcttggaaagcccgatcgaaacggtgacggccgccgcacgcatgtgccacgaagcaggcgtgaaggtgttgctcaacgattcgccgttcaccccgtcgctgccggccgaactggtggaagcatccgacattctgctcgtcaacgagcatgagatggtgcaattactgggcatcgacgaaccggaaaacgatgattgggacggtttcgactgggatcatgcgctggaagcgatgcgcggattcggtttcgaacaggcgatcgtgacgctcggcggcgacggttccgtggtgctggacgccacctcggaaacgccgattcagcgtatttccccggtacgcgtcaacgcggtggacaccaccggctgcggcgactccttcatgggcactgtgctggctggactcgcctcgggcatgacgttgagcgaagcggccgagctcgcctcatacgtgtccgcatacgcagccaccggttatggtgcgcaggcctcctacggaaatgccgcgcaaatccgtgaagcattcgccaaatagtcaaatagcgaaattaaccgaagtttcttcttccca

SEQ ID NO: 167 - DNA, 3427 bp, Unknown
  R101_18m  MAG No. k141_350
cgggaaccaagttaaagtatccactatccgaccgcaaccatggacatatccaccagcattgcccaatctcaaaccttgcgttaacgcaaatttacatatcacagtccgggcatgcggtaaactgtcggagtatttatcgaccggcgggggcgtactataccctttctggccggtctaggaaataaggagcaaccgtatgggtaagtatcttctgcgacgcattctgcagatgattcccgtggttctcggtacgactcttctggtatatgcccttgtattcgccctgccgggcgaccccgtcaaggccatgttcggagacaagcctgtcaatgaggccgtcgcagcccagatccgcgcagaataccatctcgaccagccgttcatcgttcagtactttatctacctgaagaatgcactgaccctgaacttcggcgataccttcgccggccagcccgttctcgacgaaatcacccgcgccttcccggtcaccatcaggctcggcttgatggcgttcgtgttcgaggcgattttcggtgtggtcttcggcattatctcgggcctcaagaagggcaagtggtacgacaccgttatcctgatcgtctctctgctgcttatttccgtgccgaccttcgtcaccggcttcgtcatgcaatatgtctttggtattcagtgggcgatattgccggtgacggcaggcgccgaccccggcttccttgatctgctcatgccggccatggtgctcggttcggtgtcgatggcctatatcatccgactgacccgctccgaaatctcctccaacatcgccgaggattacgtgcgcaccgcacgtgccaaaggtatgtcgaacggtcaggtcatgctgcgccacgtgttacgtaactccctgattccagtcgtcacttacctcggccaggacatcggcgccctgatgggtggtgccatgatcaccgagcagatcttcaacatccacggcatcggcttcctcacctaccagtccattctgaagggcgaggcaaacctggtggtgtccatcgtcacgttgctcatgctgattttcgtagtgtgcaacctcgttgtcgacatgctgtacgcggccctcgatccgcgtatccgttacgcgtgatagggaggagtgagtcacatggcaaacgaaaccactgaaaacgagctcaaccagaccggcgagccaggaaccgaatacttcatggaaaccctgcccggtcaggaccgttacgtagctcctctcgacgagaccccgttgcaggacgtcgattccgtcgacgaatccgcaccggccaccagcatgtgggccgacgcatggcgaaccctgcgccgcaacccgctgttcatcatctccggcttgctgatcctgttcatcatcgtggtggccatcgcccccggtctgttcaccaagcaggatccgaacgcctgcgatctgggcaactccttgagccccgcctccgccggacaccccttcggctacgacctgcagggctgcgacgtgtacacccgcgtggtctacggcacccgtacctcactgtctgtcggcgtgctctccacgctactagtcgtgatcgtcggcaccctgatcggcgccgtcgccggcttcttcggcggttgggtcgacgcggtgctgagccgtatcaccgacatcttcttcgcgctgcctatgctgcttggcgccatcgtggtgcttcagatgttcaagacctccaagtccatctggaagatcgtgctggtgctgacgctcttcggctgggtcggcgtatgccgcatcgcccgcagcgccgtgctggaatcgaagaacctcgaattcaacaccgcctccacggccctcggctccacgccggccagaaacctgttccgccacatcctgccgaactccctggccccgatcatcgtcatcgccaccacctcgctggcctcctacatcgtggcggaagcgacgctgagcttcctcggcgtcggcctgccgaccaccacggtgagctggggcggcgacatctccagcgcgcagaccaatctgcagaccgatccgatggtgctgttctacccgtccgccgcactggccatcaccgtgcttgcgttcatcatgatgggcgacgccgtcaaggacgccctcgacccgaagagccgtacggcctgagcgaggggagtggagaaacattatgactgacaacaccaacgccaagatgctggctatgcagaaagagcatggtccgctgctcgaggtcaaggatctggccatcgacttcaccactgacaccggcaagccggtgcatgcggtgcgcgatgccaacttcaccgtctaccccggccagtgggtgtccatcgtgggcgaatccggctccggcaagtccacctccgccatggctgtgctgggcctgctgcccggcaccggtcacgtggtcaacggttccatcaagcttgacggcgaggaaatcgccggcgccaagcagagcgagttcgacaagctgcgcggtaccaagatgggtctcgtgcctcaggacccgatgagcaacctcaacccggtgtggcgtatcggctcccaggtcaaggaggcgctgaaggccaacaacatggacgtggcccacgagaagcgctccgccctcgccaaggctctggccggcgacgaggtcgaagtcaagggcaacgacgacgagaccttcctcggcaccaaggaactgcccgagctcatgaccgaggccaagaaggccctgaccgaagccggcgtgtccggcgaggccttcgacaaggccgtcgcccgcttcaccaacgaatgggttccgggctccgaaacccgttggcgcgtggccgacgacctcatcaaggccggtgtggccgacgatcaggcctggtacctcgccaagaagtacgtcatcggctccacaatggatgaccgcatcgcgggtctgctgtccgaggccggactgcccgatgcggccacgcgcgcccgtcagttcccgcacgagttctccggtggtatgcgccagcgtgcgctcatcgccatcggtctggcctgccgccctgacctgctgatcgccgacgagccgacctccgccctcgacgtgaccgtgcagaagaagatcctcgaccatctgcacatgctcactgactcgctgggcaccgccgtgctgttcatcacccacgatctgggtcttgccgccgagcgcgcccagcacattgtcgtgatgtacaagggtcaggtcgtcgaatccggtccgtccctcgaggtgctgcagcacccgcagcacccgtacaccccgcgactcggggccgccgccccgtcgctggcctcccagcgcatcatctccgccaaggaacgcggtgaggacgcggacgccctgctcgaccatcacgtcgccggcgaaagcacgcttgagaaaagcgagcacatcatcaccgtcgaccacctgcacatgctcac

SEQ ID NO: 168 - DNA, 46559 bp, Unknown
  R101_18m  MAG No. k141_359
ggcgtggcacagggcaacttccgctcccacttcagcaatgacctgtacgtgcgccgggcacccaccggcatcaacagcgaatccggccgatcgtaacaataaatacgagacggaccatacttgaaaatatgacgcgtgggctctgacgacctctcaaagaacggcatgacaccaccatacgaccagcatcgccgcgtacacaatacacatcacacgcggccggcaagaaaaccgcacaactcctgcgccaccggtagcatctgcgactccaaaccggggttcatgaaacggtcgtagatattccacctatcgcacagggacacccacagatacgcccgccccgaagcaacaatcacattggagtgcaacggatgagcggacaatacctgcaacacattctgcggcggccccaccaactgtggccgaaccgcatgccccaacaaatcgcttaccgagcaccacgcataccccctgcgaacgagccggcacaggcaacaccaccacctgcatataccgcatggcgtaattactcaaaaagccattattgtcatacacattcagcgtgaacgtcagccacggtcccttgctgtagaacctgttcacccgcatattacgcacggcttcgccacgaagcaccaccgtgcttccagcatcgacggtccgtttggcctgccaatcacgcgcatggaccgaatacgtgaccgaagaaactccgggagccggctcataacggatctcaaccagcacaggaactccgaaaccacggaaaaagcccaacacatcatcgcaatgcaaacgcacgccaccacgaacgacgcgatgacgccgttgcgataccaataccgccacgtcggccacatgcgctgcctgacacggaccatacgccagccgagcaacgaaccagccaccacgaacacgcaccagacaacaatgccgtaccggaaaaccctacccacccagaaaggaaaaccagatttatcagcattcagcagccacagcacgccgacgaacaccacggcctctagcatgtaccacggccaatccaactgccgacgaacaaccgcaccggcaacagcatccacacgatcccacatcatcaaccttctctcatcaaaaaccgcttcgtaaggcaaccatacagtcagcagtacggacaacaagccggctatcacacgtaccagcacagctcctgtgccacacaagcagcatctgcgactccagcgccaggggccatgtaccgcgaatcattgtcgcacacattgatcggcgtccacaggcaagccaggccattcgtcaccttcatgctgtcatgatttccgtggaaggccggggtgagcgctgcagaagcgcagacgatagccagtggggtctgttcgtccgtccgccatggacagtggccggccgaatacagcctcatgcctgtgggacggcacgcggatttggccggtttccgcgcggcgtcccgcaggaacgtgggatggtagagaaatcaatcgtttgacgttcgtggcgttccacactatcaaccgccagaaccgcgcaatcacgccaatccccgttacggaccataatcatcccccgggctctctgcgggacggcagacgaaaaaccgcgaaatccgcgcgtcgtcccgcacttcgcccggtccacgaacaggacaagcatcaccgatagaccgaacacacatctacagccgcgacaagaaccccaacagctagccgcccgccccggatatcgccgtccaatagtaaatcgagcccaaaacgcaaacccaaagcactgactcagataataaaactcggattttccaccacagacagcgagaaactctcccctataccaagtagcgtacgtgccaccttgctcgatagacgaacaatgagaagtatcggttaacgggcatgccgggcaggtcgatgggctctggcgcgggaacgaagacggcgtaccagcacgaatgggccggcaaacgtgatcgtatacaacacgacggcgaggaacacgctgagccatgcggtgaacatgcccaacggcatctcctctaccggagtggtctcggctatgcatgcaacgatctatcactccgatgttgtggtcagtatgcgcggcagttgttcgtcacggttgaggaaagaacgcgtttggcaacgaagtagcgtacgccggccttcctcagtgcgggtgtataccatggtgcaatgcgtcaggcagcggtccaactgccggcgcagtatttcggcgtcctgctggcggcgggcaaatatggacgggaatgggaagcttacaccgtacgtgcgcacgccccattccttgccgatgatgacatatcgcggattgttgatgggcgcgagtagctccttcataacgccggcgaacagcacctgctcgcgccgcgaaccaccaatcagcatggcacgcaacgccgtgaatctgcgacgtgtctggcggatcgaggaagtcactcacctctttgcctaccgcgttggtttctaggcgctcaggttccgcagtcgccaaatgccagacattggccaccttatcggggtctgcggccacgctgcggttggcggccatgctgtatgcttcactgcatcagtgtaaggcatgaatcaataggttttgagccccagatcgatggtgagaatgatgccggcgattacggcggcggcgcgcatgatgtttgcgggaatcttgcgggtgatgggcggggcgatgtacccgccgatgaagcagccgatgcacagcatgatggcggccggccaatcgaccgcgccttggatgatgaataccactgaggcgctgatgttcgcgcctgtgccgatcagggttttcaatgcattgatcttgtggaatggcccgattttggcggcatcaagcatggcgagagccagggtgccggcgcccgcgccgaagtagccggagtagatggcgactgccaccacgcccagccatacccaccaggaatcctggctcatgggctgcacgagttgttccggcgggcggtgaggtgcggtaggggtggttgcgcgcttggcggcatcagtggcatcggtggcttcagtggcttcgatgtgcttgagttgcgcggtggcatccgcggcggcctgcttggcctgcatgcggccgcgcggattgatggcgatgatcagcgagctcagcaaaatcagcactggtgcggcgaattcaaagacactcgggtcgagtttgagcaacagaaacgcaccggccaccccgccgaacgcgccaatgaccacatacgtaatggagcgtaccgcttggcctttgagttctttgcgcgcgcccatcacgccaccgatgcccgtgccgaccacgccaacggtgttagaagcgtttgccaatacaggcggaatgccgaacgcgagcaaggccgggtatgagaccagtgacgatgcgcctaccgcatagcccacgaatcctgcgccgattccggccaacagaatcagtagtaatgaagttatggaaaagcccgcaatcattccccgtatccttgtcgctcatcgaccggcacattgccggccttgagcgagaatacgctgttgaggattggttgcgggttttatgttggaatgtggacgtagctcctcgcggaagcgattccctcagtcgcctgaggcgacaactcccctcgcacccgaggggagccagaaggaaatcagagcgcttcgttgtattcgcgaaccttgagggtgcggtgggaggatgccacgttttcgacgatcagacgcttcagggcgttgtcggcggcaatgtgctcgtccagccaggcgtcaccgagcttgaccagcgtggcgggatcggcgtagcccgggtacaggccgttgagcagggcgtcggccatgtggtaggtcttgttcgcccagatccagtcgacggcctcgaaataccgggcggcgaacggctcggccaggtcgtggcgcggggtggcggagaagccacgggccacggcttcgagctgggagttggtcagctcgtcgttgtggagtgcctgatcccaagcccattccttggcttgcgtcgtggccatggaggcgcgggcgccgtaggcgaactcgcggttctccgtggtgtccttcctggcgagctgcgcgtccacgtcgtcattggtcatctcattgacggaggtgagcgcttggacgatggtccacgtgaagttgttgtcgatttcgaggccttcaagacgcacagtgccgtccagcagaccgcgtgcgttggcggcgaatgcggcatcgccctcctcgccatagcccaggtaggcggtggcgagctggaactgggtgtccgagccggcttcggcggcgttggccagggtccacagttcggcggccacgtggcgcagcacatcgtcgcggcgggcgggcgccacgtagtggtgggcggtggtgctcatgcaggccagcgcgtagcggaaggtggtggactcggtttcggtggacagcaggcgcagggtcatgtccacgaaacgctcggccgggaactcgccgtcccgggtcatgtcccagaaggcgagccaggtcacggcgcgggccagggcatcgtcgaaacgatgcaggttggcttcggcgaatgcctgggattcggcgtcgaaacggatcttggtgtaggtcaggtcatcgtcgttgaccagcacgaatgccgggcgcggcttgcctgccgcggcctcgacgatggtggtttcgccatccacgtcgagttcgaactgctcggtgcgcacgatcttgccggttgcggcgtcttcattgtagaagccgacggccaggcgatgcgggcgcagcaccgggtgttcggccggcgcgctctgggtgagcttcagttcggcgatggtgccgtccgcgtttacggtcaggtcggtggcgatcgtgttgatgccggattcctccagccacttggcgctccaggccttgagatcgcggccggaggtcgtctccagttcgctcagcaggtcggccagggtggcgttggagtaggcgtggcggttcaggtaattgtggataccttcgaagaactgcgtgcggcccacatagaatgccagctgcttcagcacggaggcgcccttggcgtaggtgatgccgtcgaagttgacataggtgtcgttgaggtcgttgatcggggcgacgatcgggtgcgtggtgggcagctgatcctggcgcaacgcccagcttttctcgccggagcagaaggtggcccaggcgtcgtgccattcggtggcctcggcggtggcgagcgtggaggtgaattcggcgaaggactcgttgagccacaggtcgttccaccacttcatggtcacgtagtcgccgaaccacatgtgcgcgagctcgtgcagcacggtcaccacgcggcgctcggccagcgcgtcggtcaccttggactcgaacacgtaggagtcgcggatggtgaccatgccgatgttctccatggcgcccgcgttgtattcgggaacgtagatctggtcgaacttggcgtacgggtagggcacgccccaggtcttggcgtagaacgcgaagcccttcttggtgatgtcgaacaggtagtcgacgtccttcgcgaaggccttggccaacgactgtcggcagtactgggccattggcacggtacggccgtcttcgttcaggtattcggtgtgccattcggcgtacgggccggcgcagatggcggtcaggtaggagctcatcaccggggtcggctcgaagtcccacagacgggtgctttcgttcggcttgtcgccgagggtgccgtcaagggtcgtgcgcgaatcgtcctcgatggaggcgaccggcatgttggaggtgacgatccagctggcgggagcgagcaccttgaagtcgaaggtggccttcaggtcaggctggtcgaacacggcgtagacgcggcgagcgtccggcacctcgaactgggagtacaggtagatgttgccatcggacgggtcgaccgagcggtgcaggccctcgccagtgttggagtaacggcacttggcttcgacggtgacctcgttcttctccttgaggtcggtcagttcgatgcggttgtcttggaaggccacggccgggtccagggacttgccgttgaggtcgatggaggtcacttcgtcggcgatcaggtcgaggaaggtcgacgaaccgggcttcgcgttgaagcagatgagcgacttggaaccgaagttcttcgcgccgaccgtcaggtcaaggtcgacgtgatagtgaatcggcgcttcgataacggccttacgttcttcggcttcaatacgagtgagattagaaccgggcatgacttcaattactccttacggtcgtccctggataatccggactacttggtttctacggtttcgacgtcctgggcgatgtcggccacgacgggcacgatcatcggcttgcggtgcagctggcgtgcaacccagctgccgagcgtgcggcgcatggtctgctgcagcttgtaggtgtcgcgcgtgccctgcatcatctggtcgttgagctgttcgacgatctggtgacggaccttgtcgaactcgctttcgtcctcggccacggcgttcaggtagatcttcgggccggtgacgacctcctggttgtcggtgtcgaccaccacgaacgcggagacgaagccctcggtgccgagaatgcggcgcttttccagctcctcgtcggtcagctcgccgacggaatcgccatcgacgtacacgtagccgcacggcacggagccgacgaccgcggccttgccgtggtagaggtcgaccacatcgccgtcttcggccaagaccacgttctgcgggtccacgccggtcttgacggcgatcaggccgttggccaccaggtgacggttctcgccgtggatcggcatggcacacttgggcttgacgatgttgtacatgtacagcagctcgccctcgttgcagtggccagacacgtgcacggccgcgttgtcgcggttgacgaccttggcgccgagctgcacgagcttgttgatcaccttgtagacgccgtgctcgttgcccgggatcagggagctggcgaggatcacggtgtcgaattcgttgatgtggatgtcgcggtggttgccgtcggcgatgcggccgagtgcggccatcggttcgccttgggagccggtgcacatgaagacgagcttgtcgtcctggatgtcgttggcctgcctcaggtccacgacggtgccttcggggatgtgcaggtagccgaggtcggcggcgatggacatgttgcgcaccatcgaacggccgacgaacacgaccttgcggccgtacttgtgggcggcgtccaccacctgctgcacacggtgcacgtgggaggagaagctggcgacgatgatcttgcgggtggcctgggcgaacgcttggtcaagggctgggccgatggaggtctcgggcttgacgaagccgggcacctcggcgttggtggagtccatcatcagcaggtccacgcccttttcgccgatcttgccgaattcgacgaggtcggtgatgcggtggtcgagcggcagctggtcgagcttgatatcgcccgtgtcgatcagggagccggccggggtcttgacatagacggccagggcgtccgggatggagtgggtgacattgacgaattcgaggtcgaaggggcccaccttgagcttctcacggccggagacctcgaccttggtggggttctggtggtgttccttgcacttggcgtccacgaaggcgagggtcagcttggagccgatcagcgggatgtccgggcgcagcttgagcaggtagggcacgccgccgatgtggtcctcgtggccgtgggtgagcaccagggcgtcgaccttgtcgagacggttcttgatgtagctgaaatcgggcaggatgagatccacgcccggctgctcctcctcggggaagagcacgccgcagtcgatgagcagcaggtgaccgttgtattcgatcacgttcatgttgcggccgatttcgcccaagccgccgagcggcgtgatgcgcatggagcccttgcggtacttcggcggggcgatcagcacggcatcctgctgaggtgcggtggcctgccgggtggcgttgatcttacgggacggcgtacggctgttggatccgttggcgttgcggccgcgcgcggaaccgcgacggcgagaattcgtgttcttgcttgttttcttttgttcttgtgccataacctttttgggatttctgttgtggtgcctctgctctgtcatgcaggggcggcgggctggcaacccgtatgcagcgtttcgggcttacagcagtccggcagcgcgcatgccctcttcagccttgtcaagctgagtggcgtcgggaccgatgttcggcagacgcatggtggtggaggggataacacccttgaccttgagcgcagccttggccatgacggcctgatagccgtcgccattcaacgcgtggacaaggggggcgagctggttggcgaggcgacgggcggtggtgatatcgccacgatcgaatgcctggacaagctgctgcatggggttggaggcgacgtgggcaatcaccgaaatgatgccgacggcaccgatggagaggaacggcaggaacaggccgtcatcgccggaataccaggcgaggccggtgcgctgctgcttctccactgcggctgcaaggtcgccggtggcgtccttgacagccttgacgtgttcaagtccggccaatcggtcgtaggtttcgaccttgaccttcaagccggtacggccgggaacatcgtagacgatgatcggcttttcggcggattcgtcgacggccttgtagtggccgacgataccgtcctgcgaggggcgggaatagtaaggcatgacgacgagcaccgcgtcggcgcccgcttcctgagtctgttcgaccatacgcacggtgtgtgcggtgtcgttggagccggcgccggaaatcaccggaacgtcgacgacctccttgacggccctgaccagctcgaccttctcatccatatgggtgacgggcgattcaccggtggtgccattgaccaccagaccatccgcaccatcggcgacgaggtatttggcgagcttctgcgcggcggcgaaatcgacgctgccgtcggatttcatcggggtgaccatagccggcagaatgcggccgaaaggtgctggctcaagaaggtgcatgtcatgctcgctcatagtgttcaccgtacttcccattgtggactcttacattacgtaccttgattgttgctgaatgcgtggcattatgaccggaaccggtggcaatgccgtgatgcgcgtcccggcgcgcttccctgaccgaattgcggggtcgactgcgggtcgattacaggtcgaggaagtggtcgaggccgatggtcaggccggccggagcgtcgccggcgagcttgcgcacggcaagcaggacgccgggcatgaagctggtgcggtcgaagctgtcggcccgaatggtcagctgctcgccggcgttgccgaagagcacttcctcgtgggcgttgaggccgcgcagacgcacggcgtgcacgtggatgccgtcgaccacctggccgcgtgagccgccatcggtttcggtggcgtccggcacgggggcgagtcctgcggccttgcgcgcttcggcgatgccgtgggcggtgtgaatggcggtgccggagggggcgtccaccttggtggggtggtgcagttcgatgacttcggcggattcgaagtatttcgcggccttggtggcaaagtagtcggccagcacggcggagatcgcgaaattaggcgcgatgaagaccttctgggtttcgggcttcgggccgttggcgatggcggatttgacctgggcgagtttctcgtcggtccaaccggtggtgccgaccaccacgtccacgccttggccgatcagggtcagcacgttgttcaggctgacggacggcacggtgaattcgacgaccacatcggtgttgtcggtggtgacctgggtcaggtcgtcgccggcatccaatgcgagcgccagctgcgtatcctcggccttgttcaccgcttcgaccacgtgcgagcccatgcggccctttgctccgaccaccgaaaccttgatcatgtcttcttccctgtctacccgtacctgcccggcaatgtacccggaacgttttccaatcggcaatcagcctatcaccgccaagccctcacgccaatatcccgtccacagaatcgagctccctctgacaagccgaaccgtgaagaaaacgccggaggcgtttttaggtgagggcgaacgacagtgagcaataattcagttggctgaaagccatcatttaattgcgttcgagctggccgtgaagcggactgagggagagaccccggcgaagccgccaaccatccatcgggcgtagcccgatcccgtttcacccacgccgcttggccaaggcccatccggccaatgccaatggcacggacgccagcgtgaagatgaatggcagcatcatgcccacatgagggttggaggcgtcaagcacaatgccggccacggacgagccgatcgacgtgccgaccgtgcctgcggtggttacccagctcagtccttcggtcagggattccgccggcaccagatccttgacgatgaggttgccggtggcgaacgtcggcgagacggtcaggccggcgaggatttcgaagacgcccagcaggatgagattgtccattgacagccggaagaacacgtagccgacggtcagcagcgacaggaacatcaccatatgcgcccaatgggagcctttgagttggcaagagccgaacaccagcgcgccgatgcacgagccgaccgcgaacatcgccaattgcagaccgaggaagggctcaagtcccatggatttcatggtggcggtaatggacacgtcgaaggacgtgaagctcatattgaacacgatgaacacggcgagcaacggcagtacgccggcatagagcaatacgcttttgggcttggcaccgctgcgtttgagctggcgcagggtcagctggtcggcatcttcgcttgcagcggggctgccgtcatcgtgcgcggccacggtgacctgttccacgatgaccggcggctgggtggatttcagcgagaagaatatggtgccgccgatgccgcatgccacggtgggcacgaacagttgggataccggatgcacggaggtggccagccaagccgccagaatcggccctagaataaagacgatctcgtcaatggcggcttccatggcgtaggccgtgttgagcagatgttcgccatcttccacaccgcgcaacgcataggaccagcgggttcggaccaatgcaccgaatgagaactgcgtcagacccatgatgatggccagggcgaacagcagcggaatcggcacgcgcaccaacgccgcgaaggcgaaggcgagcatggccacgatctgcacggcgagcgcaagccggcccacgcgggcttggccgaaacggtcgaaggcgcgggcgtagaacggggtgacgcagctcatggccagcacgtaggcggcgctcatggtgccggcgatggtccaattgtcgtagagatggttgagcgccagaacgatgccgagactcatcatggagatcggcaatcgtgccaccgcgccggacaggcagaacgccttggctccgggcagcatgaacaggcgctggtagggcgagtgggcagcggacgacttcgaaaccgcgcgagtcgtggacacaataactccttactggtgcgttgtccggcacgtgcgcccgcccacacgtgccatccgaggggtagcggttcccgagcaacgtcacgcggtgcgtttcaaccgcggaccggtacatggcccgtcgtcttcatcgtcggagatgccttgcgatgcataaggtctctccaccggtgaaggccgtccgatgctgtacaggtcatgagcctttgggctcagtcgttgtcagattgttcgggaatgccggagctcaactcggtaaggatttcctgtttggttttcgcgcgggcgtgaagctcgcgcaagccctcgtcgggctcactgacatagtagagagtggcgtcgatactgtccaattccacaccttcgaccgctgccagcagcagtcggtacatgtcgagctgggcgagtttgcgggtgatgtcgtctggcttggtgggccgacgaccggttttccagtcgaccacggtaaagcgtgcggtggtgctggacgggtcaagtccaccgatgaataccgcatcgagtttgccattgaccaggcccacgcccggcacgtccacgacgatggcacgctccgtccacgccgggatgcgcttggcccacgatgattcggccagtctgcgctgccacgccaccagcttggactcggtggcattgtcgctgcttatggaagtggcggaggcagcggctgcggcggatgcggattgttgagccgtgggctgtgggacagcaggctgccgtgtggacggcttgcggcattgccgctcccgttcggccaaatcggccaacatggcttcccgggaaacgaatcccgcatcctgacctgtatgcggcatacttgattcggcttcatatgccagtaccgcttcatccggcttaccggcattgatgaattgctcggcccacgcatggaactgcgtgccggcctcggccgccggagacgatatgcgcggaatcgggcggataatgctacgccagtagaggcgctcctcccgttcgttcatgccacctacgcgggcttgtaggcttgtcacgttctggcgtcctgcggccagaacgcgttgcgccttggctttgactgcctcatcaagcgactggccgctggcggcatcggccatcaaatcggcgtcgtccaccagcaattgtgcccgttgcaggagtgggccggcgtcttggtgctgctcaagtgacgaggaatctgcggcgatgacatcgatgccgcgtgacagctgttcatgcaccgcgtcgctgagggtagccggccacggcaattcggcggcggcattcgtctgcgtaatcggcgtttgccacgcctcccccaccacggcgtcactgtatgccgcggcatgctctccgataaagaacccttcgggaggggcaatcgcttcgccttgcgccgagatcagcatgggcttcccggcattggcggcttgcagccgttccacacagtcctgagccgatatcgcatgttcacgggcttggagcgcgtcatgcacttcaagccagaaattggatggctgagcggcgcgagagcctttgggcaccactgacgggtcccgcccggattcgcccgtataggcgcaataggtcatcagggcatcttcccgcgcacgggtaagcgccacatacatcaatcgacgttcgtcggcatgcagccgacgcccatattcctccgcctgcgtcaaataccagccggatgcatccacttcttccacgccatcgccgaattcgcgcatggagccgaacacttcatcatcgataagctccacatcatccaaagccgccaacgatgcgatggggtcggcttccacatcggcatcatgggggaatcgcggcaaaatgccggcatcggcgcgcataggcacgggcacggcggtggggttggtgagccaggagtcggcggtctcatgatattcgggtgcggtccagtgaccttgctcggtgcctcccgtatggtgttcgtccagcacgatcttgagatggtcgccctgattgctggggaatccgccggcggtaagccccactaccgcaacggcatcccattccaaccctttggactggtgtacggtcatcagttccacatccaccggagcgtcggggagactggcggcttcatcctccaccgaagccagatgatccacccatgtgatgaacccatgcaacgagggagtttgctcagcggcaatctcttgcgtgtacgtatccaccaaatccacaatcgcatccataggcatatgcgccaaagcgggattggcgcggtgctgcggattatgcagcacaccggccaatacggtgtcgatgtcaagatccaacgcttctatgccggcgcgaatcacgtcgcccagtggccgcccgacggcatcatgcacctgacggagcatcaccgcggcccgggttatggcgttgcgcccgtgtgcgctcaaccgttcaagcagttttaccaggtcgccgcgtagcaatacgtctggcaggaataccgcattggccacctgatcgcggtactcacgcaccacagccgcccattcattcgctggtgtatccggttgggcaaggccggcctgcaccaatgcttggaagcgttgttccatgttctgttcttcagcaaaacgggccaacatggtcaaatccgctgcggacatggtgaatcgtggcgtggccagcaagcgcatcagcgatcccgtatcggtgtggtcggcggccacgtgcagcaacgccatcagatcgcggatttccggacgttccagcagcgcggaatagccgaccacgaatgtggtcaatccggcctgttccaatgccgcctgatattcgggcatatgtgatttggaccgaaacagcacggcgaccggcgctttctgttcgcccgtcatctgttcctgttgttcggctgcggaacggtgccgtgcgatggccgtcttgcagaaacgcactacggcgtcgatctcctgcccggccgtggcgaagcccagtactcccaatgttccttcgggggcatcaggcatggggtcgagcgatgagacatcgacctcacgcatcaatgagctggagggacgcgacggattggagcgcaacggcagcgtgagattattggcggcttcgagcactatacggctgttgcgcctggtgacggacaacgggaatggcttgtatccggcaggcaggtggaaatcttgctggaacatacggaatgcaccagggctggcaccacgccatgcgtaaatcgactggaacggatcacccaccgcgttgacggcggacctccgtgacgcatccacatggaacagtgctgccagcagagcggcctgcgtggtggaggtgtcctgatattcgtcgagcagcacatggctgtacctgcggcgcgtgcgctctccgatggaggggaagcgctcgataagctgatacgcggcaatggtgaagtcggagaattcggccatattgcgttcccgcttggcttgggcataggcctccaccagctggagcagaatatcgcgtttgcgtgtggtctccagcagcgcaccgcaatgataggcgcagcgggcatgcaaatgttcggcacggtcatcgagcttggcttgccagctggcgtcggtatctttcttcagtcgtttgatcttggggattttcggctcgtcctcgggcatgggttcgtctgcgacggcttgctgcaatcgattgatgaatgccgaatcccattgccgtacttgattgatcgcatcatcgaagctggtgcagccggcaccgatcatggcactgccaatggcatccgacaacgccagaacacggttcgccaaactggagaaggcgccaaaatcctcactgaacgccagatccatgtgactgtcgatgacttcggtggccagttgaagcgctccggctgcgctcaatggttgcgtgttctgatcgaatccgacaagcagtccatattggcgcacgatggtctggaagaaggcgtcatacgtgaaaatggccggcttgaggaatgcccgatcagacaccgtggcggtcgtagagcccgccatatcaccggccactgcggcggagacgcgttccagcagttcgcctgcggccttgcgtgtgaaggtcaggccaaggatgcgttcaggtgccacacctcgattgataagcgcgatgatgcgttgggtcatcgtaaaggttttgccggaaccggcaccggcaaccaccagtacgtcagcatcgactggcgcatcgatgatggcggcctgttccgcactgggagtgaacgtgctcatgcttgcctcgtttcgaaaatcgtgtcgatctggcctgcacaggcagggcagacgttcttcatacggcagaatccgatatgggtgtcttgcggatgggcctcgatgatggctgatctgctggccgccgcggcatagaatacgcgggcgatcatggtcagcgaccataacgtctgcgtaccggcgagcgcggcgaattgcgcccacgcttcggcactcacaccttcgggaggagtagccggatctatggcgggtatgtcgaagaaacggttggggtctttataccagtatcgtggcgtgaacggttcggcattcaacgaaccatcagtgaacagcggcggctggaaggcaccttccggggcgtagcttctggctggtgccgcattctgcccgacatggaacagcgcgctttggctgatatgcggcattgcggcaagtgccttggcaccgcgcggcccgtcttcggggaacacgaggccaagctgatagcacacgagctgcagatcattgaaaatctgtttgaccgtgggcgttctgcctgttttgtagtcaatgaggcgaatgcattcgccgccgtctgcgagtacgcgggtttccatacggtcgatgcgcccggacagtctcacggtcagatgctcgtccatgccttccggccaccctccgaccagtgctcccatcagacggaccagcatgttccgatcgatcgggtgcatgccgggcacggcattgtatgcgtcgagtatgtcacgcacatcgaatcgtgcggcaaactcccgttcgcattcggcaccggccaatgcgccaatgctgaagttgctggagttcttgccaagatacgtttccggatcggcgtcgctgcgcacaaagtaatcggcgatgttgcgcagggcatctgccgcggactcgtccttacgggtggcctcatagcggttccgggtgtcggctatggcattcggatcggggcgtttgctctgatagatggcattaagccgtgccgtgacagcctcgatgcggcgttccgtgccggccgtggagtccaagcccagtatggccaacgtctgggcattgtgggaaagatggtccagcccttcctcgctgccttgctgtgcaaccgcatggatgagggttccgaagctggtggccacggagctggggcgaggaccggcgaaccggttctccagcatccagcacaccggacatgcccataggctgtcgaccgccgatggagacagggtgaccatgggtgcggcctgcgcatccgtcttgcctttccccgtttggataccgtcagactgtacaccgccagatgacgcgctgtcggatgaggcactgtcggatgaggcactgtcggatgaggcaccgccagatgacgcaccgccagatgacgcgctatccgattgggccggcgattccacgaacgcccagctctgcggatttgcggcgcgcacaccatgctccgacaggagtgtcaacgcaaccgcggcgtcctttgcggcagcctgctgcggttgagcagtggccagaaccgcgcgggcggcgctgaccaacccacgtgggtcggcgtccaatccggccagatcatattcggcggatcctgtatgcgcccccactgtggtgaaaggcgcctgttgccggttgcgcggatagtattccggcagatacccgaaaagaaagtccgaggggctcatgctgtcgttccataccgcgctgatcatgattcgccgtgcacgggtcagcgcgaccaggaaacccttcttctcgcccgacagcacagccgcgaactgcggatcatgcccggttttgtcactttcttcaagcgctcccctcagcacgagctcggcaaggtcttcaccaccgaacatggtgttgcgcccggcgaggttcggccacacgtcttgctggaccaccggtatccacgcatatccccagtggcgtccggccgcgcctgccggcgtggtcaatgtcacagcgtcttccaccggccctatgtgggccaaggaatcggcctgcacttccatgccccgaacctgtgccatgaatgacgtgatgtctcggctggcggtggaatcatcggcgaactggaacaggcgcattgccgcgtccagccggtcattggccgtgcgcccctctgccgtgttgaataatgccgcacgctgccagaccggtgccagaccggtggcgttccaggcaacagacagtgcataacgcggctgtacgcgctggcttgccggcagccgctccaagccggaagcaacgctgcccaccagatgccacaggttcgcaaaagcgcgggcctgagggtcgttgccaagcaccgcatggatggatgcgagcgcagcctgcgccggcgcggcggcatcatcaacggcaagcatcacgtacagcgcgtcaacgccaaaggccaagtcatcgtcggacggttcaccgagtatttcgacagacactggcgacggaaccactgatgaggatgtttcacgacctgtttcacgccgtgtttcatggtatgtttcacgcaatgtctcccatgccgtcgtcagagaggtcagcatggcatcatccgtggcgagatgcgccagcgactccagcgcgctcatggccaattcaatcggagcgagccttgcaggacgcccttgaccgggtctgcccccggcactcaccaacgggccgttcatcaacgtggccactctagtccttatatatgccgcgcaggaagccaacgtcatctggcattccgccattccctcggcacgcaatcgggcaagctccacaagcgcgaacaatccctgcacgaaagtctcgtccttcaaaggacgggtgaccgacgaataccgcaccggcacgccatctcggcgcagtcgttcgccgaacagccgcacggcggcattgtcgtgggtgatgaccgccatgtcgttccaccgaatatgccggtcgagatgcgcccgcttgatgcgccagaccacatcatccagctcctcacgtgaggatcggtacaggccggcggtcaccgtgccgtccgactgataattcgctgcatcgactccgcccagcatggcggtcagcttgccgggacgctcggccggaggcagcggctcgtcttccggcgagggaatcgacagcgaaatacgagacgcgatcacatcagccatcgtcatgtgcgactgatcagcgccggtactgccgccaaccagctgttcttccttggctttcagccacccttccacggcacggcgcatcagatattccggatacgatccacggaaggtctgcaccgattcatccgggttgccgaccagcaccaacttgacgccggcattccccaactcctccaagaagcgcatgccggccagcgtggtgtcttgaacatcatccacaaccagcagccggggcaagcccaacgcctccatacgcataggccggtcggaatcatccgcgtgatcggcggcgaatgcctcatgcaccacacgagctcctgccaccagcaaatacgaggcatccaaacggtattgccccggatatgccgcgctttgggctgcaatatattcacggcgcaacgcgaaagccaaacgccattgcaccgacaatcgcgcgtcctccgtcacggcgtccaagagacgtggctcttcgtgaacgcctacaccgagctcgtccaatcgggccagcatatcgcgcaactggctgataaacgcatctgaaataccgcgagtgaacctatccgcgctggtcgagccgcctgccgacgtcggagacagcgaatccgacccttgttgcgagaggcttgattgtgcggaagcggccgagccgggcatctcgccggcaccggcatcgcgtatgagtttcgcccagtcatcctgggcaaagtagacgcgtagcaaatcacaggtgccgcaatcatctcccgctacggcatggcgcagatgcacggccatgacttgacgcagcaaagcatcctgttccgcaccgttcaacaatcgaggcgacggcaatccagttccctcgcgcgaagctgatatggcccggaatgccacggcacccagcgtggtgaccggcctggcctgcacggaaaacccgagctcacgaatcacccgattgcccaatgcgtcggcggccacacggccggatacggccatcaccgcctgcgtgccaccgtagcggcgcagccccgccatcaacaccgataaggcgaattcggttttgccgcttccaggcgtgccgacaatcagcctcgccgctccatcacggtcgatgccgtccagcactgttccaggttcaagtctcgtcatcatggctccagcctaaacccgaccgtcacagagggaaaaattttaccgaacccgacgaagaatcgtacccttgacggtatcctgtagaacgaatgcagggagagcgcattttccaaggagggagggaacagatggccaatattccgatgaggccgccgaagctgcccggatatgatttcgtccagatgttgggaagcggtgccaccgccacggtgtacctatataaccagcgtatgcccgcacgcccggtggcggtaaaggtcagcgccaaaacccttgacccacgggccgctgccctgttcaaccgcgaggccaacttcatggccaagctgtcatcccacccgtacattctgccggtatatggtgccggcgtcacctccgatggccatggctacatcgtcatcgaatatgcgccgggcggcacctacaacagcatcatgaaggcccggtccatgacctgcgagcaggtactcgacctcggcatcaagctgtcaagcgcgctgttcaccgcgcatcgcagcaatatcatccatcacgacatcaagcccagcaacattctcatcacctcgcagggcttgcctgttctgggtgatttcggtatctccaccgatgtgtatgaccgtaccgaaaccggattctcgccgccgtgggcaccgcctgaagtgcttcagcatctgaccaatggttcggaagccgccgacatctattcactggcggccaccctgtacgccatgttcgtcggctgctcgccattccagcacgaatatcatccacgttcgcaatcggaactgatttcgctgatcgtcaaccagccattgcctcgcctcaaccgccccgacgtaccggccgatgtggaagcagtgctgcgccgggccctgaacaaggaccccgaccagcggtactactccgcgttggagttcgcacgtgccatgcagcgtgtgcaattcgcatatttcgggcatgccactcccgttaccgtggaagggatgccggcctaccccaaagacatcgagcgtcggcgccgggccacggaccagcgagatcagatcacccgttcgtcacggcgatgggtcaaaccggtgggtattaccgtcggtatacttgcggcgatcaccgcagcggcactgatattcgccttcgtggtcgttccccgcatggacagcgccaccggatcagataccaaacaggtggcgacgcccggcaccaaggatgatgacaacaaccgcaataatcaggatgacgtgatcaccgataccgcgaacgcccagattccttccccggagaatctgaacggcacctatgcggcggatgggtcatccgtgacgttcacctggacgaatccagacccgcaaagcggtgatacctatacgtgggccatagtgcagggcagcaataccgaccagagcgcgcaaaccgtcacaacgtcagatcccacggtgaccgtcaacgcgcaggaaggctcgcagacctgcattcaggtgtccattgtgcgcaagaaccgccagatgtccgtcagccccgccatcgcctgtgcggccaagccgcaagagtgatccgctcgccactgccgggcataccaccttagcattgcgtatcgcatcaggcatgcgcccggcagtggcgaattcaccaaatggacaacaggaacggcaggtattggaaccgtaaagcgttgtcattacactagcaaccagagaaaccagggttcagggagttcagatggccacatcgtcccagtcatacgatcgtcgccgacgcatcagcgcggctttgcgccgccttatgccctccggagggcatacgtggacggttcccgtaatcacgctcctgctgcttctgggacttgttgccggcgcggtgatcatgagcaccgtcacgcgccgccatgtgcaactggacgatggcaccgtgtgggtcacttcgctgaagaaccagaaggccgcacgattcaacgtaaagaacaaggaggccgacgccggcgtctcctcctccgccccacgattcgacatcgcgcagcataatggcgacaccatcctgaccgaaacgaccaaagcctccaccatcaaggcatccacggtcagcaccggtgtcaagaccgacatcaaagccaacaccaccactgtggtcggcggggataccgtagccctgatcaacgagaagaccggcaatgtgtggacctgcttgtcggaaaaccttgattccgtggcccccaccacttccgatccgaaaatgaagctgggcgagggcgggcgcatcgtagtaacccacgatggcaaggtctacggataccgtccatccgacggtatggtgctgcgtcttgacaatcccagcagcgccaaggccaaaaccctcgaatcgctgaccgacggcaagcagcagaccgttgaaagctttaccgtcatcgggagcacgccggtaatcgcaaccggcaaaaccgtcatattcaagggcggccgcgtcgatgtcgacacgaccggcaccctcacccttcaggagcctcccaccgatgacgtacagtccgattgggtggccgcggcatcaccgagaggccttacgcttatcccgttgaagtccaatgccaaggcgaatttcatagccaacgggggcaaggcgaatccggcacgaccggtatcgtccaagggctgcgtgtactcggcttggagccagaaggccagcaactacattcgcgcctgctcccccgcggataccagcgtcaagccgcaaaccctcgaatccgtcaatactacttccgaattggtgttccgcaccaaccatcgccttgtggtgctcaacgacacggttaacggcaatgtgtggaaccctgaggattccaccaaagtcatcaaaatacagtggaacaaaatacaggccgagcagaccgagaaagaacagcagaacaacgactcggccaacaaccaccacgacttctccaagacctgttccgcacaatccggccaaatcaaagccgaggatgatgaaatcggcgcacgagccggttcggaacagattctcgacgtgctgcgcaatgacgagcagaccgattgttccgtgcttaaaatcaccaaggttggcgcaccaaacaacaaagacgtcaccatttcgccgatttacgacggccggtatctgcaactcgatgcctccgccacatccgcaggcaccgttacctttacttacgatatttccgatggccgcggccagacctcttccgccacggtgaccgtaaccctgaatgatggaggcaaccacgctcccgtacagttcgacactcctcccgagatcgatgtggagcagggagccagttataccgccaatgcgctgagcagcttcaacgatccggatggagacccgctcactctggtctccgctgtggcccagaacaccgaccaggtgcaggtgtccacccgagccgacggccagcttacgttcaacaccggtgcgctggcgtcgggacgcgtgggcgtcgaggtcaccgtctccgacggcacggcgaccggcaccggcatggtgtatttctcggtcaagcccgcgaacaccttggccgcggtcatcgacccggtagcgaaaaccaccgttcccaacacggataccgtcgtcaagctgtcctcttacgtgcatggcacttccttgcagccggcacagctgactcaggtggatacgcccaacggcgcttcgacgaccaccaatgcggcggatatgtcgttgacgttcaaggccaccaatcccggcacctattatgtgccctacaccattactcaaggctcgattccggccaccggattggctcgcgtcgaggtacagcccgccaccggcgaggccgccaaaccggttgccgccaacgatgtcgccctgcttggcgcggataataccgccattgtggagccgctcaccaatgacgtcgatccgatgggcggcgtgctgtccgtcaccacggtgagcgcaccggccgactccggcatcaaggttggtctcgtcagccataagcgcgtgtatatcactgcgcgtcaggtgcccacgaaacccgtcgcccttacctacaccgtggccaacgcctccggaaccgccaagggcaccatcgtgttgcagccaccggctctgaccacctcgaattcagtgcccaaggccagcaatatcaatgcccaggtgcgcaccggcggcatcgtgtccgtggatgtgcttgaccatgtggcctactcggatggcaccacggtcaagctcaagaacaacctgcaatacgacaaggagacgttcaagggtctggccttcgtctctggagacacggtccgctaccaagcatccagcgagaccggcaacttccccatcacctatacggttgaagacaatctgggtaatgtggcttccgccaatatcaccattaccgtgcataagagcgacgcagcgagcaaggccgcgccaaccccgcatgacgccgaagcgcaggttgccgccggacagaaggtccgcatccccatcacactgaccggcatagacacggatggcgacgacgatcagctgttgggtctgggcaacaaggcacccacgctgggccgcatatccgaagtcggttccgactacttggtctatgaagcgtatccggattcgtccggcaccgacaccttctcctatgccgtggaggattggaccggtcagcgcgcacaggcgcagatccgcgtgggcgtattccaaggatcgtccgactccggcgtatacgccagggatgacgaaatcacgttgaggcccaatacggccgcaaccgtgccggtcgcgcagaacgacatctccggcgacaacaccaatctgaccgtcgacaagcatgtcgaggtccaaggtctcgacggggtgagcgcgaaagacaacatgatctccttcaccacgcccggcagcgccaccaccgcctatatcgcctacacggtcaaagacaaggccggcttgtccgatacggccaccctcacggtaaacgtggatccgaatgccgccatcgagccgcctaccgcctacgactatcgtgtgccgtccgccgccaccatcgataagaagtccgtggatgtggatgtttcccagtggatcgccaatccttccggcacagccaatgagctcaaggtcggcgtgcatccctccgccagcgctcacgctcacgtcaagggcggtgagcattcgaccaccatcaccgtcgacctgacgtcacaggcgcgagccgtgccttacacggtgaccaatacgaaatacaacatcacctccaccgcgttcatccaggtaccggcctatggtgtctttccgcccacgttgcgtcccaaggcaccggaattgaaggtcaattcgcgtgagaccattgaaatcaacatcaatgactatgttcgcgtcggtgccggcaaggaaccgtatatcgaaagcgctgattccgtcagcgccaccaaggcttccaactccgatttctacgtgaacgacaagaccctgaagttcactgcggcaaaagactacgcaggccccgcctccattacctttaccgctgtggatggcaagcagggatcggataagaccaagatcatcaattccgcagtgatcactctccagatcacggtgataggccgcgatgtgccgccgcccacgttctcgtcctccactattgatgtcgaggcgggcgcggaccccaagaccgttgatctggcggcgctcacccatgcaccgtccggcgtgtatgacgacgaaaagcaatacacgtattccggcggaagctcatcgtccaggcaaatcaccgcaaacctgtcccgttccggtagcttgcaggtttccgccaccaaggatgccgctcctggcaccaccgcgtccattcccgtgcaaatcgcatacggcgcgggcaccgtgaatgccggtgtgaccgtgcgcgtagtgtcttccacccgtccgctggcacgcgtcggcgacaagacgctgaagatcaaggccggtgccagcgatgccgtgaacgtgcttaccggcgcgtacaatccgttccccgattcctcgctgaccgtcatcagctgcaaggcggatgacgccgccaaactcactatcgccggatgcgatgcctccggaaacgtcaccatcgccgtcgcatccgatccgggtgcttccacgaacaccgtgctcgtcaccgtgcaagacggcagcaagtccaaggatcgtgaagtcaccgcatcgattaccgtgtccgtgatcgacaagcccgagccgccactgctctcccccgtagccggggaaccgcaggacagcgcggtcagcctcacatggacgcccggtgccgccaatggcagcccgatcaccaactacaaggtcagttggaccggcgccgccaccggagagaaggattgcggtgccgtcacctcatgccaggtcacgggtctgaagaacggcaaaacctattccttcaccgtcgccgcgcgaaatgacgtcggttggtccaaaccgtccaccgccgtcgaagccacaccggacaaggtgccgtccgctcccaccgatgttacggtcacaggtggcaataaaaccgccaaagtgacgtggaaagcgccgagcggtgatttcagcgccgtcgacaactattcagtgaccgtcaccggtgcaggtgctccgcagaccaaggaaaccggcaatacggccaccgagctgtcgtttacgttcaacaacaacgacatttccgatggcaccgccattacggcgaccgtcaaagcccataacaaaatcaattggagtgccgagtccgcctcatcacagccaaaggacatctggggagacccggatgcgccgaccattgcgctgtcgaacgacgacaccacaggaacggcgaaagtcactctcggcaacaaccgcaatgccggctgccggcgaatttccttgggaggagacatcaaggacaccatcgattgcagtgacggtggcgctacgttcgatatcaatgagaacgatttgaacacccgggaaatcaccgtaacggccaccgtggtgccgcagcgcgatgcttccgccggcacaggcaagagcaggtttgtcccgcagtacaaggtccagccgcccactgacgtctacaccaccggatccggcagtacatgcaccgtgcattggaccaagcaggggcatgcgcagtcctacaacgtgactgccgatggcatcgattccggtacagctactaaccggaactcactcgacttccgaatgagtccttgggccaaatgcaataccgcatcggtgcaacaggtgttcaacggcgctaccagcgatgccgccaccggaggcccgtacaatggcgctccttacacctatgagaagaaggctgtaatcaacaaaccgcaggagctgcgctggtcagacaacgctcacgtcattaacgtcaccggcggttcggttgaggtctatggcaagcaggccaccgtacaaatcatcatcaatggccaaccgttcacgtggaaccccggccagccattggacgtcaccgacttggccgtggccgccgatggcaactacacgtggagcgtcaaagtcaccggcgggccgggatactccggtctcgacaatacggcggacggcagcagcgtcgcgggcacacgcccctctgattcctcggaggggaccgagtcgctcaaatccggtaccgatgtcaccactttggccaagaacccttggattcttggtttcggtaataccccaatatcgtcaaccaccattcacaagcagtaggagaacatccatgagcgagaacatcgacgacgcgacgcagctgtctgacagcacgcagctatccgacgccacgcacttgtccgatgccacacatctggcatcggaaccgcacactggcaccaccccgaacaccgagacggcacagcaacccgttgcgttgcctaacctgccgcagcggccgtcacaagcgtcgtcagaaaagccgtctcctactactgatgccgcctccattcctgcgggcgatgacagcaccgtgctcaagccgcgcaaggacgcggcgccagccatcccacagcaggtcggcatgccggcaaagaccagcacgcccaaagtcgcgcttccgcacttcggacgtaaatccggcaagcaggccgctactgcgaatgctgcccccgccacccagacctcccgtcaatggacgaccacaaccgccggcaagaccgcagcatccaacgccgaaaccgtggctggtcgcgggccggtagccaatcagcaggccgccgcgcaatcccagccgcaatcccagccgcagcgtcagtcgagcaaagccgcgcaagcagccgcatcggcactgcccgccagcatcaattccggactactgccccagcccacggctcaggtccgggatttccagcagtccttcaatgcgctggtcgagaatgtctccaaggtggttatcggcaagaccattcccatcaagcaatgcgtcaccgcactgatggtcggtggccatattctgcttgaagacaaccccggcaccggtaagacccagttggcccgaggcttggccaactccatttccaccggtttcaagcgtattcagttcacgcccgatctgctgccttcggatgtggtgggtgtgactttctacgatcagaagcgcggagaattcgagttccgcgagggcccgattttcgcctccatcgtgctggccgatgaaatcaaccgtgcatcgccgaagacgcagtccgcacttctggaggttatggaagagcagaaagtcaccgttgacggcgtcacccatgatgtaccgcagccgttcatcgtgatcgcaacccagaaccccatcgagcagctcggtacctataagctgcctgaggcgcagatggaccgcttccttatcaagacgtcgattggctacccgggccatgatgtgtccgtcgatatcctcaagcaggtcgatatcaccgaccgtgcgcagaccatttccccggtgctgagcggtgacgatgtcatgcggctgcgtcaggtggccaccgaaatctatgtggatgatgcgattcgtgaatacatcgtcaggctcgtcgaggcgacccgccacaacgagaagatcacagtcggctcctccatgcgtggcgctttggcgctgacccgatgcgcccgtatctgggccgcggccgatggccgtgcctacgtggtgccggatgacgtcaaggaccttgcagtggccgtgctcgcacaccgtatcacgctgactccggaagccaccttcgatggcgcgactccggaaagcctgatcgcacaggtgctcgaagacgttccctcccccaccatcggttcctgatagggcctggaaaggtatccgaccatggcatctacatccgccgcattacgccgtcgccggcgcgctgaacgcatgttcaagcgcgcggtaagacgcatcagacggttcttcgcatcctacgtctcgcccttgggctgggcggtaacgggcgcaggcatcgcatgtcttattgcgttcctgcctctgggctggtatgagctgctcgtattcggcatcgtggcgatggtgatgatgctcgcggcaatcgcgctttccctcggcaacacacgcttccacgcgtccatcgccgtatccgatcatcgcgtgaccgtgggagacaccatatccgttatcgtcggcatcgacaacaccggcagaacgccgacaaccacggcacgcggatatctgccaatcggcgatgcgcatgaacgattcaacatccccatgctggctcccgggcaatccaagcaaaccgatgtggagttccgtacggtatcgcgcgcaatactgcccatcggaccattgcgcatccgcaagggagacccgttcggcctggtgcgtcacgaaaaggagctggccgaccgcatcatcgtattcatccaccctcgtaccgtgcgtctcgataccttgaatgccggcgtgccccgcgatctggaaggccaaccatccggccagatcgtggatgatgatctcgacttctacggattgcgcgaatacgagccgggcgacgacgtgcgtaacgtccactggctgagctccgcgaaaaccggcacgttgatgattcgccaatatgaagccacgcgccgcaccgacacctcggtgaccatcagcgtgaacccggatgagtacgtcaacggcgaggaattcgagatggcggtgtccatccactcctccatcggcgtcaaatgcctgctgcaggatcgcccgctgttctgtcacgcgggcaacgcgcacggccagccgcgcaacgccatggagttcctcgacaacgccagtgccatagagcctgatcgtgaggataatccgaatctcgccgagggcacgctgaagcacagtcctgatgcttcgttctattttttcactgttggatcgctgaaagacatcgagcaaatcaagcgcatgaccttggccttgccccgatcggccagctgcgtggtattgcaggccagcgccggcgccaatcgcggcatcagaagattcgccaacttcacattggccaccatcggcgaactcgatgatctcccactgatcatgggggtgctcgcatgaccttcgaccagtccagtatcaccaataccaataccgctgcgtacgccggatcgagcggcacatacaccggcacttcctccggcacgtacaccggaaccgccaccaccaccggctcctgggccgactccacacattcggttatctggatgaccagaggcaatgtgcttcgcggcatgggcctcagtcgccagccgtggggcaaacgaatcaccagcctcgtactcatagcggcgatgatgttgctggcgcaagccaatctcatcgacgtgtacggcggcgtggccacttgggcgatcgccgccgtaccggccaccttgctgggcgcgatcatcgctctggcgggcatgttgccggcgttgcgactgtggtggcaaatcgtgtttctggcgtttgcccaattcatcatcggtccggtggtaacgctgagttccaccacgtcccattacgtgattcccaccttgaagaccttgagttcaggttgggaaatgacgtttggctcgttcaagtacattatttccgtcgatccgcctctgggcacgcaagacggcgtgctgctggcggtatggaccatcggcctgtggcttacgttcctcaccggcgtgtttgccattaatgccaacgcatggttgtctctggtgggagtgctgccccttgcggcggccgtggccgtatgtgctctgctgggtacggacagcggctggcaacgtgccatctgcggcattgcctttgccttgctgctgattatctggctgtcttggcgtcttgaactgctggaatgggggcgctggatatccgcgctgatcatcgtcgtgctcgctgccggccttgctttcggaggcacgttgctggtgccgcaggaccgtttcgtgctgcgtgaccgctacgatccgccgttaagcccctacgattacaccagcccgctcagcggcatgcgatcctatatcaaggaccacaaaaaagacgtgttgctgaccgtccataatctgccggccggaacaccagtcaaacttgcggtgatggatcgattcgacggcacagtatggaacctgtccgattcttccgaagccacggactcctcgaattatcatcgcgtgggcaccacgatcaaggcggatgagcagggcgaatccttcactgcgaccttcaccgtcgatcagggattgaccgacacctggctgccgctggcgggagcggccactggcgtgagcttcgccaacgatgccgacaacggcaatgacacgttctactacaacacggataccgattccgccattattcccgccggcacgcgtaaaagcctcacctataccgaatccggcattatcgcccgcaagcccaccgataagcagatcagcagtgcggccgcggcccgcatcacccaaccggaagcccaggatgttcccgattcggccagcaaactggccacgtccattgccggcggacagtcctcgggcggtgccgcagccacggcgttggccgacacattgaaagactccggatggttctctcatggactcgaaggcgattatccctccgatgccggccatggcaactaccgtatcaacaagctgctggcaggcacggccatggtgggcgactccgagcaatatgcctccgccatggcactgatggctcgtgagctgggactgccctcccgtgtggtcctgggcttcctgccgaaaaacgaggatggcgaaatcaccgatgcccgcacggagaagacctcgggcaatggcaccaaaatcgaattcaccggcaacgatgtcaccgcttgggtggaaatcaaattgcagggcctgggatgggtggcgttctatccgacgcccaaggagaccaaggtgcctgatgaaaaccagaacctgacgccgccgaatccgcagacgctggtccggcaaccaccggtgccgttgaccgatccgctgcgcgatcagacgcaagccaggggccaaagctcattggccggcgccgacgccgatgattcgccgaccaacctgttctgggtgcggttctggcgagtgacccgcaaggtggccctgtacggcagcccattgtggaccctactcatcgtctgcggtctgattctgatgttcaaggccatgctgctggcgcgagcgcggcggcatggcagtccgaaagcccgtgtggcagcaggttggaatgccatacgcatgcttgccgagcaaagcggcatcacagccaagggcactcgtcgagatcaggccggtgccatcgcccgtcaactcggcacagatgaccaggctttgatccagcttggccgggaagccgactacgccacgttctcggggcaagacattgaatcgggccaagccaccacatattggacaggagtcgaccaattgcgcaaggcaatgctcgcttctttgccgcgtttcaggaggatacgtacacgactttccctgaaaagcgtggctatactgtcaaatagacacgcagccaagtcgcacacgacgcatgtcaagcgcgcgcgtaagaaggggaagacgtcatgaccacaggctccatccgtatcgcgatgaccagtgacgtgggtcttaggcgcaagaacaaccaagacaccggattcgcccaacagggcgtgttcatggtctgcgacggcatgggcggcggcaaaggcggcgagcaagcaagccagttggctgcccagcatttcgcgcagctggcttccatgccctcgcgcacccgccatgacatcgacgacaccctggcacaggctcagcacgacattctcgatttgggtgaccgtctcggcggcgtggccggtacgacctgctccggcctggttttgccccagccttacgcagatgccatcaatgcccacagcgcagctccgtttgacgacgccgactccccggatttctcggaccagacctatgtggtcaatgtcggcgattcccgaacctaccatctcagcccgctgccggatgccgatgcccccgccacggatatcatccccgtgtgggacgcctcctcgctgacccgcatcacgcgggatcattcccaacgccaggaggctatcgattccggtcagatgctgccggaagaggcggaggcgaccattccacgcaacatcatcacccaatgcctgggcgatccggacggcatagtgcccgacgtatatgttgccgatctgaccggccgtttcatcatctgttcggatggattgcacggtgaagtgtcagacgaacagattgcggccatcgccgcagcgcattccagtccgcaggaagccgtggacgccttggtggcggccgcgctcgatgcgggcggaaccgacaatatcactgtgattgtggccgatatgccactgaccgaacccgaacatcacgcgttcagcgcttttaaactggacgagggcgaggacattggcgccattgaagacgcaacactacaaacactacggaccatacgttcggcataaccgagcgaacataaggaggtaatcccatggttgattatgatgctgcggtcgctgccgtacaggatccgaacgcggacccgattctgttggcaaaaatcgcctacgagaatccggaattcggcgcaaacgtcgccgtaaatccgcgttgctaccccggcttgaagcgttggatcgccgaattcggcgatgagcgcgcccgcgagaccctggcgcaatacgggttcaccgccgaggcattcggcggcccggtccaggatcaggaagccccgtcacaggcggcccagcaggctgccgagcagcagcctgcagacgcttacgccgccgaccagtacgccgctgcccagcccgctgccgaccagtacgccgctgcccagcccgctgccgaccagtacgccgctgcccagcccgctgccgaccagtacgcagcccagcagcccgcggctcaggcggcattcgaggagcctgtggccaccaatccttatggcttcaccgccgaacaggccctgaccaccaccgaccagatgcaaatcgcccagattgcccaatacgcgcctgaactacgcgcctgcatcgcccgtaatcccaacacctatccggcactgatcgaatggctgggccagctcggcgacccggcgatcaacgccgctttggcttcccgtcagtgaaaggacggcatcatcatggccaaacttccctaccctccagcacctgaactgggttggtattctgacgatccggtggaaggcaccccggattccgcagttggcacagccgaaccgcagaacgactacgggcagcccagcaccgcggaagcggcaaccaatgccgcttttaccgcagagcccgccgccactgccgccgctgagcccactgccgctccggtagacaccacaccgcacgccgccgaaaacgacatcgaggattgggacagcaccgtgctctcctcgtcgttcacttccaaggcaccgaagaaaacgtatctgctgcataacgatgtcaccggccagaccatcgtgatcgacaagagcacactgttgggccgcaagccatccatggatgtgccgcagggtgccaaggccgagcgtatcgaagacccgacccgcaccacgtcccgtaatcacgccgccatcagcatcgataccgatggcgcgttgtggatcgaggactacggctcgttgaacggcacctacatcatcaccaatggccaggagacacaagtcaccaagggcacaccgctcaagctcagcgcgcctgccacggtgcgtatcggagaccagttcttccagttctccgaacagcagtgaccgctggactgtacaggccagcgatacccccccagatatcaataaaccgcaggtaacgtaccaagcaagctgtgagaacaacttgtacccgtacggtacctgcggtttattgttgccgttggcgggcggtcagtgacggttgctcggctatgcctataccgggctgggcggtcactgaccgctgagcgcagtagttacttgttcgagtccgacttgttatcgctggatgagctcgacgaacttgacgagtccgatgagtccgtagagtccgactccgagtccgacgaatccgaatcactctcgctttgcgacgaactgttgctcagatccggcgcgggatcgcccggggcctgaccgatggtcacaatcacgtctccgctggattccggactccacgccatccattccataacggaatggtcgcataccatggaatcatcatccaatggcaattgcgtgtacttgcccacggacttgccttgcgcatcaacgataatctgctcatccgtggtcttcacgtatatggtcttggtcagatagttgatgcccttgaaactgccgtcggtcagcaacagacgaccccactgcggcccatccaacacttccgtgggcttcagatcggacgacagcaggaacacgcgtttgctttcgttgccgttaccatccgtctgcacgtagagggtgccgtcggagaattggtcaatggccttgacgtcctcatccttgctcagtcccagcacgtcttccaacgattgccgtttgccggtcgtgctatcgatgacaaacttgccgctatacgaatcatcggtcacatacatgttcttgccgagataccgcattcggctcaaatcacaacttgagtagtccgtatcgcagtaattcaacgggaaactcatgatttccttgttgtcttcgaccgaatacaggtggtacgaattgtctcgcaccatatatgcgtcgtacaagctcacgccgctcgcggaggcattgacctgtttcgcatactggtacccgccagaatcagtggtaagcacgattttgtcttggaaggtctgcaataccttggcggtatcactgtcatgagttacgcccatcacctgcgtgtggttgatggtcgctgagcgctcgtccttgttagcggtgtatttttcatcgctatgccacgttttcttgatggccaccatgttgcgggactcggcgagcaacgagtattcgtaaccctgctcatagtcgataaggttgtcttcctcggttcgcaggtcgatgcggtcagacagttcgccggtatcgagatcgacctcgtgagcgaacagatgcacgctttccggcgtggtgcccactgccttggttttcaccgcatagaacacgaataccgccggattatcgccgtacgtggcggcgacctggggctcggaatactccttctcccccgattcgagcatggatacgtggatttccttcgattcatccagcgccggcgtccagacgccgaaggcatactcgccgctgccgtccagggaatcacttgaggatttggacgacgaatccgaatcgaccgaggaatccccatcccagcagtggatgacgttcgagaccatcgcgccgccagtccacttccagtcactggcggagttgccgtcgcatgagaaatcggtcatcgtcacttcggtggctgccggcttggcgggctcggacttggtcttctgctggtctttggttgttgtcttagtctttgtcttaggtttcgatttggtggtgctggaggtagttgttggcttggcctcggccttctgatgcgcgttacgccagaatataaagcccgtgatgccgccggctatcagcgccactaccacaataatcgctatgatgattggcacgattttacggggctttttgccgttgttgccggcaccattgccgttgttgggcacgcctgcaccagttggcatgccattgttcgaggtcgggattcctgccggaggaacggcaccggcggcaccggcatacgctccgggtaccgggctgcccggcacctggccgccgggcattggaccgttcggactggaaatgcccggttgcggaatattcgtttgaggcgcattcggccgaggtacgctcggctgcggctgcggcacacccggctgcggaatcccgcgcgatgccactaccgtagcgtccgccggtaccggggctccgcaccgcgtgcagaacatcatattgtcaggaaccgcattgccgcattgtgcacatcgtttcatagttcttctcccccgctatcagcgtcatcgcttcggttcttctctgccttctattgtaggagagagatcacgaatgtgtcgtcggccagcgtgaaatcgccgccagatgccgcatattcgcatccgccgcttgccagttcgcggccacctaccgcagtgccgttggccgaatgattgtcggtgatgcaaaaacgtccgtcatccagcatgtcaatcaccgcatggatacggctgacgttggtattgccgcccatgtgaatgtccgcggttttcgatcgcccgatggtggctcgtgtggcgtgcactgttattgctttaccgtcgcgcaatcgtgtgacggtaaagcctctggacttgtccgtgtagaggcgcagcatcgtctcgccttcgctgtcgttctcatcggcgcgcagtgctgtgctgacggcgctgacagggaggatagggcgaacgacgttgctagtggcgggaacgcgagcagcatcaacgttgttgacggtgtgagcaacgtgagcggcggcagcagcgttacccgtgttagtctcggccacggcagcagtagcggtatcacccgcggcagcggcagccgccacattggatgccccaccgcgggcggaatcttcacggatatattgttcgcgaacgagattctcacgagcgggctgcgtttcctgcttgcggggaagatttacggcaatcggcattgcaggagccggctgtgtcacgggcgaggccgacgttacaggagtcggctgtgccggtgccgcgtgtgctgccggcattgcaggagccgccggcgttgcatgcgttgacggtgccgcggaagtcgtcggcattgcggcctgttgcggcgtcgtctgaagtttaggcttggagctcaatactgtggcgccaaatcgcgtggcaccgaccatggtgccgtcagacactacggtcgcgccgaattgcgtctccgaaccattatcttcatgagtcgactgcgctgactgcgcttgacgcggctgaacagtgccgggcagcaaatacgccataaaatcatgcagagcatctgcattaaccagtgaattgcgccccaggaactcggcgagcgcacgctgatagccttgcacaacggcatcctcaagccgggtccggcgtgcatcggccaatgtctgcagcaaagtggtggcggtgttgcgatcgggttccagtcccagcgccggcaccaccacgaacagcggatacccctgtgcggagatatacacgcttttggggtcccactgcacgtacgacagcggcacgcgatgctcctcgcattgctccataacggacaataccgccacgagtatgcccacatattggccgccaggcactaccgacctcaacacgccatgcatggtctcgcaatgagtcacgtcgtaatagaagaggatttccgcgccattactttcaaaccggaacggcagcatataccaatggccttcagcaagccattgtgcctgcccaagatccaacgactcgcctcgcgtggtatgtatggtcagcgtctgagcccccgtacgccgatccttaacagtcttcgctctcatagcacttaagtctagtcctgtaccaaggccaatgctttgcggagacgcaaaactcgtcaacacagtaacacaactccggctaagtaactttaccaaaaaactaaaaattggtaagataaggttaccagttttcctcaatattggtaaggtagcattaccgttttcttgaaaggcacattatggcaaatccgatcatcgccgaaaagctgcgcgattttagaatcgaagatttccacccgattgtgccgcgcgacttggatctaggtaagccactgaccccgagagtaggcaatctggtgaaggtcatcgtaggcatgcgccgcagcgggaaaagctaccgcctattccaagagatagaggccctacatacatccggtgtcagctggaaccaaatctgctatatcaattttgaagatgacaggctcggcgacatcactccaagtgtgggcgatgaagtaatcgaaaccttttgctccatgcatcccgaaagcctagacaccggcttgtacctgttttttgacgaattacaggaaatgcagaactggggcgcttggctacgtcgcatcgtagacaccacaaaagcaacgatctatgtcaccggctcttcctcgaaaatgctctcaaaagaaatttccaccgaatttcgaggccgagcattggacttcgagcttttgcctttctcattccgtgagtttgtccgcgcgcgcggtatcgccgaatcagaattgctcagccggaacgaagcagctggatattccaccaaagaacgattaatgctgtcggccgcattgatctcctacctggaagagggcggattcccagcaatcgagggactgccaacgcctcaacgtgtgaccctgctccagtcatatgtgcagcgtgtcgtatcccgcgatgtagtggaacgttatgacatcgcgcgtccaagagttgcctccgcattggcacgacgcttgcttggcagcaacggcaagccattgtctattcgcaagatagaaaacgaattgcgttcagccggactagccaccagccgtgtgctactgggagatttattggaatattttgaagacgcctatctggtgtttcgaatgaaagacttctctatgtcgctcaaagagagcaccacttccacatcaaaaatatacgccatagatcccgggctggccgcagcctcaagcatggcaagcgccagagatgatggccaacgattggaaaacgccgtttatctcgaactacgccgccgaaccgcaggttatcgtcgcgacggcatatcgtcatgccataccaaggaacatggctatgaagttgattttgtgatgggcgatgcactcgaacatgaacaatatgagctatatcaggtcacggcacgcatggatgataatcggaccatcgagagagaaacccgcgcgctctgggaactcatggccgaacaaaagctccatgaaggaaccatcatcgtcggcgatggaatcgagcgcgaataccgcaacagcaattatgtcatcaaacaagtgcccgcttggaaatggttcgttgcgcatgagccccggtaagcttcaccggccatgtcagattcctgagatggcaaccatgatggcaaggaatatgaacagagtctcgacccagatgagttcggcggaataccacatccagaacggttcgacccgcttgctggcgcattgacgggcaatcgccacttcgcttggcagcaccgcccaagccataaacagggcgaccaacaacagcacaaaagaaatgggcacccaaccgcattccaccagcactatgccgaacaagccgatgcttgccgcgattccaatgccaatcatgggctttgccgcaccctgcctttgtctgcgaggaatcacggcgaacacgaaagcaatcacggcaaacacaatgccccctaccactgcgggccacatcccaactaccgtgtccgattccttcaacgggccaggcacgccgcttcccgcgaaatgatcgatcacgccgtcacgtacgccacgcatatagaggatcgttcggcccaaaccggcacccagcatgcgcgaagtgccttcccagaagcacagcatcatgatgtgaaacaacgtgcgttcacgtggccagatgaacgcgggcaagaccaacagtatgccaaccaccggcaatacggcacacacgccggccatgaatcccaggaaatcgaacgagctaccatcgatgcccagcacgcccagccaccacggatcaaacccgatgctcaggctcatgttcacccaccatgcctgtgccaacatatccgccacagacaaagcggcaagcacgccgatccgccaatacacgccgcccatcgcatacactggaccggcaccgtccggcaccacacgcatgtcgtcatcgacataccgcagcacaccaagataacgccccctgcccgaacacgtcatagccacgcgccacaaccccatgagccgcacgactcgacggcaacaagccaaccacaacaggcaaaccagccaacgcatccctcaaaccacggacacacccgacaaaaccctcaccgtcaacaaccacagcaacaccctccataccaacatccgaacagcaaacacgccgcacccacatcacacacccgtggcggccgcgtaggcaagcagcatcaacatgacgaaatcaagcaccaggaaaccagcagccacaggctgccacgaggcatcacgcccctccaagacacaacgccggatcgcacgaagctcaccgggagtccagaacaacaccatgccgaccgccatcacggaattcacccagaacaactgattcgcatcggccgggccgacccacaacatgcccattaatcccaaaccggcaaccacattgccacccacacgcacacgcggggaaacacccaccccacgcaacaccacaagcaccacggcaaccaccacggcaaccccagccacaaccaaaccaggcaccaccacagcaggagaactgtcgtaatacagtctgtccggacgtccagtcgtggagtcaatcaaactttcgacatggggaccatacatcgcatacataacggtctttccaatctccgcgcccacggcaccggcgacacactgaacaatcagaacgtccccggcaacagcaatccacggcttgcgcataacatgagcagccagccacagcaatagtcccggaacaacacccacgtcgaaaaagaccgccacaggccaccaatcgctcgacaacgagataccggccatctgcaggaaccacacaccacctctagcggaatcacgttcgaagaacgcataccgggcttgcaaacctacctgcgcaaggaacagcacaaaccacacgatagtccacaaggcaacccccaaacgagtgaacacacgcctgccacccacaggaatgcacatgtcgatgaactcgcccaacgcgccattcgccagaacacgattctcaccgccgacatcagaaccgccagcctcggcatcaccgcccacaccagcggctccacgctcccacggtggccgaccaccacttctcaccatatcaatcacctctccaccataaaggaacgaatcgcggaacccgcataaacaaatccttcaccggcattgttcaccgcatccgccgcatcattcaactgggcaagccccggaatgaacattttcgccacatcccatggacccgatgtctgccgcccgtacttgacctgatcaagtacgaaatcatgcgcatggccagccagattggcccccttctgcaacaaatgctcacgaccggcgtaatacaataccgttctcagtgtccgaccgctgcctccccatcgtcccacctgagaagcgataacacgcacactatccgaaaccctcttcacatcaccaagaaacgtcatcccttccgacaccttcgtgtaagtagggagaaccttggaatactgggtgagtataccgaaactcgccacgctgtgacactccccgagattagttgcgatattccccgacgccagtttgaaggatctcaaatcatctgccaaaccggtcgacttcgccacactagccgttttgaatccttgcaatccggcggaaagacaacgtaccgatccaataatcgaaagaatcaggaaagcaccttctgcaatcacttcgttaaaagatgcatccctataaagataatctacatacttgtctgctaacagtaaggctcccagcgccacgactgccagcgcgattccccatccagaaacaaacaggctcactatggcgagcacggcggaagcggccttcgcgaacgatacgatgcactgccatccatccgaataatggaacttctcgaaaccgttcacggcaggtgcatgctcctgtgccttggcaatctcacccgcacgtttatgcgcttcactctcataggccaagcggatatcacgtacacgacgtttcgcatctgcccactcatcgcccgcggtctcgacatggtcgctgtacccgtccagcatctgctgtgcggcttccttcgcctcacgcgcattcctgcgctgcacatccgtggcggcatcgggcaactcgtcaaacaccgcccccgcctgcgtcaatgccgagcgcgccccacaagacagccgctcataccgctccttctcgtcgcgtgcggcgatggcacgttccaactgggttttggcatccgactggaacccgtccaaagactgcatccagccacgcagctgacaggacacctcaccaaagctgtcagcaaatcggccgaaatccctaggaagatcctgcagcttctcctcgaacttgacaacccactcgccctgcatgccggcctttgtgtccagattcttcaatgcggacgccatttcggagaaatcccgcgacaaacacttgtacttccatgccatacgcgcgattccctcggtatcacccgacaccggattgtccggctggcccactacggcccagtccaaataatcgagattcttcataattccccaactcccctattgatccgattcgtccgattcggtttccaccgagactcgcaatgtcgccgtaattctggtaaacagctcgaacaacgtgtcagacaattccacctgaggcgtaatgccggtagcaagaattacctttcccgcacaggggatgaacgtacgcaacatcgccaacctacctacgggcttaccttgttggccatgaacggtttctacagaagatgcctgtaccgcaggaccgagtttattgaatgacgttttgctcatgtgcagttcatcaccttcgggcaggccttcccgctccgtgagcagcgactccacgatggcatccaattcctcatccgctgtaccatacggcacagcggatggaagcactgagaccatgaatgtagccattaccaatacggggctggcatcatcaagttccgtggttatggcgtatcgtacaccagctttccatgattgctcgtaagagttcgccagatatttgcgtaatgccggataaacttctcgccagtcggcgatgacgtgtttcatcggttcaagagcctgccgaatctgccgttcccggtcagcaggatccaacaggatttctctccatccctgtggaggtatcaatgaaatatgtaagaattcagccaacggattctccccatcgccggtcgataatgctcatagcaggcagtcaagattggtgcacggcatcggaaatggccttggcaatcgcctcatcggcctcatcggacccggttttcacgttttccaagaagccacgaagattctccgtcttcttcttgtacttgttcttcgtatcgctgacctgatggttgaatgcgaaaaccgcatcgaccagctcggaacagccgacattgtcagaactcggctcggtaatctgctcatccagatttagccgatcacgaatactgttgaaacccctgcatcagcgtgcttactgattcttccacaatcgtcaggttttcggccacccagcaacctccttgttgttcgtgcaatccttcacacagtttcctcggcaacaccaatcaaaccgattctattggcatccaacccgatacggcaagaccttccgaagcgaatgctcacgactcggctagctcgcgaacgtgccgcacatacgactccatatcggcgttcaggagatccatggccagtctgcggctccatgaggggtcgggaatgcgcgcgagcagcatggccgccatgctcgagcacaggtcacgcgaggactccaggtaccgcatacgttggtcgagatccgcatcgggccgcagcccgtccgaatcccgcaacgtgcgcgcggcgatgatgggcaacgccagtatgccgtcatcacaaacgattccccggtatatggtaagcagattcaacgcagcctcgagccggtctccatcaccctgctccaacgcggtggaaaccaaaggctccacgattcccgctcccgccaaggtcagcagcttgtcctgcacgaaatccggcctgcgccagggattgccatcatcaagctcgccatcaccatccgcatcgccatcagcatggtcgaggaaatagcgatacgcctcgatgacgtggtccgcatcgaacaggtacagtacatcggattgcgggaacggacggccatcatccgcgacgtcaagcccctccccgtcgtcagacgcggtagaatcctcgcctgacgaataatgaggaccgtcttccgccttatgcagcttcgtctccatcgcggcggtctcgccacgccgcatcgccgcggctatggcgcgatcgcgcaaatccgacaccaccaattcggtttcgttcgcgttcaacgacacattggagtacggaagaatgcaattgagcgcctcatcgtactgttcgatgaggaacaacctcgcgatatacgcgctggaagcgtccccttcgccccagccaagaagaatatgggccgccaaccgacatgccgaagtcaggaaatcaaaagtggcgtccagattctccacatccgcatcggctatctgctggcgaagctgcaactccttgccccaaatcatgcggaacagccagccgaacacgtcctcatcatcaatcatggaaactgaatcagatataaatccctcaccctgggcaaccaaatcctcatcacgggtgcggacggccaaagcgatgatatcggcgggactcgtctgcccgaacacacgataggacctccacgccagatcgtcctcgaagccatccggcaacggaaccagcggattcttccacatccggaaatccgcaac

SEQ ID NO: 169 - DNA, 6795 bp, Unknown
  R101_18m  MAG No. k141_2004
aagttcctggttggcctgggcgatgacgtggtcgagatcacggtcagcggtcatgtactcgacctcgtcggtcacgtggccgttgacgaccttgcggtacggggtctcgatgaagccgaacgggttgacgcggccgaaggtcgccagggagccgatcagaccgatgttcgggccttcaggagactcgatcgggcacatacggccgaagtgggacgggtgcacgtcgcgcacttccatggaggcgcggtcgcgggacagaccgccggggcccagtgcggaaagacgacgcttgttcgtcacaccggacagtgggttgttctgatccatgaactgggagagctgggaagtgccgaagaactccttgatggtggcgttcaccgggcggatgttgatcagggactgcggggtgatggcctcggcgtcctgagtggtcatgcgctcgcgcaccacgcgctccatacggctcagaccggtacgcagctggttctggatcagctcgccgacctggcggatacgacggttgccgaagtggtcgatatcgtcgacgtccacgcgcaggtcaacgtcttcgccgttgcgcttgcccgggaaggtcgccgcaccgtcgtgcagggccaccaggtacttgatcgtggcgatgatgtcttcctggtggagggaacgatcgttgaaatcggcctcgacacccagcttgcgattgatcttgtagcggccgacgcgggccagatcgtagcgcttggtgttgaagtagaaggagtccagcaggttcttgccggcctcgggggtcggggtgtcggccggacgaatcttgcggtagaggtcgacgagggcctcgtcctgggtctcgagggtttccttctccagggcgtcgagcaccagcgggtaatccttgaaggcctgggcgatctcggacttggtcatgccgatggccatgaggaacacgatggcggactgcttgcgcttgcggtccacgcgcacctgcggctgatccttcttgtcgatctcgaactcgagccatgcaccgcggctcgggatgatcttcgcgccgaagacttccttatcggaggtgcgatcctgctggcggtcgaagtagacgcccggggaacgcacgagctgggagacgatgactcgctcggtgccgccgatgatgaaggtaccgtgcggggtctgcagcgggaagtcgcccatgaacacggtctgggacttgatctcgccggtgtcgccgttctcgaattcggcgttcacgtacagcggagcggagtaggtgtaatccttctccttgcactcctgcacggtgtggcgcggctcctcgaagtacgggtccgagaaggtcagggacatggtctgtgcaaagttctcgatcggggagatctcgttgaagacctcgtcgagaccggaggtgtgggccacggtgttggtgccgttcttttcgtcctcctcgacgcgcttcttccagcggtcggagccgatcagccagtcgaagctgtcggtctgcacgcccagcaggtagggcacatcgatgggttccttgatggaaccgaagttcacgcgatccgacgccttgtgcaggtcaatgtcatgctggtcggcgcgtgcgatgatggtggtggtgttcgtcgtagactcagtagccaatggacgttccttatcgctcgcttagattaataattcccctgggagcgccggcatggccaccatatgcctatgcggacgcttcattgtcgatggcatgcccgcaatatgacacacctcatgcaaagtcaaaagaatactgatatgcgaggacatctttagctcccgctgacgagggagctgtcgagcggagcgagactgagggagagacccagcgtccaaacaccgaccgcaggtcctaccccaccgtaaacgtcaccggatcgctcttcaccttcggatgatccttcaaactcaactgcgccacgtacgttcccgcattgaccttggcccaacccgactcatccgtgcattcggtgagcgtggcgttcgcattggtattccacgtgaccttctgaacgtccttatcacccttagccatcagcagcagacgcgaatccaccggacacacatcggacttgtaaatcgtttcctgaccggaagtaatggtgagcacacggccggaatcggacccgtccaccaaacagttgcctgacccctcgtgcacgatggtcgcggtgaaatcaagcgatcctcctaccggcacggattgggaggccgcggaaagctgcaatgtcacatcactggccgagcaatccttgacgttgctgactttcttcggcgccggcgtggcgtcgcgggaaatcgcatacacctcgtcatggtgaatcatcgtgttcacggcaccgataccccggccaaggctgtacacgcagaatacaatcagcgcgattatcagcagcaacaccgtaccggccacgatacgccgacgacgatagatggcctgctgctttttgctgatcctgcgcttgcgcggcttgccggaacggtcgtttcgggcgggcccgccggatggcccattggccccggtgccggctccgcgtgccgttctcgcgcctgatgtgttcctctgcactgccataacccttccagtctacggtcaccacacccatacacgcttggggagcccgccattttcacaatgtcagctgggtaatcgcaggccgccgtccagaatctcgatcaggccgtcatcgtcaaggctggcgatgcaggcggcaagctgaatctggtccttccaaagcttgtcggcatcttccctgggcaacgtgactccagcgggaagctcgcgcagcgcggcgagcaccagaccgcgcacctgtcgatccgtgccttggaatcgttggcgtgggcgggtgcgacgctcccccagtccggggcggccggccttgaggaacgcgcaatcgtcggcaatcgggcaggtgtcgcataacggcgatttggccgtgcagatcaccgcccccagttccattaccgactggttccatgtgaccgatgggcgttcgccacgatgcagtcgggagcgtttgccgccacggatagtgctgttcacggtatgttcggcgctaccggcattatcggcgacgtcagcatcgcgcccgagaatctcgtctttgggcagcatgcggttcgccagcgcgcgttcggccgggctggccgctcccccgcgcgattcgacgccaaggaacacacggctcagcacgcggcggatgttggtatcgatcacggcgattcgttcgccgaacgcaaagctcagcaccgcggaggcggtgtaatcgccgatgccgggcaatgcagtgagttcgtcatacgtacgcggcagtttgtcggcgtactgctcggccaccacgcgggcgcattcctgcaatcgcagcgcacggcgaggatagccaagccggccccatgcggtgatcacatcggctttaggtgctgcggcaagagcacgggcgtcaggccagcgtgccatccaatcgttccaatacggcaccacacggctcatctgcgtctgctggctcatgacttcggataccagcacgccccacggcgtggcccgtccgaagcgccatggcaagtcacgcgcattggcctcccaccatgctcccaatcgcaaagaaattgctgtgtcgttcatcgttcttattcttagcagctatgacgaacgaggcaaaacacaacccccagagcacaccgaatccagcaaatcccgaaaccaaagtcgagaaaatgttcgaatacggctatcgcaagtcgaattacgggccggacgagctggtgaccgacgcacacggcaaccccatctccgtggtggacgcgatgctttccgccgagaaggccgccgccaccgaaaccgtgacgccgcacctgtgctattactcgccgcgtattcccggcaacaccggttcggccatccgcctgtgcgcagtgaccggcacgattctgcatctggtggagccgctgggcttcaacctgcgcgacaccaagctgcgccgtgcgggcctcgactaccatgacatggcccacgtggtgttgcacccgaatttcgacaacctggtggagtcgatgcccaattcgcgcatcatcgcgttcaccgcgcacgccaccaagctctacaccgaggtggaatacaagccgactgacatcctgctgttcggccccgagcccggcgacatccccgacccgatggacatcatggagggccctcatgtggccgaacaagtgcggctgcccatgcgcccgtccctgcgttccctaaacctcaccaactgcgcatccatcgccatctacgaagcctggcgccagctcaattttgcgggcggagcgtgaggagaaggcccggtgggccttcgagtaacgacgccgaacgaacgccgacaggcgcgagagcggaaacactgagcttcgcgcagtgatgaacgctgaatataaggccacctgcgtttcgaggggcggatttggcatccgccggaggtctactgccgcttcaaggggctgtcaaaggacgagaccccgagtatggccgttgaaatatcaatgcttgtactcggggtcttcatatataccagcccctcgaaacggaagtagacctccagaaaggtcggaatcagcccctcgaaacgggaatagacctccagaaaggtaattcgagctggtatctgccttcaaagaggtacattcgagcgtttgcagaatgctatctgccttcaaagaggtaccgcaatcgagaaaccccgggtatgagtgttgatattccaacgctcatacccggggtttccgcatataggtacctctttgaaagcagatagctctccgcgaggggccaaatgtacctctctgaaagcagataccctaccgaatcaattcttgaagctgtgaatcggcgcagggattcggccgccacgggtcacgaaggcctcgcagctggtctggttcaccggaatgatcggcgcatagcccatcaggccgccgaagttggccatctcccctacgcctttgccttccaccggaatcacgcgcacggcggtggtcttctggttgaccatgccgatcgcggcctcgtcggcgatgatgccggaaatggtggctgcggtggtgtctcccggaatggcaatcatgtcgaggccgacggagcacacgcaggtcatggcctcaagcttttcgatcttcaggcagccattggttgccgcgtcgatcatgttcttgtcttcggagaccgggatgaacgcgccggacaagccgcccacgtaggaggacgccatgatgccgcccttcttgacctggtcgttgagcatggcgagcgccgcggtagtgcccggtgcgccgacctgctcgaggccgatcttctccagcacttcacccacggagtcgcccacggccggggtcggggcgagcgacaggtcgatgatgccgaacggaatgccgaggcggcgggatgcttcctgggccacaagctggccgacgcgcgtgatcttgaacgcggtgcgcttgatggtctcgcacaggaactcgaagtccttgcccttggccgcatcgagcgcgcgggagaccacacccgggccggaaacgccgacattaatcaccgcgtcgccttcggtgacgccgtggaagccgccggccatgaacgggttgtcgtcaggcacgttgcagaaggccacgaacttgacgcagccgtaggagtcgttgtcggcggtgcgctcggcaacgtccttgatgatgtggccgagcagttcgaccgcgttcatgtcgatgccggtcttggtggaaccgacgttcacggacgagcagacgatgtcggtctcggaaagggcttgcggcagggagcggatgagcaactcctcggccggggtcatggacttggagacgagtgcggagtagccgccgatcaggtcgacgccgacctccttggccgccttgtcaagcgcgtgggcgatcttgacgaagtcctcgctcgtcttgcaggagctggcaccgaccagcgagatcggggtgacggtgatgcgcttgttgacgatcgggatgccgtagtcgcgttcgatggccttgccggtggaaacgaggtccttggcataggtagtgatcttgcggtagatgttgtcgcaggtcttgtcgacgtcgtccgaggcgcagtcgagcaacgagatgcccatggtgatggtgcggacgtcgagcttctcctgctcgatcatctgattggtctcgtggacctccatgatgttcagcatggtttgttccttacaggatatttaaagactagtttggcggtcaccctcatcagagggataaggatggctccgtcagcggaaagcccaccgggctttccgcctcctcgcgtgcggcggcctgctgagcgggccgcctcaaatacggtgcatcttggtgaagatttcctcacgctggcagcggatgcgcacgccgatgtcgtcgccgaggtcctcaaggttgccgaccatcgcgccgaagtccttgtccgcgttggcgtagtcgacaatcatcatcatgttgaagtaaccgtcgatgatggtctgggaaatgtcaagcacgttgacctgatgttcggaaaggtatgtgcagacgcgtgcgatgatgccgacagtatcctgaccgacgacggtgatgattgccttgttcatggaactccctaaacgtgaggtgtgaatatccagttaccgtcttggcgaattgccggacgtgccctcaagtatagggaaggcacgtgccaaaacacgtgcctttcgtctgttttgccttacatactgagatgactgccggttaccacctaccgctgca

SEQ ID NO: 170 - DNA, 4170 bp, Unknown
  R101_18m  MAG No. k141_2955
accccatggccactggcacgctggtcatcgccttcggccacgccacgcgactgctcaacgccatcgtggcgcatgacaaaacctacgaggccaccatacgcctcggcctgcgcaccactaccgacgatgccgaaggcgaggcgcttgtcgatgatgaagcccgctcccgctggcaaacgctgtcagcgcagctgactgagggcggccagagcggcgaaccaacggcgtcaccaactgcctcatggcaaaacctgctcactcgcaccatcgccaccaatttcaccggcgatatcgaacaagtacccaatacgttctccgccatcaaaatcaacggccagcgtgcctacgacttggctcgcgaaggcaaggatgtggaactcaaaccccgcctggtgaccatcagcgaattcaccgtgctggatatccgcagcggattcgtagcaggggagcaggccgctgaaccattgcgggaagacgcgaacacgggaacgattcccgcacttgatattgacgtgcgggtcagctgttcatcgggcacctatatccgcgcgctcgcccgcgacctcggcaatgaacttggcgtcggcggatacctgactcgtttgcgccgtacgcgagtcggccgattcgcgttgccggacgataccagcggacttatcgcctctgaggcgatgcttgacacgcgaacccataccgtcaccgcacataccgatcagaagacgttcactaatcgggaagggcaaaccgtcacgcgcaacaagtgcgtattgaacactcctgaaggtcttgccggtgacgagcgccgcaactggctgcttgaccatgccctcaccatggaacaggccgctcgaggcgcgatgccggcgcttgacatcacacctgaggaagccagcgaattgcgcttcggccgccgtatcgagcgtacaatcagcgagcccactgccgccattgtgccgcaaacgcatgatgtggcggcgattatcgagcgtgccaacgctcatcaggccaagccggtcaccgtattccccctcgcgtaaagtagacgcggtgaaaagtgcagcttgatacaggccgcgcacaacaacgcctatattgcatgaataacatcgcacggataaaaggaacagcacactgatggatatcacgcacctgacccctgacgccgaaggttcgattgaatggccctcgttcagtaacgacaagaaggccgtggtgacattgggcgcatttgatggcatgcacttgggacatcaggcggtgatcaagcgtgtggtggaactcgcgcaccagcatgatgctttttccgtggtgattctgtttgacccgcgccccgcattcgtgcacggctgggccgcctcgcaccatggccaggaacccgcggtgcagaacgtggatgccgaagccttgaccagtgtggatgatcgactgcaccgcatggaacagttcggcgtggaccatgtgttggtggtgcactacacgctggccttcgcagccatgtcatacattttcttccttggcagactcaccggcaagctgggcatgcgtacgctggtcctcgggcaggatgccgccatgggcaaggggcgagaaggtgatgtgaagcatatcgccaatcttgccgccgccaccggtgtattcgaacttgatgtggtcgatgaccgtggcccgggtgaagtgcgcattccgcgcgatttcaagccggaagccccgagcgaatggggagagcccgtcgacccgctggccaatgccaccaaggccgagcgccgcgcatggagcaagaagaaccaggccaaggcaatgcgcgcctggagctccaccaatgtgcgctacctgctggctcatggccgaatccaggatgccaacgccattctgggtgctccgcacgccatcgaaggcgaagtggtacacggtgaggagcgcggccgcaccatcggattccccaccgccaatcttggctccgacattgcaggctacattccggtcgacggcgtctatgccggttggctggtagatggtgagaaccgctggcctgccgccatctccattggcaccaaacccaccttcagcgagaaaacaggactcaacgaacgcgtggtggaggcctattgcatcaccgatgagtggattgatctgtacgaccataaggttcgcgttgaattcgtcggtttcctgcgcccgcaggtcaagtttgatggtcccgaccaactcgttgacgaactcaagcgtaacgtcgaagagaccaagcgtcttaccgcctgaggcatatctcagggctatttacgcactcccaaggcatctaaggcgtcggacaatgtgttggactccaccagccgaagtccctcgacatgcaccggcttgcgcagcggaggaatgactgccgtcgtaaagccaaggcgcgcggcctcgcgaaggcgatattccatacgcggtaccgggcgcacctgaccggtcagggaaatctcgccaatggcgcacgtggctcgcgcaatgggttttgacgtggcggcgctcgccagtgccgccactatcgccaaatcggaaccgggctccttggcctggcccccggcaatagtggagatatacaggtcgttggacagcaggttgagcttgctgtgacggtagagcaccgcgaccagcatggcgatacggctggggtccacgccattgaccgcacgtcgaggtgtgggcagcaccgacgtggtgaccagagcctgtacttcgataggcagactgcgatgcccatccaatgtgaacgtcacacaggtgccttccatgggtgccgcgttggccgcatcagggccgtctccagacaggaacaatccggcgggatcggtgacctcttcgatgccctcaccgctcatgtcgaaacagccgacttcatcggtcggaccaaaacgattcttcaccgctcgcaacattctcagcgcggtctcgctgtcgccttcgaattggcagaccacatcgaccagatgctccaatgtgcgcgggcctgcaatcgaaccgtccttggtcacatgaccaaccagaaataccggaatgtcaagcgtcttagcggtatctatcagcgcgcttgccacttcgcgcacctgagtcgaaccgccggaaatgccatcgacctcctgcgagacgatggtctgcgccgaatccacaatggccaaggccggcttgttctgttcgatcagccccaatactgtggacagatcggtggtggaggccagtaacaagttcggctccaccgcgttgatgcgggaagcgcgcaaacgaacctgcgcctgtgattcctcgccggaaatgtacagcacggtattggcatgtaccgacggtgcgttgccctgtaccgacaccgtgtttgatgtgccgccctgcgcccggcccgactgttgggcagaccgctgaccggctcctcggaatgtactgtctcccgccacaacgcgcgcgatattgccggccgtctgcaacagcaatgtcgacttgccgatacccggttcgcccgctatcagcgtcactgaacccggcaccacgccaccgccgagcacacggtcgaattcggaaaacccggtaccgagccgctcgacgctttccgtgcccacttcggtaatcggacgggctgcagatctggcgttgtcggcaaccgtaaccgactgcgtgcgtgatgttcggccgggagcggccgtgcgagagcttgccgccggccgagtctcgtgaaattcctcgaccgtgccccactgaccacactcggggcaacggccgtaccacttcggcccgttccaaccgcattcggaacatacatactgcacacttgatttcgccatggtctcaccctaacccaaacaccagcggacggtaaatttttaccgttcacaagagtttcacgcggcttgcgcacaacgactaagattacggccgtctagcgtcacgcggctgtgagagaatcggggcatgactaatagtgagaactcctcgaccacacaatcccatggcaagttgattgcagtggtggttgccgcagctgttgtgattatcctggcggtgctttcggcctttgtgtggccgggttgggccatccagaagaatgatggcacctccactaccacccaaaacagccagcagaaaaccgaatcatccgagccgatcaagccgaccatcgacgccacagctttgccggatgat

SEQ ID NO: 171 - DNA, 10626 bp, Unknown
  R101_18m  MAG No. k141_3321
acctcgctgcgcacggattcaatcttgtcgcgctgaccgtcatcctcggcgatggcgagcgtgaccttggaatcgttgaaaatccagctgacctggctggcggagttggtctcatataccggcacggtgagtgcgccgatggacatgatcgccatatccagagcggtccactcccaacgcgtgcgagacacgatggccacggagtcgcccttgttgacgcccagaccaatcaggcctttggccagatcgatgaccatgtcacggaagacctgggcgctgtacggctgccaggtgccatcctcagttttatattcgatcatggcgccatcaggatcgcgcttggctcgctcatcgagcagatcgaacaggttgatgtcgctgtcgatcggctccttgacgggattggtgaactgcttgacgatacgagtatcgtttatggccttatcagcgatgttttcagtcatactccccatgtaactccacggatgctacaaaacacgcgcgaaacaacggattgtccagaccaaatggccccggcaatccgttatttcgggcaaaccaggtaaatctgtcgcaccgtacattcagcagattactcggcggagtcattggcctttttcagctcgtcgcgaatctcctgcagcgtggcgagagtctgctcttcaacgctaggcccctgttcttcagcgtcagcctcatcctgggcagcagtgagatcacgaagcttattaatcggcaaaatcacgcagaaatacaccgccacgccaacaagcaggaagttaatcagcgcgttaagaatcgcaccaaatgaaacagtcgagttgttgaacgtgatggtcagcagtccggaaagatccggtacgccgccaatcatgccgattaatgggctgatgagattgtctacgatggaattgaccacagcggtaacggcagagcccatcaccacacctaccgccatatcaatcatcgatccgcgcgacaggaatttcttaaagccattcaacggacctttatcggtcaaagcaacaactttgcgagcggttcctcccgtggccttggcaaagtctgtggcaatattcatgggattgtggttactcataacggcactccttacgaaattcagacacttcacttgtatccgactggttttcccacgactccattatgccgcttattggaatatccctataccactgcggcgtcccgtacgtgactatgtacgagaacgccgccacccctgtttgctgagaacctgttagagctgcttagaactgaatgtaatcgacttccgtatgttcgccggtttccaagtatttcgccacatcatcaggaccggcgaaaaccagttcgaccgcttgcgcaatcatcagattgacacgatccattggtgtaaggttctcgaaatagccgtacaccggaattcccagcgcatgcgcatatccgatttcgaacatcgtaccggggtcctcgtccataagattggcgaccacggctttagcagcattaatgccatggatatcacccgcaaagcatccttcagggcctacttcttcgatctggctgacaaaccgcggcttgaacagtaccttgccatggtcttccaatatcttttccaaacgttccatacttgccgtttgttcaggatcgaagaacggaccggccacatagaagtcatactgtttgtcttcactcatggtctctagtcatagcgcagccgcgtcggacgccagccgttattttcactgtatggacaaggggtcgtatcgtgaacattactacgggataaccgtcaatgactacgtacgttgcccccgatcagcacactccgccactttcgccccctcccgtatcgtcgagcacgcgaaccaagccgaccaaatagccgccatcccatgcgctgattaccgtatccgaatgctgcaatgccttgaacaaccgttcgggccactgcgccgattcccaaccaaccgacttgaacagcgcctcaacctgttcgacagtaaaccgcttctcttccgtgtattcgatagccatggaccctcacgataaccgtgaagccccacatgtctttgcatagtttcacatgacgggatgatggatggtggaacctatacgtttacacatgcctaatgcctatggctcatcaccgatgaatagaggctgagataccgtcatgtttccgaagccaagtgcccgagatcggattcgaaccgacgacacccgctttaggagagcggtgctctatccactgagctactcgggcaacgacgtttcattgtacacggccgcacgcccagtcgcatcatgttcgcgtggcagcctacataagacgcatggcagtctgtgtaagctacctggcagaacccgccaccaaggcatggccggttttcgtgctggtttggtgcgaactgctcttgcgcacggcgaaaagacactgaaagacaagccgcacacggtacagtggcaaatcgcacgaaaagcaaggtaacagtaaacaagccggaggaaagggcagcatggcaaaggcacggagtactaccacaggtgcaagcgtacgagctcgcgccgctgccaagccacgctctgccaaagccacggcacgcccagtatccaagtctgccgtgaagccacacaaacggcatcgtctgcttggttttctcgccacgatgttcgcgcttcttgcccttgccggcactgccgcccgcgcgctgcctgccgatttacaggaactgccatttgtgccgattgtggtatcggcaacgccctggttcacgttgcttggcctgattgccctactgttggccatcgtgtcgcggcgtatccttgccgcactaatcgccatcgccgcaatcgcatgcaatggctattggcaatatccgttcttctactcgaccgacccactcccccaagccgcgcagaacgccgtggctgcggcctcccccaacaccagcgatgcctacgcgcgcgtcatgaccttcaatgtatacaaggggcaggccgacccacaagccatcgtcgaactagtccgcgatcagcgcgtcgaagtgctcgctttgcaggagaccaccgaggatttcgtcaaaaaactcaatgaggctggcattgagcactatctgccgtatgcgcaggtctcatcgtctgacggcgtattcggtaacggcctctggtcggccacgccacttgccgatccggccgacgatgacgtgaattccagcgcctcattcatgcccggcggcacggtggatatgggtggtcagcagattcgattcgtatccgtgcacaccaccgctcccgtacccggctattggcggcagtggaagcgatcgctggatgagttgggtccgatgcgcgggcatacggatacacggtatattttcatgggcgatttcaatgccacttacgatcacacgccattccgtgattttcttggcgaccggttcgtggatgccgcacgtgaatccggacatgggtttacgttttcgtggcctacgaaccgcgtgtatatgccgatgttcgccggtattgaccacgtggtgcttgatcagggcatgaaggccgggcaatgcaaggtggtcaaagtcgagggctccgatcatgcggcgttgttggctaccgtggcggttgggtgatttcgtattcctcggccagccgcatacactgggcacggcttccagaatcgcctcgatgccggacttcttgattgagccgtcatcctttaaatacttcatcaggcgcactgtggatttggtgctggcctcggggtcagggcgagcgccgggagcggcgtcgacgataagcatgtggatagtgttcgaaccgatatcaagcacaccaagtcgcgtggtgcgcgaacgcagattgaccatggtccctattcctgaccttacctaacccgtgatggccgaacaacgggccgaccatcgcaatcagccagccgtgcgccaccatggcgagtcgttcggccggcaaccaacaccgcgaggccagccgaacatcacacaaactcgactactgtacaacaatcacaccggctgccgcgccgttcacaacgattcgacgaacgttccgagacgttccagcccctcggtcagggcctcacgtgaggcggcatagctcaggcgcacatgcgtatccgctgtggccgcaccgaagtcgcggccaggagtcagagccacatgggcttcatccagcgcgcgttcgcagaacgtccaggcatccagaccagtacgggagatgttgaagtaggcatagaacgcgccattcggctccacctcaaccggcaaaccgatgcgcttgagcccgtcaatcacaatgcggcgacgggcaagcaattcctgacgacgagcttcacattcggccaaactctccggcgtaaaacaggcgagcgccgcatgctgggtgggcgtgtgggcgcacaggtagtagttggtggccaggtcgtcgaccgcttccagcacggtggggtcgtcgggcagaatagcccagccgagacgccagccggtcatgccgaagaacttggagaagctgttgcacacgatggcaccgggatcgcaggccagtacggacttgacttcggtgccgtccggctcacggtcggccaaatcaaggtaggtttcgtccacgatgcgccatgcgccgcggctggcggccagcttgcacacctcgtccaatacgttgaagtcgatggtggtgccggtggggttggacggcgacgtgatcattacggccttggtcttgcttgtccagtactggctgcacaggtcggcggtcaggtggaagcgggtggcggccgaggtcggaacgtcgatgacccgcccctcaaaggagcgcacaagttcgcggttgcacgggtaggaggggtcggccacaatcacatcgtcaccggggtccacggtcagcgcggtggccaacagcagggcggccgaaccgccggcggtcacgcagatacgcttggggtcgatgtcaaggtcatgacgctcgcggtagaagtcggcgatggcttggcgcagttcaggtaggcccatggcggcggtgtacggcagggcccggccgtcgtactgttcgcgcatggcgtcgcgtacggcgggcggcgcgccgaaatcgggctcgccaaggcttaatttgatgacgctgataccttgggcgatcatcttgtctgcttgttcgccgaataccatggcacggaagggattggcctcacgcgctcggcgggacatgactggagacacggccggagattggggctgctgcgctgcttcgttttccatatttcggttctatccgcctcacgggacaaggtttcttcttctataatcactgtaggtcgattgagtgtaccaacccgtattcaaggaggaataatgagtcgattcaatggcaaacgcgccgagttcgaggccagcggcgaaaagatcaacgtcgcgattctgggtgcgggccgcatagctcacaccatggccgacaccctgacccagatggctgaaggttcactgtattcctcatggattcacccgtatgcggtagcggcccgtgatattacgcgcgcgcaggcttttgccgaccaatggcattttgacaaggcttatggatcgtatgaggagttgacggcggacccggatgtggatctggtgtatatcgccaccccgcacagtctgcacgccgaacaggcgatcctgtgtatgaaagccggcaaaaacgtgctggtggagaagtcgttcaccgcgaacgccgggcaggcacgtgaggcgctggccgtggccgaggaaaccggcatgctgtgcacggaggccatctggacgcgctacatgcccagccgcaagctcatcaacgaagttatcgagtccggcgagatcggcgaggtgaaagcggcgagcgccaacctgtgctatccggtgtccggcaaggcacgtatgaccgatccggcctgtgccggtggcgcgctgctcgatgtgggcgtgtatccgctgaacttcctggatatggcgatcggtgccgaccatggccgcacgctggatcatttcgatacgtcgatgatggccgccgaaaccggtgtggatgcacagaattccaccacgttgtattacgatgatggcacgatggccgtgtccaccagttcgatgctggtttcctccgatcgcggcggctacgtgtggggcaccgaagggtatttggtggtcaccaatatcaacaatcccgagtccatcgatatctacaacaacgatcacaagcccgtgcgcagtgttgcggtgccgtcgcagttgaccggttatgagtatgaggtggccgatgcagccaacgcgctgctggatggcaagatcgaatgcgaggcgatgccgcacgccgacaccatccgcatcatggagctgatggatgcgattcgcgaccgttggggcctgaagttcccgtttgaggtctgatttcagctcccctccagaggggagctgaaattattccgctgaatctgcatctccttcaacaatctgctcatacagccgtgcgaggcgttcgtcacgcacggctttcgttaattcgcactcccatacggtaattacacgccagccggcggcctccagttcagcccgctgcgcgatgtctcgattgtgattgcgcagtagcttcgtctgccagaattccacattcgatttcggcatcgaatgtttggaacagccttcatgcatgtgccagaaacagccgttgatgaacacgatggtgtggtatttcggcagtactacatccgggtggccggggtaacgcttgtcgttcttgcggaatcgcaaacccttgcgaaacagatagctgcgtaccagcacctcgattttggtgtctttgccacgaatatgcgacatcgtgtacgaacgggtgccccgctcatacttctccactggctgtttcttgcgattcacgcactccagactaccgtgacgttgcggcgaggatgaaagcctgaacgaacaatcacccatcttgcccgtccgtgtctcttatcgcgggcaatgatcatctgccggtcgagactgcacgattagaccgaatcaaatggatgacatgatgattcgtagggccacggcggccgatattccccaaatcgacgaactgctgcggcaggtgctcgaagtgcatcatgccggccgaccggatctgttcaaaggcggtgtcaagaaatacacggacgaggaattgaaggcgattctggccaacgatcagacccctgtgttcgtggcggttgcgccatctgccaatgacggcactgacgtcgaacataacgccgactcccccgccaccgaccaagtgcaatggcatagcgccaagcgacgtctgctttgcgagatttgcgagagatgaatgcgataccagcgttcatggctatgctccttaatccaatatcaatggatgaacctgcactgccccgtatgtcaccatcataatatatcgaatatcaatataaaaatatcgaaaatcactttcaccattcacccacacacatcgcgacgcgatcgaccgttcttgccttgctcgcagcatccacgaccaacacgggaaagtcactttaaaaaagcactttatcaatgtggataactcggaagctagaaccacatacccccgttcagcttgccaatcagaaacctcatcccataccgtcagatgcacccgcacgcaacgacgcgtcagacaacagaaagaaggaccaatgaacatctctacgtttacccacaactcccacccggcaattcggcatacgcattttgtctagtgcgagattgagagttatgatgacacgaagaaaactcatcatcaagaaacttcggcaagcggcaaagcagcgagggctcgatttctatttgttacggcaaggcagcagacatgaggtttactgcctggacgggttgaggatacccatcccccgccataatgaagtctcagaacgaaccacgctggatatcatcaacgagagcgagcagaaaactcggaaaggggtggtggcaatgagcaactatgacgtgcttgtgcaacccgatggccgatattggtacgttcaggtaccagctatcgaacggtcgacccaggccaaaggacttgacgatatcgagccaatggctaaagatctcatcactgtcatgaacgacgacgacaatccggagctcaaggtgacgtttgtgttgccgaaacaagccaaacaacacgtaacagaaatgttccggcagcgcgaaatagcaaaaaaagccaacgcacaagcggctgccgaatcccgactcgccgcacgggccctacgcaacgagggactcacgtatcgacaaatcggagctttattgggggtctcctaccaacgagcatttcaattggtcaacggcaaaacaaagcacaaaacgacagcgtccgaatcgcctcagccaacaactgaatcacgctccccacgcacgcaccatgccacaccgctatcgactccggtctcggcttagcgtacgggtccacaaagcccagactgtttccgcctcccaagctcaagagcaccgagcaggatcttctcatcccagcagattgaggagatcgtccttggtgagggtggcgatggaggcgggggcttcggtgagggcgctggcgccggtgccggcttcgtcggcaagcaaggaagcatcggtgaactggcgggcgagctcgctcttggtatgctgaagctccaagatgcgttcttcgatggtgtccttggccaccacctgatacacgttgacgtcttcggtctggccgatacgatgtgctcggtcggtggcctgatcctgcgcggcagcgttccaccatggatcggcgtggatgaccacgctggcaccggtcaggttcagtccggtgttgccggccttcaatgaaatcaggaaggcgggcgtatcgtccgcattgaactggtcgacgagttcgagacgcttctttttaggcgtggatccggtgatggtgtagtagcgtagtccttgcgcgtcgaaacgttcggcgatcagatcaaggaagctggtgaactgggagaagatcagcgccttcttgccttcattcacgcaggtttccaccagttcggtgatggcggcaagcttggccgactgatccttggcatcggcatacagcagccttggatcacagcagatctggcgcaacttggtcagctcggcgaggatgcgaatcttcgacgtgttgaaatcggcttcttcgctgtgttcgagctgcattctgagccgctgctcgtgggccgcatacagtttgcgctgttcgccggcaagctgcacggtcagcgtggtctccaacttgtccggcaaatcggtcagcacttgggacttcaacctgcgcttgatgaacacgcccaccaacgactgcaattggcgagacacccgggcggcctcaggattgacctgtgcggcggcccgaccttcggccgtgctgccatctgcagcccgggcgttggagatgggcaactcgtagcgctcatggaatcgcttgtatgagcccaatagtcccggcatcaggaagtcgaagatgctccacagttcggagagtcggttctcgatcggcgtgccggtcaaggcgaaacgatggtcggcggccacggccttgaccgctttggctatcttcgtggtgtgattcttgatgtactgggcttcatccagcgccatgacattgaaacgttgctcattggcggtgtaatcatcgacatcccggcgcagcaggtcgtatgaggtgatgagcacggtgggttcatccgcccggaacgcgcggccgatggcggtgcggcgctcggctttggtaccggccaccaccacggcgttgaagctcggggcgaacttggcgaattcggcaccccagttgtacaccaaggacgccgggcacacgatcaatgatggatgcggcccgccatcttcggaatcgaaagtaatatgaccggttacggctgattcactattaacagcattaccggcatccatgccttgagcggtcggcatgccactagattcgttgtggtatcgcgacagcaacagggcgataagctgcacggatttgcccaaacccatctcgtcggccaaaatgccgccaaaacccttgtcgcacaacgtgttcagccattggaagccttcgacctgataagggcgcagaatatgcttgagactatccggcacttcatacgacttagggtcgatgatcttgagatcgtcgatgtattcggtgaacgaagcgtccttgactacatcggagccgtcatccggcagctcaccatccagtaggaatgctcgaccgcccggcaactcgatcagcccggagttgagctgctgttcgctcagatcaaggtcgctggccaatcggtccaacgtgctgagattcgcgccgctgagtttgaccagcgtgccgtccttcaactgatggaatcgttgacgccgacgatacgaagacagcaaggcacccacttcgtccggcggtacttcatcagcgaggggtgatatctccaccaaattgcctttgatggacaatccgactttgacgcttggcggcttgggcgcgatcagccggtcaaaagccggtgtggtgaagacctcccctacttccttcagtgcgggcaatccctcgtcaaaaagacgaacaatctgcgtggtgtcatcg

SEQ ID NO: 172 - DNA, 20688 bp, Unknown
  R101_18m  MAG No. k141_3361
gcggcggcgtactgagactcccactcctcgagctgcttctcgtaaccggcgatccactcgttggtgttcgggtcgaaaccttcggggtacttgtagttgccctgctcgtcgtactcggccggcatgccgtagatggccggatcgaagtcctcggaagccgggtcaacggagtcgttggcctgcttgagggacagggagatgcggcgacgatcgagatcgacgtcgatcaccttgacgaacacggtctcgcccggcttgaccacggtctccgggttctcgacgtgacggttggcgagctcggagatgtgcaccaggccctcgatgccgtcctcgacggagatgaagacaccgaactggacgatcttggtgaccttgcccttgacgatctggccgggaacgtgggtgcgagcgaagcgctgccacggatcctcctgagtcgccttcagggacagggagatacgctcacggtcgagatcgacgtcgagcacctcgacggtgaccttgtcgccgaccttgacgacctcggacgggtggtcgatgtgcttccaagacagctcggaaacgtggatcaggccgtcaacaccgcccagatcgacgaaagcgccgaagttgacgatggaggacaccacaccctcacgaatctggcccttcttgagctgggacaggaaggtctcgcggacctcggactgggtctcctcgaggtactggcggcgggacaggaccacgttgttgcggttcttgtcgagctcaaggatcttggccttgatcttctggccgatgtacggggagaggtcgcggacgcgacgcatctcgacgagggaggcaggcaggaagccacgcagaccgatgtcgacgatgaggccgcccttgacggcttcgatgacggtgccctcaacgacgccgtcagcttccttgatcttctcgatgtcgccccaggcgcgctcgtactgggcacgcttcttggacagaatcagacggccttccttgtcttccttggtgacgacaagggcctcgatggcgtcgccgacctcgacgacttcgtcaggatcaacgtccttcttgatggaaagctcgcgggaggggatgacaccctcggtcttgtagccgatgtccaggaggacttcgtcgtgatcgatcttgacgacggtgccctcaaccagatcaccatcatcgaagttcttgatggtggaatcgactgccttgatgaagtcctcttcggtgccgatgtcgttgatggcaaccttggcgacttcagtgttgttctctgccatgtaaatatatggtttctaatagtggatggataatttctcgatattcagttatacgcacacccttacaggcatacagatattcacaatacaagcaactctgcccaaatttcctaggaaactctaggcgtgtcgttcggccatttccacgacgttggccaggagcatggctcgggtcatggggcccacgcctccggggttgggggtgtaggcggaggccttgtcgtagcaggccttgtccacgtcgcccttgatgcggtagcgaccggcttcttcgtcgtagacgcggctgacgcccacgtcgaccagcacggcgccgtccttgatcttgtcgggcgtcacgaatccggccgaacccattgcggcgacgatcacgtcggcgcggcgcatgtggtcggccacatcccgggtaccggtgtggcacaaggtgacggtggcgttgacggcgttgcgcgtgagcatcaggccaatcgtgcggccaatggtgatgccgcggccaagcacgcacacttccttgccgttcagatcaatgtcataggcgtcgagcagctcgagcacaccgcgcggagtgcaaggcagcggtgtcgaaatgtcgccgcgcacatgcagcaccagttcgccgaggttgtacgggtgcatgccgtcggcatccttggccgggtcgatcatgtcgatgatcgcgttctcgttgatgcccttgggcaacggcaactggacgatgaacccggtgcaggccggatcttcgttgagttcgcgtacggcagcggcgatgtcgtcgaagctggcgtccgccggcagttccttcttgactgaggtaatgcccacttcctggcaatcggcgtgcttgccggccacgtacttcatcgacccgggatccgaccccaccagcaacgtgccaagccccggctggatgccccgggccttgagcctgctcacccgttcggcaaggtcggtcttgatcccggccgcgattcgtttgccgtcgattattgtggacatcaacgccctcccctgtggtttcgatgctttctatcgaaacgataggctatcgttggaacaagtcaggattatatatcgttcgctctcacgaagaaggcgtgccatggggactcaaatcacacgacttacgcgactcgccgcagccggcctgagcgccgtcctgttgttcgcgaccgccgcatgcgcagccacctcccccactgaaaccgagccggacaacaagaccagtgttcccgcaccgaccgggccgatcaatgtggtcgcctccctcaatcaatggggctcgctggccgccgagctgggcggcgatgacgtggaagtcacgtccatcgtgaactccaccaatgtggatgcccacgatttcgagccaaagacctcggacgtcgccaagctgtccaaggcacaaatcatcgtggccaacggtgcgggctacgattcctgggccaccaaatcgatgaccaagaccacgaatatcgtatccgccgcttccgtcatgggtgccatggaaggcgataacccgcatctgtggttctccaaagacgctcgatccagcatggccacggccatcaccgatgcatatgtaaaggcactccccagcaagaagaaggccttccagaagcggctcaaggcatggcaggcggatgagaaatcgctggaaacatgggcgtccgagttcaccagatcccactccgacctcacctatgcagccaccgaacccgtggtctattatctgatggccgatctcgggttcaagaatcagacgcccaaggggtatacgcaatcgaccgcttccggcggcgaaccggcccccgcggacctgcagtctttccagaaactcatcgaagacaagggcgtggatgtgctggtcaacaacacgcaggaagccagtgacgcgaccaatatgatcactggcgctgccggtcgtgccgatgtgccggtagtcgacgtctccgaacaaatgcccaaggataccgacacgctgaacgcctggatcaaccagctcatcaacaccatcatcgacgcggtggatccgagctatgactgcgaagacgccacggacggcaacgcgaattccgatgattccagcgccgacggcgccgccacggatgatgccaatgcgcaagattccaaggccagcaccggttccagcacggagcccaagtacatccgtcagtgcaaggcggccacatccagtgactcgtctcaggattcggcaaaggccgatgcctccaatggcgattccggcgatgcctccggcaacgaccagaccgactccggcaaatagttagaagcaaaggacaacggcatcggattcatgcaatgccgatagacgccttgcatgagaagggttgtgcgaccattgtcgagatggccgcacaacccttttctttggttgtcaccatccgtacacgatattgagaacgattgtcagcatcgtttgccacaatcgggcgttatgagtgaaacttccgattgcatcgtgttcagcgatgccgccatcaagcgtggtgaccatatcatctggcagcatggcacctttgccattcccaccggttcggtcacggccatcgtcggcaccaacggcaccggcaaaaccacgatgatgagggccgagctgggacttttgccgctttgccatggcagcctgaccgtactgggcaagcctgcgggcgaaatgaacaaacgcatcggatatgtgccgcagagctatgtggcgaatgtcgattccaatctcaccgccgaacaatccgtgttgctgggcctgaccggcacccgattcggcatccaccccatcaccaaggcccagaaagccaaagcgctcgaggcgatggagttcaccggcatcgccgacaaggcgcagtaccgtctgtccgaactgtccggcggtttgcgccagcgtgtggccatcgcccaggcgttggtgtgcgatccacaactgctgatgcttgacgagccgttggccaacctcgatctggccagtcaacgcgccaccgtacacgtgctggccaagctgaaccgtgaactgaacatgaccatccaagtggttgcgcacgatctcaatatgctcttgccgattctgaccggtgccgtctacttgctcgacgggcacccgcactacgccgatatgcacaaagtgctcgactccgacctactcacccacctctacggcacacaggtgcaggtggtcaccactccgcagggtgacatgttcgtgaccccgacgccggatgagccccaggaccagccgcaggatatgcacacggcagccgaagtggcgcaattgcaccatcacgagcacggcaacgccaccaatggcagtgccgccaacagcgccgagaatcgataacatcaagctagccgatccacagcccgtcaacgggctgcagctcaggcatggagaaaatacagggacatgagcaccatcaacttttcgtatgatcccgaatggctggacacactgtccgctccattcatgaccaacgccttcatcgccggcctgtgcattgccctggccgccggtgtcatgggatacttcaccatcgcccgtcgttccaccttcgcggcccatgcgctggcccatatcggtctgccgggcgcgaccggcgcggtgttgctcggcctgcccgtatcactgggcatgggcgtgttcgcactgggcggcgcactggtgatcggtgctttgggcaagcgcgtttccgagcgtgaaatcgcaaccggcaccgtactggccttcgccaccggcttgggtctgttcttcgcgcgattgtcgagttccgcctcccagcagatgcagtcgatcctcttcggctcgatcctgaccatcaccaccggccagatcatcggcttcgccgtgttcgacgtattgctgctggcattgttggccatcatctaccgcccgctgctgttcagctcgttggatgagcaggtggcacaggccaagggtgtgccgatcgggctgatgaacgtggcgtttatggcgattatggccggtgtaatcaccattgccgtgccggcagtgggtaccttgctgattttcgcgctggtgatcacgcctgcggccaccgccaatattctggccggctccccattcaaggcgatggtgatcgccagcgtgctgtgcctggtgtcgatttgggccggactcgtgctgtcggcgatgttccccgcccccccgagcttcattatcgtgacgctttccaccctgttctgggctatcgccaaggccgtggagacagtgcggaagtaatctcattcatttttcttgcccccgctggcaaattcacagcgggggctttgttatatcttctccaccaaggcattggcgatggcggcgatgccttcgccgcggccagtgaatcccatatggtcggtggtggtggcggtaaccgataccgggcaaccaaccgccgcagacagggcggcttcggcttcagcacggcgtgtgccgattttcgggcggttgccgatgatcgccactgaggccgatgccggcgtatacccgttggatgccagatgcgccacaacttcttgcagcatatcgatgccatgccttccggcaccatgcgcgtccgcaccgacaccgaacagtgaaccaatgtctcccaatcgggcggcggcaagcaacgcgtcaatcagggcgtgcgcggccacatcgccatcggaatcgccttcgataccctcgtatttggcggcatcggcctcgctgcatgaatcaggcaccggccagtagagcccggcaatccacagttcacggcctgaaccggcaggcgcaaaacggtgagcgtcaaaaccttgccctatcagcactcctgcagaccccatgcagtccccttcgatggcattgcccagatgaacggcagcaaacgattatgaatcacgaagccccggcgcatcgcataaggacacgaccggggcctcaacaatcaaatcacttcttcttggacttcttctcggcttcgacacgagccaaagtatcggccgcggcctcttcgggctcggcggtgtgatgcttgtcgtcaccgggttgagcgggctcatagcccaggttcacgtcgagcagacgctgggcttccgcctcgtcgatcttctcggacaaggcgatctcagaagtcagaatggcgcgggccttggtgagcatacgcttctcgcctgcggacaggccgtgctcgtcgacatcgcgctgggcgagatcgcgaaccacttcggcgatcttgttgacgtcaccggtggcgatcttttcgacgttcagcttgtaacggcgagaccagttcatctctttctcgatgatcggggtccgcaggatgccgaacaccttggccacttcggatgcggagacgatgtcacgcacgccgaccttcctggcattgtccacgggaacgttgatgaccaaaccatcggaagagagtacggacagctgcagatattcgcgcgtcactcccttgaccgtccgctcggtaatggcctccaccttcgctgcaccatgacgcggatagacgaccatatcgccgactttgtaagacatgtaccctccgagaactgacggcttacacacaaaaactcgaataattatgccatgcggtctggaccgcccctatgagagcgctcacaaccacggagacacaccgaaaagggcaagaattcgccattttcgacgcgccaatgtagcgttttcgactccaacgcacgtagactttgggtcatggctaaagaaacgaagatcaaggaagataccgtcaccgtgcctgtcgcccaaggcgacctcgatgcggtgagcaatgctgaattctacaacccccacggagttctcggcgggcatctcggcatcggcaagcatgccgacaccgccacaatccgtgtgctgcgtccgcttgccaagtccgtgaccatcctcacccaggatggcgaatacccgatgacccacgaatacaacggcgtgttcgtggctaccgtgccggcctccggcaccaagaagcagcccacgattcccgactaccgcgtcaggaccgagtgggaaagcggcgcagtgctcattgaggacgacccataccgttatatgcccacagtcggcgacatggacacctatctgttcggcgagggccgtcacgagaagctctgggaggcgcttggcgcgcacgtgctgcgctatgacgatccgatgggcggcgtggacggcacgcctggcgaacaggtggtaggcaccgcgttctccgtgtgggccccgaacgcccatgccgtgcgcgtggtcggtaacttcaacgcctgggatggccgtcgtcatgccatgcgcgagctcggctcctccggcgtgtgggagatcttcatccccggcatcggcgcgggcgagacctacaagttccagatcctgaacgccaattacacgtgggagatgaaggctgacccgatggagcgtcagcacgaggttccgccgcacaccgcctccatcgtcaccgaatccacctacgagtggaacgatgacgcctggatgcagcaccgccgcaccaccaacccgcatgatggcccggtctccatctatgaggttcacgccggcagctggaagcagggactgacctaccgcgacctggccaagcagctcgtggactatgtcaagcaggaaggcttcacccacgtggagttcatgccactggcacagcacccgttctccggctcctggggctatcaggtcaccggctactatgcggtggattcccgcctcggctcccccgacgacttccgttacctggtcgatcagttccatcaggccggcatcggcgtgatcatggactgggtgcccgcccacttcccgaaggatgccttcgcactcggccgcttcgacggcaccccgctgtacgaggacccggacccgctgcgcggcgaacaccccgaatggggcacctatgtgttcaacttcggacgccgcgaagtacgcaacttcctggtggccaacgccctgttctggctcgaggacctgcatgtcgatgcgctgcgcgtggatgccgtcagctccatgctctacctcgactacagccgcgaacccggccattggcgtccgaacatctacggcggacgcgaaaacctggaggccatcgacttcctcaaggaagccaccgccaccgcgtacaagaacaaccccggcgtcatgatgatcgccgaggagtccaccgcatggccgggcatcaccgcccccacctccgccggcggcatcggcttcggtatgaagtggaacatgggatggatgcacgacaccctcgagtatctgcacgaggagcccatcaatcgcaagtggcaccacaacgaaatcaccttctccatggtgtacgcctactccgaacactacgtattgcccatcagccacgacgaagtcgtgtacggcaagggctccctgtacggcaagatgccgggcgatggctggcagaagctagccggcgtgcgttcgatgttcgcctatcagtgggctcacccgggcaagaagctctccttcatgggcaacgagctggcccagtggggcgagtgggatcacgacgcctccatcgattgggattgcctgaactggcaggagcaccgtcaggtccagaccatggtcgccgacctcaacgccttctacaaggcgcatccggcactttggagccaggacttcgatccggccggcttccagtggctgaccagcgacgatgccgaccacaacacgctgagcttcctgcgcatcggcaccaagggcgagaccttggccgtggtggtcaacttctccggtgaagcctggtccgattaccaggtggcgctgcccaccggcggcaagtggaccgaagtgttcaccaccgatgacgccaagtacggcggctccgacatccacaacggcaccttcgaagcggtcgagggcgaatatcattcgcgtccgttctcggcgaagatcaccgttccggctctgggagttgtattcttgaagccggaagactgaactggtcaacaggctgaaaggtaaccggtttatttatgctcaataccacagcgcgtcagaatacgacaccgcgcatggtgctggtggtcgaggacgagcccacgctcgccacggccattgcccagcgcatcaccgctgaaggatggaccgctcgcgtggccggggacggcgcttccgccgtccaggccgcgtcccagctacgccccgatctggtaatcatggacatcatgctgccggtcatggatggtcttgaggccaccaaacgcatcgtcgccgaacgtccggtgccggtgctgatcctcaccgcacgtgatgacgaggccgacaaggtcatcggtctgggagcgggcgccgatgattacatgaccaaaccgttctccatgcgcgagctcatcgcccgctgcaaggcgctgctgcgccgcgtggagcgtgcgaaggtcatcgccaagaattcggagaacgagaagctgctcgacttcggttcgatggtcatagacccggcccagcgcatcgtcaccgtgaacggcgagcaggtgcatctgacccccaccgagttcgatctgctggccacgctggcccgccgcccgaagtcggtgctcacccgcgaaaagctgctcgaagaggtctgggactgggtcgacgcatccggcacccgcaccgtcgacagccacgtcaaggcgctgcgccataagctcggcgccgataccatccgcaccgtgcacggcgtaggctacgctttcgagccgccgaccgcgtgatggcatccaaaaaacaacagcaatcccggcttgatgcgatgaaacctcgcgtcaagccggttgatttgttctcctctctgaagctggaactcagcgtactgatcgttatcgccactgccatcgcgtttgccatgtgctggttcctcctgaaattcggctggtccggttggatcgccatgccgctgactttggtggtggccttgggcatcacctatttcttctcccgcggcatcaccgctcccttacgccagatgcgcgatgtggccgaagccatggcggatggcgattacacggtccgcgtggatatcgatcaggatcgtcatgacgaggtcggccagctggctcgctcgttcaacgagatggccggcgaactcgaacatgccgataaaatgcgccgcgacatgatagccaatgtgagccatgagctgcgtacgcccgtttccgctttgcaggcgatggtcgagaacatggccgacggcgtcaccgagcccactcccgccaatctggagagcatcctcacccaaacgcagcgtctctccgacctcatcgccttcctgttggatttgagccgtatggaggccggtgcggcgagtctgaatatcgaaaagttcaacttcgccgactttcttgacgagaccatcgagccgttggaaatcgccgatggcggccacgcccacgacatccgcgtcaccgtgccggccgacatctcgatggaaggcgatcaggaccgcctgcgccagctgttcaccaacatcatcgccaacgcactgaagcattcggccgacggcaccaccgtgctggtcgatgcccatgaggatgacagccaaggcaccatcgtgaccaatgtggtgaatttcggctcccagattgcaccgtccgaccgttcggatatcttccggcgctttgtcaaaggcaagacgggtcccggcaccgagtcgggcggcaccggccttggcctgtccatcgcacgttgggcggcccaattgcacggcggcaccgtcaaagtggtcgatgacacgcgaggcgccgatttcgaaatcatcctgcctaaatatcacgtcgccgaacgctgatattgtccgccgtcctaccgtatactgtattcgaacagatgttcgaatacagggtgggaggcaccgcatgacacagcaatccgagtcacgaaccatgccgcgcgacaccacgctgtttgtcatgcagatggccggcgattccatgatcaatgccggtattcataacggcgatctgctgattgtcgatcgttcgttggcaccagtccccggagatgtggttgcggctgtcatggacgatgaaatcgccatcaagcggctggtttcacgggccggcatcaccatattgcacgccgagaatcctcgatatcccgattacatgccgagcaacggcgcttcgcctgctatctggggcatcgtcaccgatgtcattcacccgttgatatcgtcatcggaccgtcgcgccacggcatccgccaataccagcacgcccaccactttagtaccggcctgctgaaatgtctgaacgcattgccgcacggtggcacctgtggtgacgatgtcatcaatgagaagcaccgcgtcgccatggcctatgagatcacgcttcaccctgacatgaccggtgatacggcgggcacgctgtgccgaagaggtctgctgcacggagcgtgccttggtggaggagctcagggcattgcatggtcgcgcatcgacgccgtacccacgcaatgcccctgccaccgatttggccaacggtgccgtatgggcacgccctcttcggcgcattgatgcccgcgatgacggcactggaaccaccaatacgcgatgacccaagcatgatgatggtattggcgtcttgttcagcagcgacaccatgatgcggccgaacgggccgtcaagctcggtatcgtcgtggtccttccagtcgagaatggcacgacgcgccgctccctgatagattgacgcggaccatatacgggctccgccaccactgtctgcatcccgttcccggcattgcgcgaacagggcccagcatgtcgcacacaatacctcatccggcgcgtcacacccagcgcagccgcgtggaaacagcagattgcaggcctgtgcccacatcgcatgccaccacttgtatacgctcggcccgtccataacgcgtcaccatcaagctggagtatcgaatcgcgcaagcagtgcatccagcagttgtaccgtgtcttgcggattctccacacgaacaccgatcgcaccggcctcaaccgcaggatagtcattacccgtaggcgtcatgcgatcgcccacgaacaccatttcatcggcctgtatgccaagtgtctgcgtcagcttgcgcacggcataggccttatcgatgccgcattcgctgacatccacactggtgtagccgccggccctgacccgcatgtgcggcagatcggccttgaccgcttcgaccagcgcctgtttcttcgtgttatcgcgatcccatgcctgtttggccgctacgggtgcgaactgtcccagagcggagaaggtgatctggctgcccctgttctcgattcgaggcccccatacctgctgttcccacaatcccagttcccgggcatgtcgctcaagactttccgagacagcggccacggtggcttcggacagatcatgcgcatacaccaaggcccattgcgtgccatcccaccggtaataccgggagccggaggcaggcatgacatgcagattgccgcgcctggcattcggggtgagtacatccagcacctgtgaggtgaccaccgccatgccgccccctgagatcagggccaccaccgtatggtcgagcagcgcacagaaccgttcgatcatcgcgggcctcatcggctgttttgagctggccagcgtgttgtccaaatcgaaaccgaacaccttggcgttggagcagacattatcgaaatcaagttcggaccacgaacgtaccaccatttgtcgcgcctccctcgttgacgaatgttcacagccaatgaaccaatcctaacgcatgttgcctccgccatgtcctatggtgggaaccatgcttcagccaccttggaacgcacgaatctaccgcaaccgccacggtcgcggcacacgaaccccgatgttcggcacccgtctgccccgttaccgcactcgcaccggcatgttcgacgatatggtggcggcccaggttcgcaggctcggccaagcgtggccggaactgatacgtccgctccagttcgcggtggaggatgtgccgccttcggatccgacgccttggcagaccgagccgaatatgacgtcccagtgcttccccgccagccacggcattcccgcacgagtcgtgctctaccgtatgccgttgcagaccgaggcacctaccaagctcgaattgcagttggccgtcagggatgagctggtggcccgcatagcggaattgtatgggcgcaggcccgaggaaatcgaccccgattggggcctgtgacagtattgcggaggccgtgccacttcaagtaagacagtggcacggcccccgcagctatatcggcgccgaaacatcatcagaccgatgcttcggcgagcgcgctctacttgacgatggaggaatcgttccgagcccagacatggaccgtggcgggcatcagcgttgaagcgtcgatggcggacaatccggcgatgtccttgtcttgcaacgaatcgtgactgaaacgcgctccccagctcactttcttggatgagtcctccaacatcagcacgaccgcggtgccatgatcgccggaaagtttgccggtctcaatcgtttgcgccgcgttcgcatccagcgtgatttcctcggaggtcaccgaagcaccggcatcatcgtaggcgtgcaaggtgaccgtcctgcgcgcattggacgtattggccagcgtgatggaggcctttactccgtcgggaagggccaaccccgagaattcggatggctcgccggcattgaccaatgcgaaatcggcttggccggagtcaccggagcgtgtggccttgacggagaacgacacggcatcctctgcggtggacatcacgcccaacgccccatcaggagcctctcccaagtcgatcgccgtcaccttatcggcagtgacggtggcatctttggcgggaaccaatcctttgtcggtaatccatgacagcccggtgctggtgtctgccttggcgaacagataagcggtgaccgcatcgccggcagtgatggacggcgccaccgacgcattggaggcggtcggcagcggcagcgcgaaatcagaacccttcggtgtcagaccatccatggtcaccgtacgcaccacggacgcgataggagtctccttgctggaaacggtcacgaacagaccgtgctgcccatcgaccgcggcggacagttccatcgaggactccccctcggccggcacagacagcgtggattgtgtggacaatgccattttcccggctgtctcggaaccccagacggcaatgtcgacggtggtcggcttggtggagggattcgagacgatgagctgctgtgtggtaccggtcgtgccgccggagagcaggaacgactggctgagcgaggtcgatacgcaggatgccgccgatacgcctctcacatcgccgtcatcggcccatgatgcgatggtgccgacggtgccggtgccagctgcggcctgcaacatacgggtattgatcaggcgagctccctgattgatcttctgagcaccggttttcaccgaggaatcgtcggtcggatcggcgtctttcaaagtcacgtcatctgaactggacttttgcccgatcgccgagacagtggcgctgtagacggagccgaacgccgcatagcgcgcctgtgtgctcagattgccgacagtggcctggaaggcgctgtcgccgtacgtgccggtatcggccaatcctataggtgccgggcagtaggtttcggactgggtcggactaactgtctggtcgatggcattatcggaagcggccaccttgtccacccagatattggggatgggggccatgacgagaacgacgaacagcgcaatcaacaccagcatggtgatcacaccgagcacgatgccgatcgcacgtttgaaaccagaagttgtgttgctcatgcctgctcctccaatccgtaggacggtcgtctgcgaggcatggcgaccaagcagtacaacgccgtgatcacacctaggcatatcagccagacgtgtctccagacactatgctgtgcacgttgctgccatgaggtatccacctgctgtgaggtgctgctacgcagcgtcagacgatagtagctgccgctatccgtggagaccagggactgggtgccgttcgatgcggcgatattcgcgctcaactgttcatacggcatgtcgttcgaggaatcgccggtctcgggaaccacgtagatgccgccgaatccaagcgcgctgatggccgcgatggcctcttcgtcgggattggacagcagcgaggcacaggcctgggccagttgttcgtcaaccgcatcatgcttgccggacagcaggcgcgcccgctggaccggggaactgtcgatcagatcgccgcgcggggtgcgcatcaccgcatagttgacgatgttgcgggtctccgcgctcacggcaagcacacgatgatcggcactggcctccagataatcggtggtgaccatgggcaggccgttttcggacacgcccagtcccgcatccttatgacgttcgatgccatacatgcattgaatgccgatgcagcacaccagtatcagagcaagcaccacacggccagacacgatgagcacatgcagacggtcccttttcggtgcgggatcgctgccggacgcatgcaacggttggaatcgcttcaccgccccaccggcgacgaggcacacgcaggcaaggaagcccaatatcatcatcgcgatgccaggctgtgcggaaccggccacgacaccatcggcatccacggctatggccacacggctggaaatcagggcgagcgcgcctccgcaaacgattaccacccacatcagccgcgaggtccgcaacgcgaacggcagcaccagcgaagcaagagcgagcagcgtgatgacgccgaacagcacagtgaccgccaaatcggcatgctcagtcgatcccatttgccatcccagcgcacgctgtgcggcctcaagcaggctcagcgacgccggcgacccgttggcggatgacgttggcactgtgatgtcgccgaacagttgacgccacatgcccaaatcggcgtaacgcaccgcattgacgagcgtaggggccaccgcaaaggcggcaggaaccggaataagcaacagcatggcgcgcttgcggcgcacgaacagcaggaacatcaggaacacgacgatcagcgcgaacagcagctgcggttcggcggccaccacagggatgaagcacagtgcggcgatggccgcggcctgaacggatgtgcgcggcttgagcgggtcttcggtatggtacatgcccacggcacggaacacgaatgcgaacgcggccggcaggaacaccattacggtgagcatcggcatattggcctgcgcataccagccgagcataatgccggtggatgcccacaacagtcctcccagcacacgaaccacgtccgagcgggtgaatacgcccgccagcgcccagaacgacaatgcgctcagcggcgcggccacaaacagtatcatcgccagagcggcggtcacatggccgagcgtgaccagcgaggccagcatcagcaccagcagccacggcgtgggcggcgcaggaatgccggtgccgctgccaaacacccatggcgtggtggcggactgcaccagttgagtgaagctggcaccggtggaaagcaacacatcggaatacaacgatccaccggagaatatcgaacggaacaccggccaatacatcaccacgatggccgcaaagcacaccagcgccatcaccacggctgcgctccagcgatatatggtgcgtgtccgcagatgggcacgttccagcggactgagcagcactctgccctgctgggattggaatgcatcccgacgatcatggaactgcttgatctgccgactgtcggcgaacaaaacctgcagggacgatgcggcgaccttcgactgtctggccaccagcctgcgcgatttcatgtttcccgcgatatcggccaaagccaaccatggcaggcacaattgcacccatgcttcatacggcttcttgccgaacatcatggctatggccatgccaaaactgcgaatcagcctccacagccagacgataatccaggacgacatggccaggtcagtgtacagatagcgctgttgggagcgatgcaccgtcatcgcatgattgaccgtgtgatcttccttaagcggctccccgcctcgtgtacgaatgccctcataccgtgcgcgacgatgtgatatctccgcttgcgggactaccaccacgcgtccgccgctcaggcagacacggcggcagaaatcgaccgattcgctgtaggtggtcagccaggcattgatgccccgcagtcgcgtgaattgcgacatggacaccagcgcgcccgccagcgacaccgcgaacacatcctgtcgcccgtcatactgctcctgatcgggttctccatcgaccaccagggaatgcacggcgtgtcggcctgcatacataccgacatcatgcaggtgggatccttcccaatcacactgtttgcacccgagcacgctggcacccggcgtattgcgccacgcctcaagcaatcgttcaaggcatgaggcatccgaggggcgggaatcatcatggagcaaccacaatgcgcggggagcgtcatccaaatcggcccgatccaacgcccggctgaccgcatcgccgaaggaacgcgcgcccttggccgaaacgatgtgaatggtcacatgcttggactgcggcacctccattaccggccccgatggcgagggaatgacctcgaacgaagtggttatcctcgaaccggcgcgcccggtcgcgtcggcgatgatgacgactcccggaagaacattctgcgtcaataccgaacgcaatgtagaccggaggaaacgcatatcctcctcaacggtgatcacagccgtaatgccggtatccacatcctgcctatgcgtatacggtcgagaagacatggcgtcggccaacgcctcatgaatatcgctattacctgtcggactcataaactcccagtgtacgcaccagacttgaagggggtgtgtgtggaactacgcctgctcccggtgctctcgcttatatcgacggcgttcgcgctcgctcatgccgccccaaataccgaatcgctcatcatggtcgatggcccatttcaggcattgttcacgcacttcgcatttggcgcacacacgtttggcatcacgggtcgagcctcccttttccgggaagaacgcctccggatcggtttgcgcgcacaacgccttgtgctgccaagatacatcgccatcaggtcggaatagtccccacaattcatgccatggctcttcggctgaatcgtcgaccacaccccacatgcgattctccttgcctattgagcttttcatacggactaaattacacacatgcaatttcgtttttgtcaaattctttctcgtgtcattacatcatttttatggaactgtgtgctatggcgcggacacgatgccctgatgccgttgcacatgatattgtgccgttcctgcgcaggaacaccatagcgcaggaacacccggcggatgctgtgtcaaagtgtcattcagacaatcgacagtttcaggaggggttatgacgcaggaatcaggtggggcggatccgcatatcaacccgccaagcttcattcctgcgggaaatcgacgcacccgaccttccgggcaggtgccacgctccttcgcccctgcccgcgcctcacgtcagtcaggtcaggctccatcggcccgtccgtccgtcacgggaaatgacatcgaagagcctcaaccgaacgccaacgccacggcaagcgccaacgccacggcaagcgccaacgccacggacaacggcaggcggactccgcccagtttttctccgaaaaccggacgtgccacccgcagcacggctccggatgccgccgcaccgcgcagcattccgccgtcgcgagcgcggatgtcttccggctcatcccgcaacgccgtgcgcaatccgtcggatatgtcggtttcccggccctcatcgccagcagcaaacgtgtccacgaagttcagccatcttggccggccggcggcggcaacggcgaaaacggtaacggcacaccggccgcgcgccttgcgcatcatcttatgcgcgattgcggtactggtggcggcgttgattctttctgttttcggtgcctggcaatgggtggacagcaaactgaaccggagcgactggctgaccgacacccccaacacgccggcctcgacctggctgattcttggctccgacgagcgagacggttccaccgattacggcggcgtggacaatatctcaggcttcagaaccgatacgattctggtgctgatcaagcctaaaagcgggccgagttcgctgatttccattccccgcgattcgcttatgaacgtcgatgaccagtacatgaaaatcaatgcggtggcgcagattgccggcaagaaagccttggtaagcaacgtcgagcagattaccggccagaaaatcgaccatgtggcgcagatcaagttcggcggtctgcagaacgtggtgaacgccttgggcggtatcgaactgtgctatgacgaggatgttcaggattcctattccggactgaactggaaggcgggatgccatacgacggatggttccactgcattgtccttctctcgtatgcgatacgccgacgcgcgaggagacttcggacgcaacgaacgccagcggcaggtcatctcggccatcgtcaaaaaggcttccagcagtgggaccctgaccaatccgtccaaagtcgtggcagtgtccaatgccgcgatgagcgcactcaccgtggatgaaaaaaccaacccttacacgttgctcaccatggcgttggcgttcaaaagcgccaccggctcgaatggcatctccggcagcgtgtactggtccgacccagattattacgttgatggcgttggctcctcggtgctgctcgatgacgccaggaacaccgaactgttcaatcagcttgccgacggcacgcataaggccggcgccgtgggcaatctggcggaaggctgaccgacgctttcccggagcccatcggcttcatcgtcggcgcatgatcgccgccgttgcccacgcagccaatcatgcacgggcaaaatgtcatgtggataactcggcaagctagaaccacataccttgattcggcttgcgctttcggcatgcgctcccccacgctggaagcatgacatcacagcagaacgattcgaagcgacattccgcccatacggcatccgccgtatcccgggcgaagcaccgtttgggcgcgccgccattgcgcgcccgcctgaccatgcttgccgcggcgtgcccgatgatcgcgcaggcactgatgatggtcatactgctgttgcacgggcaatggctgttcgccgccatgatcgcaccgggcatattcgcctgtctcgtgtccctgctgctgacgctccccccacctccgggccc

SEQ ID NO: 173 - DNA, 34861 bp, Unknown
  R101_18m  MAG No. k141_3582
ccaagggccggccctaccgttcatgacggctcagggaacccctccggacgatgcccaaacgaccggccgaccaggccgggaccgaactggaccgccgggtgttccgggcgtcccacagccgcatccccgagatcgtcgaacgcgcccgaaagatccgccgtcatgggcccgacatcctcgggacaatcgaattgggctgttcaaacgccaggctcgaggcgtccgacaacaggagcaaggccaccatccgcatggcctacggcttccaccacgcgaacaatcccatcgccctcgtcatgctccgccgcggcggactcgacatacgcccaccacaaccaagaacccaacccacgaaaacagcagaagcctcttttttgtgctatcccgtaaaactgcgggacggcagctctttttcgccgtttgagccgtgccgtcccacatcaccctttgcggaccgtgacaccataacaccgagaatggcggaatttcaacgattccgtaattcgtactgcgggacgccacgctagtcaatcgattgacactcgtgccatcccgcaacagtgtgggatacgacgtcaaaatccgcgaaaatcgcgtgccgtcccgcgcgtacggcaccgcacgaatacatgctgatgaaccgcatagaaaatggctccccgtgtggggagccatgagctagttactaactagcgatgcgtcacttctcgttctggccgtggcacatcttgtacttgcggccggaaccgcacgggcacggggcgttcttgccagtgccagggaaggtgcggccgtcggcccacggcgtcttgagctcttcgctcttcggacgcttggaaaccgggaccttgctttcggcgtggctgatcggagccggtccggcaacaggcagcgtggactcgccggccccggaggcggctgcggattcggcgatcgcctgcttggcgtccgtatcctcgtcctcttcctcgacttcgccctcggcggcctcgaccacggattcgccgttctcgtcagggccggaggccacggcgatggtgtcggcgctttcggcggtctcctcgacctcgtcaacggcctcgtcggtggtggcgacctgcttgatgtcgatgtggaacagcagctggacggtctcctccttaatggcctcgatcatggagttgtacatctggtagccttcgcgctggtattcgaccagcgggtcgcgctggcccatgccacgcaggccgatgccgtccttgaggtaatccatctcgtaaaggtgctcgcgccacttgcggtcgagcacggcgagcaccacgcggcgttcgagatcgcgcaagccggtctcgccgatggtctcctccatttcgccgtactgctgcctggcgtcctcgacgatcaggtcgcgcacggcctcgacggccttcgcacccttgaggccgccgacgatcttcctgacctcgtcttcgtcgaccttggtggggatcacggtgttgagcgccttgaacaggccctcccaatcccagtccttcggtttctcggatcccttgttggcacccttgatgtaggactcgacggtgtcggaaatgaaacgcaggatgtccttgtggatgtcttcgcccttgagcacggcctgacgctcggagtagatgacggtgcgctgcttgttcatcacgtcatcgtacttcaacacgttcttgcgaatctcatagttacgggattcgacggccttctgcgcggtgcgcacgcccttggtgacggacttggcctcgatcggctggccttcctccatgcccttggccatgacctgagccaccagctgggtgttgaacagacgcatcaggtcatcttccagcgacaggtagaagcgggattcacccgggtcgccctggcggccggaacgaccgcgcaactggttgtcgattcgacgggactcgtggcgttcggtgccgagcacatacaggccgcccagctccttgacctcctcatgctcgtccttgacctgggccttgatctcgttcagggtgcccggccaacgcttctcgtactcctccggggtgtcctccggagagtagccctcggacttcagtttggcgtcggcaaggaactcgacgttgccgccgagcatgatgtcggtaccacggccggccatgttggtggccacggtgacggcgcccttgcggccggcgacggcgaccacggcggcttccttctcgtgctgcttggcgttcaggacctggtgtgggatcttcgccacgtcgagcagggcggagaccacttcggagctttccacggaggcggtaccgagcagcaccggctggcccttggcgtgacgcttggccacgtccttgacgatggcggccagcttctccttcttggtgcggtagatgaggtcgtcctggtccttgcggatcatcggcttgttggtcttgatcggcagcacgcccagcttgtaggtgttcatgaactcggcggcctcggtttcggccgtaccggtcatgcccgcgagcttgtcgtacatacggaagtagttctgcaaggtgatggtggcgaaggtctggttctcggccttgacctccacgccttccttggcttcgatggcctgatgcaggccctcgttgtagcggcgacccggcaggatacgaccggtgtgctcgtcgacgatgagcacctcgccctgggtgacgacgtagtccttgtcacgcaggaacagttccttggccttgatggcgttgttgaggtagccgatcagggcggtgttggccggctcgtacaggttgtcgatgccgaggaagtcctcgaccttggtgatgcccgggtccaggatgccgacgaccttcttcttctcgtcgacgtcgtagtcctcgtcgcgggtgagcttcaggacgagcttggcgaactgacggtaccagcgggtcacgtcgccttcggccgggccggagatgataagcggggtacgggcctcatcgatgaggatggagtcgacctcatcgacgatggcgtagtggtggccgcgttgcacgaggtcggccttctcccaggccatgttgtcacgcaggtagtcgaagccgaactcgttgttggtgccgtaggtgatgtcggcgttgtactgcttgcggcgctccggcggcttctgctcggtgatgatgcagccgacgttcatgccgaggaagcggtagatacggcccatcagctcgctctggtagctggcgaggtagtcgttgacggtgaccacgtgcacgcccttgccttcgagagcgttcaggtaggtaggcagggtggcgaccagggtcttgccttcaccggtcttcatttcggcgatgttgccccagtgcagggcagcaccgcccatgagctgcacgtcgaagtgacgctggccaagggtgcgcttggagacctcgcgcacggtggcgaacgcctcgggcatgatctcgtccaggctcttgccgttttcgatttcctgcttgaacttcggggtttgggccttcagatcctcgtcagagagggcggagatctcatcctccagagcgttcacggccttggccacgttctccagcttcttgagctggtggccttcacccattcgcagggctttgtcaacaatatcgaccactgggttctcccttgactgataagtggtggtgtccgcgtaccagaatagcgcctcgcaccgtcagcaatcgaatttttcgacctttttacgaaaaaatggaccgcttccatattggaagcggtccatgcggtatcagctgatcgtgtcagcaggccttatcttcaggccttcttgacgttctccggagtatcgatttcgaacacgccgtagctccaaccgtgacggtggtagacgacggacgggcgtccggtctccttgttcacgaacaggaagaagtcgtgtccgatcagttccatctcgtacagcgcctcgtcgatgctcataggctcggcgatgtgcagcttgcgacggatgacaatcggcgtatccccaacctggacctccacggattcgccagggccaagatcggaggcgaccgcagcctgcgggctgttgttcggctcttcctccgacacctccggctcgggctccggggcgataacacccagatccaccgggaccgggttcgcgtaaccacgacggtgatccttgcgacggtcacgagtacgacgcagacgcagcgtcaacttatccaacgccatgtccagcgcactgaattcatcggtgctggaagcctccgcacgcaccacggtacgtccggcgataacggtgatttccacgcgcttggcagtatcggcctgacgcgggttgccctcatgggtcagcacgatctgcgcgcgctgagcatccggggcgatagcggtcacacgattcatcttggtctcgaccacatcacggaacctttgcttgacctgcgtgtggcgtccggtaacgacgatttccatgttgacctcctctaactcaagcggtgtaacccgctatatgtgttccgaacggcatcatcaccgaccgggtatgtttcattgtagacgaacaatgggtgaacggccggaaactcgcccagagaatatatgtttattcccgggcttttctctgcaatgaaacgatgtatatactggggttttggcagcagtctcctataagaagatttgataccggtttatcaggctggctcgtttgttcgtcatggtaaatactgcaatggataggcagcgttttcttgctctttctcgcacataccaagctcttacagatttgattcgtctccatacgacacgccacaacacgcccgacacgccccatccgatattcggcgcgtcgttcacgaatcgcccaactatgcccaactatggagaaaacaggataactgggcaacgtcatggcctcaccgcagggcgggatgccgccttttccgcaccttatgtataattgcaggcttgagacctcttgatggccgcggccgtgatcttcattgggatcggctgaggaacttccgggctccatagagcacgatggcggataacgtccgcccagggtgacctgagagatagcgcaacagagaacagaccgcccgtcctcgacgggtaagggtgaaacggcggtgtaagagaccaccgggcctctggtaacagtaggtcgcatggcaagcctcatcgggagcaaggccaagcagatggcggtaagggctgctcgcccgtgtcatcgggtaggctgctagagcctggcggcaacgtcaggtcgagatggatggccatccgtgccgtgcgttcgtgcacggcacgacagaacccggggtataagaggtctcatttttttcttggctacaccaacaattcggcggcgactcggcggagggtttcggggctgtgtcctttgcggccgcctgcggaccaaaaccgacgctgacggacctgacgatcgaggccatgggttttgcgggctatttggcggcccaattcccatgcggcatcttcaaagatgccattttgctcagcttcgccacacacctgttcagccagtttgcggtccacgcctttgcgagcaagttccaggaccgcaccacgacgacccatcatgcgaccggcacaatagcgtacggccgattcggcataagcgcggtcgtcaatcagttgcacgcgaatcagccgttcgatgacctcgtccacaatcgcctcgccatagcctttgctgagcaatcgttcgcgcaacgcgccggatgcacgtggggccgcgtccagcaaacgcaatgcagcctcgcggcaagcgtccaaatcattgggatcttcgacaacggcagcgtctctcccccgtcgagaaaaacgtcccggcggtttcgactgaacacgctgctcggcaatgggcatgtcttgcgacgcaacaggattgcgccgcaagaatgcttcggcactaatcatgttcaggccttagctgcgccggccttggcacgggtcgttttggcagcaggcgccgctgcggccttgctgtccttggccacgtcggcagcggcggcctcgctgacagcggccgctgctgcggcttcgccatcttccgcgaactggtcggcggaaccgatcagaccgaactcggccttgaccttattctcaatctcctcggtgatggccgggttgtccttaaggaactgacgaaccttctcgcgtccctgaccgagctgatcaccctcataggtgaaccacgaaccggacttcttgaccacgccaacctgctgagccatgtcgattaccgagccctcacgggaaatgccttcaccgtagagcatgtcgaattcggcggacttgaaaggcggggccatcttgttcttgaccaccttgacgcgcgtgcggttgcccaccgcttcgtcgccattcttcagggtttgaatacgacgaatgtcgagacgcacggaggcatagaacttcagggccttgccgccggtggtggtttcgggattgccgaagaacacgccgatcttttcacgcagctggttgatgaagatggcggtggtgccggcctgagccaacgcgccggtcatcttgcgcagcgcctgactcatgagtcgggcctgcaaaccaacatggctgtctcccatttcgccttcgatttcggccttcggcactagggcggcgaccgagtcgatgacgatgacgtcaagtgcaccggagcgaatcagcatgtcggcgatttcgagggcctgctcgccgttatccggctgggagacgatgagtgagtcggtgtccacgccgagcttgcgggcgtaggccgggtcgagtgcgtgttcggcatcgatgtaggccgccacgccgcccttcttctgggcattggccaccacatgcaatgcgagcgtggtcttaccggatgattcggggccgtagatctccacgatgcggcccttgggcaggccgccgatgccgagcgccatatcgagggccaacgaaccggtgggaatcacctcgacgttctgctcgggctggtcgcccagtcgcattgcggaacctttgccaaagctcttctcaacctgcgccagcgcggtgtccagcgccgccttgcgcttgggatcgagctcgtgcttgtcctcggctgccgggtccttggccggcttggtctcaagtgccatgatcttctccttgtcgaagtcgtgcgcgaatcggatgcctccaccgtatgacggacatgccatgtgaggcaatccaaaccaaccattgtggttccagcttgcccgagctcggccatctgacctccctaagacctactgcggtaaggcttatggcggatgacaagcaccctgtgcacacgtatgcggcttcttgtcactgtgaataactataaccacacacacgaacatttgttcgaatttggcgtgcaacacgccgaaatcgccaatttcacgattcagcgactccgtaatcccgcagtgtcagacggcgggcatgggcggcgcgttatgatcgtggccccaacgcttggagtccggaacctccatttggtcacagagcacattccagaccacgcgtggctcctcccccgcgtccagcgcctcgaccacggtcatattcgccaatttggacatccgttgatcacgcgacagcgaacgaccgtaggtccgaccgaacacctcttcaagtaattcccagaattcccgttcacgcatacacgccagtgtgccaccacccgcaggacagcaaaaacccgcatcgccacaagcgatacgggttcacagctagacatagattacgggatgcggcttcacaccgccaaccgatcagccctcgaccgagtcgagataatcggccaccatgcgcagcatgcgcgaagtggagactccgagcgcatcggcgatggagctcagcagttcggagctggcttccttctgcccacgttcgacttcggaaagatagcccagcgaaacgcccgccttctcggagacctcacgcaacgtgcggcgatcgcgcgtacgcagttcgcgcagcacgtagccgatagcaccacgcagcgaaacctcgcgaggctcctcctcaaccaccacgggctcggcggcggcagtcggcttgtacgacggcgaatcctcatcccacatacgttcacgaacggcttgacgctgatccttggccttcttggcagcctgcgccttgagcacctgctgctgggcgaacatcaccgcacggcgctgggccggagtcagttcacgcatacgggcgacacccggctgcacagccatcggcttcttggtggccacatccatctgttcgttcactcgggtcatcgtttccatcgccatcgccccttccaaggtcggttcagtgtttccactatgtacaacacgacggtcccgcggttttattccttaaaacttgctgtgaatagactcaagttttgcagaacgtggaatacggtgaggcgacgaacctcttcgcgcatgccatcaagatggagttcgacggctttgagcacttcggcatggtccgcggtgaggcttgcggggatgcgcaggcccacatacaccagtccggccggcttatcaccgtccggaccggggccggccacaccggtggtggaaaggccgatgattcggtcgccgtattccggctggctgtataggcgagcggcaccgatggccatccgccgggcgacttcggggtgtacggcgccttctcgatccaatagggccttgtccacgtgtaggatcgaggccttggcattgatgtcgtaggtgacagcggagcccagcaacacgttggaggcaccgggaatacgcacgaacgcatcggcgagcaggccaccggtcagggattcagcgcaggagattttcgtattgttcgcctcgcagatcttgaggatgccggccgcgagactgtcgcacaattcctgcattggaatatccgtcacttccgcttcggggcgacgaacgtgttgtacaggtacacggcacccgagtagaggcacaggaccaatgccacgtagatgatggcgtaggtcaggaagtagtaagcggtcatccagaacggcgtggcctgtccgttacccagagaccagaacggcagcagcagcatggacagacccacgcactggaatacggtcttgagcttgccgggccatgcggcggcgatgaccttgccgcccggacgctccatgacgaagaaacgcataacggtgatgccgatttcgcgaatcaggaacaggatggtcacccaccagccgagctcgccgaacgcggagcatacaatcattgcgccgcaagtgagcagcttgtccgcgatcggatccatgagcttgcccatttcggtgacctgattgtatttgcgggccatccaaccgtcgattttatcggtggacgcggcgacgatgaacagcaccgcggcgatccaacgcatgatcaggttgttctcaccccaggaaccggcgagaatgtcgagtgtcaggaaaatcaccacgagtacgatgcgcgagtaggtgaccaggttcggcggcgcgttccatccgtcgaacagcgatgatttgggcgatgactgcttgtccattgtgttctcatccatagtgttcacgttacccccatactcctaccttgagtgagtggtggctggatattgactgctattattcgggaatcaggtttcgtgctgatgctgtccgcgcttctctccctccgccccttagggcacctccctcatcagagggaggtcgatgggtgaattattcgccgagttcgggttgttgcggggcgctggcttcgagcgagctggtttcgcctcggatgaaggcgagcacctgcggcaggtcctgcggctgaacaagcacctcgcgggccttcgagccttcggacggcccgaccacgccgcgcgattcgagcaagtccatgagtcggccggccttggcgaagccgaccctgagcttgcgctgcagcatggaggtggaaccgaactggctagtgaccacgagttcggcggcctgcagcagcacgtccatgtcgtcgccgatctcctcgtcaggctccatactgtctttcttctcagcttccttggccatctgttcgatgtcttcgcggtacttcggcttgcgctgggtgcgtacgaactccacggccttgcgaatctcggattcggacacccacgagccctgcacacgaatcggcttggcggaacccatcggcaggaacaacgcatcgccctggccaatcagggtctcggcaccgaccgtgtcgagaatgactcgcgaatcggtggcggacgaggtggcgaacgccagtcgggatggaatgttggccttgatcagaccggtgaccacgtccacggacggacgctgggtggcgagcaccagatgcacaccggcggctcgtgccagctgggtgatgcgctggatggagctttccacatcgttcttggccaccatcataaggtcggccatctcgtcgaccaccacgaggatgtacggatagggggccaccttgcgctgggagccggcgggcgcatgtaccttgccggcgcgcacggcctcgttgaagtccttgacgtggcggaatccgaagaattcgaggtcggagtagcgtgcatccatctccttgaccacccattcgagggcctgtgcggccttcttcggatcggtgatgatcggggtcagcaggtgcgggatgcctgcgtaggcggacagttccacgcgcttgggatccaccatgatcagacgcacctgttcgggcgtggcacgcatgatgatcgaagtgagcatcgagttgataaaactcgacttaccggaaccggtggcacctgccaccagcaggtgcggcatcttggtcaggtcggcggtcacgaagtggccttcgacgtccttgccgatgccggagagcatcgggttcgggtcgcccacggccttgtcggagcgcaatacgtcgcccaagtgcacgatttcgcgatcctcgttcgggatttcgatgccgatggcggacttgccgggaatcggtgaaaggatgcgcacatccgaactggccaccgcgtaggcgatgttgcgctgcaggttggtgactttctccaccttgacgccggggccaagctcgacctcatattgggtgaccgaagggccacgcaggaagccgacgactttggcgtccacgttgaactgttcgaaggtggaagtcagtgcccggatcacgcgatcgttggccggggtgcgcatcgcatggggctgacctttggtcagcaggttcaggtcgggcaactgatacggcctattggcgtcgtcgtctgtaccgttgccggcggcggcattcggctgtccgtccgtattgggcacgccctggccgactccgctgccatccgcatcggcgcctgcgtaggctccggtcgcggctgccgcggccgcggcaccggcggccccggccgctcccatcgccccggctgcccctgcgagcgcgacagtaccggcctgggcggcactgggtgcccacggatcgtctaccgctcccccaccgggcatggcgatggtctggccactggtgatgacgcgggttcgggaagcgtcgccatcatccgcatcggcagcaggcgcagggctggataggtgcggacgaccgtcgtacgaagacgatgcaatggttcgcgcaccggtaatctcgccggtcatcggatcgaccgccggggtttcggcggtggctccatgctggctggcggcacggtcgaacggatcgtcggcagcatacttgtcaagggttttgtcgtcttcggtcttggatttgcggccgaacagtcgtgcgaacaggctgggccgtgcatcgccggcctgatcgttgtcgttgccgtcgtcgttgccgtcatgcgagggaacaccgtcggcaaaggcgagtgtggtatctcccacacggacctcgttggggaactggctggcgcttccgtcggcctcctggcccatcggcacatacggtttgcgttggattttagctgcgattttgcgcgcatcctccggcaaatcggtgacgtgggtgccggtaatcatcagcaaggagaacaggccgacgaccacgaaaatgatgatggcgaacacgttggaaaggccccaggcgagcggtgagccgaggaagaagccgaacaggccgccggcggattgcagaatcgtgatgtcgaatccggtgtggtcggcggcgatcgccacgtcgatgatcgaacaaatcgaccacatgagcagcacccaaccggtgaccacacgcgggttattggaccctttaccggaattgcgcatgagtcggaaggccacggcggcgagcaacaccggcagcacgacgctcatcagaccaagcacaccggccgcgatggcgtgaagcagctggccgaatggaccgctgacacggaaccattcggacgcgcagaacagtacggcgagcacgagcagcaggaaacacaaaccgtcacgacggtaggctgggtcgtattcgccgacgccggtgacggcgcgtacgccggagccgaacgcgcgcggaatcgcgagcaggatcttcttccacaacggctcaggttcgaggtcaagctcgggctggaccttggtttcgccatcatgggtagacccgttgtctttggatttacggggtttggtgctgttggaggatgctgttcgtgccatatcgggtctgattctactagtacgggggtgcatggttggtgacgacaccgtgacgatatggtcgattgacgaatcccgacagccgattcgccgcggttcgtcgaggttcgtccgagtcgattccccgctggagcgcgaatatgccttatcatgggttgcatgacacccgcagagcgtgcgagcgcagtcgcatttgcactcaagaactgcgcactggaagcgatgacgccgggcgaggcaacgatgcgcgccgcggttgcctacgaacgtggcttggagcccgtgacccatctcatcgacgtggcggacgagcagaccgccatgcgtctgcgcgccgccgccgaccctgccggaaaggatcgtctggctgccggcagtctggatgatcatgccacggatcgcgcggatgcggtgttcgcacgtaccgtgttgttggcggaacgtcggtggaatccgtctggcgacttggacgagttgaccgccattcataaggggctgttcgaaggcgtgttcgaggatgcgggcaagttgcgtacctcaaacaccacacgcgaggtgacgaacgaccgggctcgggccgcgaatccggaggcgttcttcccggctgggctcattgagaccggcgcgcacaacatcgcgatggagttggcggacaagcgcaacctgcatgcgttggatcgcgacgtgttcgttcacgcgttcgcttctatttatgatgagctcggttatctgcatccgttccgtggcggcaatgcgatggtgctgcgtatattcggttcacgcttggcgcatgacgccggctgggatctcgactggggctcagtgacgcgcgaggagtatcgctccgccaagcactcggcatatcggggcgacacgtctgcactggagacgatgttcgacgcgatactacgcccggcgaatccgacgcgcgtgttcttgatcgccggctggaatcaggggcctgcacactgattgcgggtgattgcaccggccttcggctgattcctacgccgtgatatcgcccagatgatgctgggtgtattcgtcggctcgggcgtcgatcgggtcgtagtcgccggcgtcggcgtgcgcgataatggccatcgcgttgtcgaccagtttcgggttcagggcctgcagccagtggatgcgcgggtcacggccgaaccatcccatctgtttgcgggcgagtcgcttggttttctgtgcgatgtccgcgaaggcgtcgttcacatcccagataccgtccagcaggtcgatgatctgctgatagccgagcgcgcgtacggcggtggcacccagatgcgggcgcagccgttcgacttcttcgatgaatccatcgtcatacatctgcttggtgcgcaggtcgatgcgatggtccaaatccgggcggtccaggtcgagtccgatctgtacggacggaatcacgtaccggtagcgcggcaggctggccgaatacggtttgccggtaagctcgatgacttccagcgcacggatggtgcggcgtgggttgcgtgggtccatgcgcgcggcggcttcggggtctttggcccgcagctcgtcgaacaaagcaccggcaccctcggttttctcgcgttcctcaagacgtgtgcgcacgtcgggatcggtgccgggaaaggtgatgtcatcgatggccgctctggcgtacaagccggagccgccgacgagaatcggccggatgccacgtgattgcaggtcggcgatggtctcgcgcgcaagctgctggaatcgggccacgctcatcgtgtcttcggtgtcgatgatgtcgatgagatgatgcggcacggccgcctgttcttcggcggtgggtttggcggtgccgatatccatgccacggtacatctggtaggcgtccgcgttcacgatttcggcccgctcccccgcttcggccagacgccgggcgatggcgatgcccaaccccgtcttgcctgacgcggtgggaccgacgatggagacgactcgttgcgtcatatacgccccctcagtgtcgcacggaataggtctgtccagcggccacatcggggtcggcaagcagattatggcggccggcgtgtgtgacggtgaccgtgacgaaatcgccgatttcaggtaccggttcgccttcaggcacgccgatgtgcaccagcacgccagttttctcgcggccggtgacacggtgggtgtcggtgtccttcttgccgagtttgccggtgatcatcacttcgacgtcgcggccctcgaatgtggcgaggttctcttcggtgatctgctcctgcaacgccaccagtcggtcgaaccggtcctgcaccacgtcgcgcggaatctgttccattgcggcggccggcgtgccggggcgtggcgagtagatgaacgtgaacgccgaggagaagcgcgcctggcgcaccacgtccatggtctgctggaagtcctcctcggtttcgccggggaatccaacgatgatatcggtggaaatctgtgcgtcgggcatggcctcgcggatacgaccgaggatatcgaggaacttggcggacctgtaggagcggcgcatcgcgcgcaggatgcggtcggaaccggactgcagcgggaagtgcagttgatgcatgatattcggcgtttcggccatggctgcaatcacatcatcggtgaaggcggccgggtgcggcgaagtgaagcgcacacgttcgagaccgtcgatggttccgcaggcgcgcaacagcttgctgaaagcgtatcgatcgccaataccataaccaaacgagttcacgttctggccgagaagcgtgacctccttggcaccatcggccacacattggcgaatctcatcaagaatgtcaccgggtcggcggtccttttccttgcctcgcgtggtgggcacaatacagaacgtgcaggtgttattgcagcccacggaaatcgccacccacgagctgatgcgggaggcgcgggcggcgggaagctggctcgggaactgccgcaattgttcagtgacctggacctgcgccttgccggtcgcacgattctgatccaatagcttgggcagatcttcgatgttcttggtaccgaacaccgcggaaacccatggcgcagtatccgcgatcttcttgcggtcaagctgggccatgcagccgccaacggcgatttgcaggttcggccgaaccagtttgacgcgattgaatcggccgatggtgccatacatgcgttcggctgcgttctcgcgtaccgcacaggtattgagcaccagcagatcgaggtcattgtcattgatctggtcctcggttgcagggacgtagccattggcctccagcacgccggcgatgcgctcggaatcgtgcacgttcatctggcagccgagcgtgtggatatggaatacgcccttgccgcgctcccccagcaagctatcggttccatcggctgcaatcgaggcacgctccgcctcggtcatcatgtcttcattcataacgaccgattctatcggcggggttcgtcatgctccggtcacgtatgccattggttgtcacgatcttaaatatgggttcttggaaagattccccgcgaacatccagattgtctggaatccgccgagtatattggtggacgtgatacttgaccgacatagccgactcaaaacctccgatctgcaagcccgtctcaaagcgttggatcttccgggaggcaccttcactcccgaacaggtcgttaaattcgttgacctcatgcaggtgtatgaaggcgcgatgtacgagatcagcaccaagctggagattctcgacgacgagttccaggtgcggttcagccatgacccgatacatcatatggaacgccgtctgaagtcggtgagttcgatcattggcaagctggagcgcaagaatctgccaatcagtgtcaattcgattaaggacaatctgttcgatgtggccggcatccgcgtgatctgtaattaccgcgacgacgtgtattccgtgtccaactatctgtcgtcgcagtccgatattcaggtgctgcgcgtcaaggattacatcaagaacccgaaacagaacgggtatcgttcattgcacgtaatctacgcggtgcccgtgtttctctcctcgggcgcgcattacacgccggtggaggtgcagttccgtaccatcgccatggattattgggcgtcgctggagcatgcgctgcgctacaagaccgatttgccggacaacaagctcagcgagcattcacagacactgctcgactgcgcccgttcgctgcagaacatcgaagtgcaaatgcagaacatccaccgcgacatcaacggcgcaccgcaagtgggtgaagcgcctaagacctcggactgaggtgctatggaatcggcctgcggccgattcattcaccgttgcagccacttcggcagcctggccggcgcttgggccagcagggtgccgaggaagatgagggcgcagccgaggtagccgcgcggggtcatcacttcaccgagaagcaacgcaccacctaccgccgagaagaacgattcgaggctcatcagcaggctggctcgcgtcggtggcacccattgctggccgaccacctgcaaggtgtacgcgatgcccaccgagccgatgccggcgtacagaatcggaatccaggaatgagcagcgccggcccagtcgaccgagccttcgatcagcgaacccgcccagctcagcacggcggtggtgcagaactggccgaatgaaagcttgatggcgtccacggtgccgcccaaagtatcgatcaccagaatatgcacggcgaacagcacggccgtgaacacgagcaggatatccgccaggccgatcgaaccgaaaccatcggtgatgcacagcagatagaagccggcgatggacagcaccacggccacgaacaccagcatgccgatgcgccggcgcaggaacacgcaggccagcaacggcaccatcacgatgtacatggcggtcaggaatcccgcgcggccggccgatttgccgtacagaatgccatactgctgcagggtgctggcggtgaacagcacgatgccgcagatcacggaaatgaccaccgggttggcgagcaatcgcgccacggccgaatcgggcttgttcgcattcagctcggcaccggtgatggtaacgacgtcggatgcaccgttcgatgcggcatctgtggagacggccctgggggcctcggtcccaacgacatcgaccccggctgtatcgcccttatccgcgctcccccggccacgctgccacagcagaatcggcaccaaagacagcgcgcccagcgtgaagcgcgtggcgttgaagaacatcggcgacatcaaatccatgccctggacctgcgccacgaacgcaaaaccccagatcagcgcggtcaacaacaggctcagcatgcctacgagttcttgtcttttcacggggagacagcctaacgtgcgaatgtgacagacatgaaaaagcccggccacaatgtggtcgggctgtgacgtttgacgagcaggctacatgccgcccaccaatcggctggcgaggctagtccctgttgccgagcagctgcaggatgtacaggaacatgttcacgaagtcgaggtacaggttcagggcacacaggatggagatcttcttgaccatttccgggccctgggcctcgtattcggtcagcagcgcgcgcgtggactgcgcgtcgtagatggccatgccggcgaacaggatcaggccgatggcgcagatgatcttggtcatgccgtcgacctgcacgaaggcgagcacgatctgcgagatgatgagcacgatcaggccgatcatcaggatcgggccggccttgagcatgtcgaacttggtagtcatgccgaacatggtcagcgcgaagaagaacgctgcggtgacaccgagtgccacgccgatcgagccgaggtcgtagaccatgaagatcgagctcaaggtgaagcccatcaatgcggcgtacacatagaacatgacacgcgcagtggccgacttcatcttggtgacgcgcatgccgagcaccacggccagggcaatctgcaccacgcacaggccgatgaggcccaccatgccggtggccatgaggaagctgtagtaggctccggtgatctggccgagcacggcgaccacggcggtgacaaggatgccgatggtcatctcgccgtacaccttggctacggagactcgacgggcctcctcgtagttgtaggtcatcgtcgtgttgatggtggcggcacccgcgccggcaccggccgcatcctgcggcgcgtactggtaggtgggggcaccctgcggctgggcatagtagttctggccgtaaccggactgtgcgtattgctggccatatccagactgttgggcggcgttgtaatcaggcgtgttgtattgcgggttgtattgcccgttgttctggggctgctgaccgaatgtcataatcgctcctttagcgtttgttccagtaccaatcttagaggaacaaagctgaacattccatgaataggatcgatcggctcgttctgctcatcgcaaagcgtaacgggcgtttccaccatgcgcgtggcatgcacttgagattcgattggcattcgaccgcagcttggaccgccgcgcgattcactgcaacgtgaaggcatgcgtcaccttggtgtcttgatccgttgataggaacgcagtgacatacaccgtaatcggcgaatcgtcttgcagcacatagcccaacgccgaaatcgcctcccgtatgtttatctcggagcgtacggccaaggcgcatctctcctccgcggcggacaagctcaatatgggccgcgtacagatggcgaggctggtggagcgggccgatttgccggcgcgactgtaacacgtccggttatcgagccatatcagtcataatggagaacatgagtgaagcgattattcgaacgttacgtaaagacgattatccggcgctgatcgacctggtgcgccgcacttggtacgccgaatatgatgagcggaccggcttgctggcagccgaggccgattgggagaactgtctggcacgtgtgaccacggcctttgtcgcggagctggaagataaacccgtcgcattgattgtggggcgtatcgacgagctcgaccatcgcagcccgctgaacatgcaccggcgtcattcgttgcgcaagctattgcaactggcgtttgcccacgacggcatggcagctgcgagcgagattctcgggactcttcatgtcgataggcaactgcgtaagcaggcggcgaacattggccatgagtattcggctgaagtggtgctgttcgtacttgatccggcggcgcgcggtcacggtctgggccggcgcatgttcgagacgatgatgagcgcattccacgcagccggcatacgtcaatacttcctattcacggataccacgtgcgatgtcggattctatgtacatcgcggcctgacgcaggtgtgcgagcagtcactgcccgcatccgggccgggagaaaacccgtcttcgttctacttgtacgaggggtcggtgcccgagccggcgtgatgcacccgccgccgggcgaacactggtaggcttgagcacagtcggcacgtcggcataccgtccaaaggccggcgacgaagggattgacatgccaatcagcgcgaaggaactaccactcgggaaagtgttcaccccggatttccggttcacaatcccctcattccagcgggcctacatatggaaggccgagaacatcctgcaactggtaagcgacttggacgacgcctgcaagtcacccggtaccccgtacttcctcggctcgctgattctggtgcgcgagggcgacaaccgttatgacgtgatcgacgggcagcagcggctggtatccctgtcgatcatcatcgccgtgctgcgcgatctggagcgagacccggacctcatgcgccaactcgacgcgctgctggtggagcccggcgacaagctgcgcggcatcgtcaccgagcctcgcctcacgttgcgcgagcgcgacgcggcgttcttccgcgaacacgtgcaggaggacaacctcgaatccgtgttcgacatgaacgacgacgatctggcgaccgctgcgcaacgcaacatcgtcgccaacatccgcaagacgtacgacgagatctccaattggtcggcatccgaacgccagcaattcgcgcagtatctggtcaacgaggtgacgctcgtcatcgtgaccaccgacgatctcgacggcgcgcatcgcatcttcgacgtgatgaacatgcgcggcctgccgctcaccccgtccgacgtgttcaaggcgcgcgccacggccagcctgtcgaccgccgaacttgacgtgtacgcagcccgttgggatgacatcattgacccgatcggcgacgatccgcatgactgtgaggaattcttcgcctatctgcatctcgtgctcacgcacaagccggccaccgacaagctcatcgaggatttcctggccgacgtgctgcaaccgtacatcgacaaaggcacggtgcccacgttcatcaaccaggtgctggcaccctacgcgatggcgtggcggatcatcgcgcgccccagcgataccgtactgcccgccgaggtgcgtagccggcttgagggattggacgattaccgcagccacgagtggaagcccgtggccatgtgggcgttggtcaattcgtatcgcgggctgggcgacgccgatttgtcgccgtttgtggttcgtgcctcgcgtaccgacagaaccacggccacgctggaatcgttgggtgcccatgacgagcgtcggctgttggaaattctgaccgcattggaacaggtgaccggcatccgcacgctgaatcgcactggagcgttggagcggcgcggttatgcgaacgccgccatccgtgatcttgacaagggctatttggtccagcgcgtgaacgggttgcatgtctcggacggcgaccgtgaaggcgcattggtccgtttgcatggcgagatgcagggtgacggcgatttggtccgtctgctgctgattcgcgccaacgagcagaaggccggcatgcagttggatcgaccacgccggttcagtgcgctgccgattatgccgttggatatcgaacggtcgaaatcgtttgcggactggccgcaggatcagcatgatttctggatgtaccgactcggcaatatggcgctggtgcagggccctgaggatcagttggacaggttgagtgaatatccggcacgtcgcgaccgcatgctgttgcgcgcggattcacgtcgtttcccgctgaccaatcagttgaaggatttcgctgactgcacacctgccctgctggaggcgcggcaggaagagtcggtccgactcatcgtggaatactggggcatccggtatgacaaggacgcccgtgatctgaccaagcagaatgtcgatgagttgtcgaagacctctccacggccgtctcatagttcgcggcgcgtcacgatccggcaggtgattgacgctggtctgctggtgccgggcgagcgtctggtgtgggagcggccgcgcaagggcgagcgctggttcgccacggtcaccgaaaacggtcgtctccgtctggatgacggctccgaatatccgactccgaccgccgcggcccgtgccgccgccggaggacgtcgcggcggtggtctggacgtgtggaagcgcacgcgcaacggtcagaagctcagcgacatctggaagcagttccgtctacaggcgcagtaggctacagtagccggcacatcattggtggctcccctccgtgaggggagccacacgctcatttattccagcgccgccacgatttcagccggtgttttgcaatattcgggaaaatgactgattaattcggcatccgatgtgaccacacagttggcaccggattgttgcgcggcaacgatgatcagatcatcttcaaaatcccgatgccgtttttgcagggaaaaagccttatcacatgtcgactcatcgacagcgacgatgtcacacatctccttcacctgctcgatacaacgccatggcacccgtgacgacagaaagccgcgagtgaaattctccacttccgattcattcggtttgaattccctacgaatcgccgatgatgataggtatgcgatatccttcagcgacaatgacgcgcacaacaacgtaacgttgttcttcgcgccaagttccataaccgcttccgccatcttggcgtgatcatcgcgatggagcaaatagtccaacagtacgttggtatcgagcaaaatacgctgcatggaaacgtcggtcatcaatcggccctcttcatgttgtaatacgcatcaagttgctcgtcgtacattttgtcgcggaactgcttgtaggtaaggccttccatgaggtcggtgtcttctgagatcagtccggccttgaccagttccttgtgtacgtatccggcaccttctcgaatcagtttcagcttgcgctgcttttcctcctcgcgggcttgctcttcggcggtcgtttccaatgccggcacttccttgcggtcggcgatgtacaaccacagcgaccggattacgtcactcaccgatacgcctttgcccttgaggacttcttcgacctcgttcttcagtttcgcatcaatgcgaacgttcatttggaccatggtcatggcaacctccatttcgaagatgctatacagtatagcattttggcatgcgtggaaaaggccggtatccgttggcggataccggccttgctctcctcagtcagcttcgctgacagctcccctcaagagaggggagccaagaaggtggttacttcatgaggttgcgcagcacgtactggaggatgccgccgttacggtagtagtcggcctcaccgggcgtgtcgatgcggaccaccgcgtcgaactcggtcttggagccgtcctcgtgggtggcggtgacgtggaccgtcttgggggtcacgccctcgttgagcttctcgacgccggcgatatcgtaggtctcggtgccgttgaggcccagggactcataggattcgcctgccgggaactgcagcggcagcacgcccatgccgatcaggttggagcggtggatgcgctcgaagctttcggtgatcacggccttgacgccgagcatcaccgtgcccttggcggcccagtcgcgcgaggagccggtgccgtattccttgccggcgagcaccacgagcggcaccttgttgtcgatgtagtcgcgggaggcttcgaagatcgtggtcggcttcttggcgaggaagtcgtaggtgaagccgccaggcgtcacctcctcgcccacggaggcgagcagctggttgcgcagacggatgttgccgaacgtgccgcgcaccatgatctcgtggttgcctcggcgagaaccgtaagagttgaagttcttcggctccacgccgcgctcggtcaggtacttgccggccgggctggaggccttgaacgcgcctgccggggagatgtggtcggtggtgaccgagtcgcccaggagggccagcacacgggcgccgtggatatcggcgaccgggtccggcgtggccttcatgccgtcgaagaaggtctgcttgcgcacataggtggacttgtcgttccacgcgaacagctcgccttccggcacgtcgaggcccttccagcggtggtcgccgtcgaacacggaggcgtagtccttgaggaacatctcgcggctcacgctgccgtcgaccacggcggcgacctcggagttggtgggccagatgtccttcaagtacacgtcgttgccgtccgcgtcggtgccgagcggctgggtctcgaagtcgaagtccatcgtgccggcgagcgcgtaggcgatgaccagcggcggggaggccaggtagttcatcttgacgtccgggctgatgcggccttcgaagttgcggttgccggaaagcacggcggtgacggtcaggtcgttggcgttgatcgcctcggaaatctcgggcagcagcgggccggagttgccgatgcaggtggcgcagccgaagccgacaagctggtagccgagtgcatcgaggtcgtcctgcagccccgcggccttgaggtagtcggccacgacctgcgagccgggagccagcgaggtcttgacccagggcttgggcttaaggcccttggcatgtgcgttgcgggcgatcaggccggcggcgatcatcacggacgggttggaggtgttggtgcatgaggtgatcgaggcgatggccacgtcgccgttttcgatgtcgaaatcgccacggaagtcggtggacacggccaccggatccttgacggtcttctcggtctcgtaggcgggggcggtcttctcgaacatgctcttggcttcggacagcagaatgcggtcctgcgggcgcttcgggccagcgatggacggcaccacggtaccgaggtcgagttcctcgtattcggagtactgcggttccacgtaatccgggtcggaagcgtcgccccacagcttgttggccttggcgtaggcttcgaccaacgcgacctgctcttcggagcggccggtcaggcgcaggtagtcgagcgtgacattgtcaatcgggaagatgccgcaggtggagccgaactcggggcccatgttgccgagggtggcgcggttggccagcggcacggaggcgatgccttcgccgtagaattccacgaacttaccgaccacgccgtgcttgcggagcatgtcggtgatggtcaggaccacatcggtggcggtaacgccctccgggatggagccggtgagcttgaagccgaccacgcgcgggacgagcatggagatcggctggccgagcatggcggcctcggcttcaatgccgccgacgccccagccgagcacgcccagaccgttttcggtggtggtgtgcgagtcggtgcccacgcaggagtcgaggtaggcgagcgcgttgccgttggcctcggccttgctcatgaccaccttggccaagtattcgatgttgacctggtggataatgccggttcccggcggcaccacgcggaagttcttgaatgcctgctgaccccagcgcaggaactggtagcgttcgccgttgcgctggtattcgatgtccatgttttgctggaccgcgtcggcgatgccgtacttgtcgatctgcacggaatggtcgatgaccatgtcggactggacctgcgggttgatgacctccgggtcaccgccgaggtccttgaccgcgtcacgcatggtggcgaggtccacgatgcagggcacgccggtgaagtcctgcatgatcacgcgggacggcgtgaactggatttcgtggctgggttcggcgttcggatcccagtcgagcagggtcttgacgtgctcgtcggtgatgttggcaccgtcgatgttgcgcaccagattctcgaccagcaccttcagcgagtacggcagatgatcgatgccgtcgagattggcgatgttgtagtaatcgaagtccttgccggctgccttgagggtagccagctggtcgtcgcgtaaggacatgcttcctccgaaatcatgaatcggcttatgatgccgctgattatccgctacacatggtacgggcacgttaccaaggctctggcgtgtcggcttgaagtatgagacaatcgcgccgccgtctcaatgccgacgcgagagcttgcccgtcagtccgcgcacgaacggcgccagccacaggcacagcgcgaagatcagcgcggaaccggccaacgcgatcagcgtggccaccatcgtggcgccggtcggcagaatcagggcgaagaagttcgccacgaacgggacgaacgcgccgatcacgcccgccgccgcgaacaccgccaccagcacgccacgccaaccgttgagtggtctggccacgcgggccagcacgaacacgcccatcgcgaacaggatgatggcgctggtggcgcgcagggcggacaggtccgcggcatcgccggtcacgttccagcccatgaccggcggcagcacccaagcggccagcagcaccgacagcgcagtggcgatgccgcccggcagcgcgaacgtgaccacgcgcttgaggaatcccggaatatagcggcgcgtgttcggcgcgagcgccaggatgaacgcgggcatgccgatggtgagagcgccgatataggtgatatggcgcggcaggtatgggtatgggatttgcgtcagcactacgccgagcgagatcagcgcggagtacacggttttgacgaggaacaggctggccacgcgctccatattggccatgacctgacggccccgcgccacgacgtccggcaggtgcgagaacttggaatccaccagcaccacctgggccacggctttggtggcgggtgccgcgttgcccatggcgatgccgaggtccgcctccttgatggcgagcgcgtcgttgacgccgtcgccggtcatggccaccacgtggttctgcgtgtgcaacgcctgcacgatggccttcttctggtcaggcagcacgcggccgagcacatcgacgttttcgagcacgcgggccagttcgttcacgtcctcgggcagttcgcgcgcgtccatcgccaccggctcatggtcgcctgtcagtttcactctgcgggcgatggcacccacggtcactggattgtcaccggaaatcacacgacagcgcacaccctgctcacggaaccaagcgagcgtccgctcggcgtcctcgcgaatcttctcagagcacaacaccaacgccaccggctcagcctgcacatccagttgcgggccgtccgagacattggctccctcaactgcgtccctcagtccgcttcgcggactgaggggagctgtagaccgcgcaacaagcaacacacggttgccgtcattggcatactcgttaacctgctgcaacaccgacgaatagtcaccctcaagcgcagaaataatcacctccggcgctcccatgtaccaggtctcgccggatttacgcaccgcactccatttgcgcgccgaagagaacgggacacgagactcaaccgcacctgccccatatccttgggccttgagcccggcgagtacggcttggccggtgccgttgggctgctcttcgttgcagcagtcgtagagggcctgcgtggctgcctgttccgcagccgcattggcggaatcgagcatcacgagccggttgaaggcgataccgccatcggtgatcgtgccggttttatcgaggttcagcgcgtccacgcgagccagtgtctccacggattcaagctcctgcaccagcgtattgtgacgggcgagacgcatggcggccaccgcgaagttcagcgaagtcaacagcaccaagccttcgggaatcatgcctactacgccggcgaccgcggaaaccacggcttgccgccattcgccggtggagagtgccgtgccccaaccgccgaccgtatgaatctgcgaaagaatcagcagaatgcacagcggtaccacgaggaaggtcatgaatttcagaatcgtgttgatgcccttgttcaggtcggacacggttttcttgtataccttggcctgcgcggtgagcgtggcggcgtaggaatggctgccgaccgcattgaccttgaccaatgccatgccggagaccgcggtggcaccggaatacacctgctcccccaccttgtggcgcacggtacgagattcgccggtgagcatggattcgtcgagttccagtccccaggtctggatgatctgcccgtcggccggcacctgttcgccggcacggatccacagcaggtcgtcgagcacgatctcgttgtggggcacctccacgtccctgccgtcacgatgcacgaggaattcggaggccacaaggatggaaagcttatccaacgtgcgcttggccctgagttcggtgacgatgccgatgcccgtgttgatgatgatgacgaaaccgaacaccgcgtccctccaggaaccggtgatcagcaccagtaccatcgcggcgaagatgatgccgttgaacagcgtgaatacgttggctcgcacgatatcttgaaccgaacgcgaggtggatgttttcaccgcattcgattggccactttcgatacgctgcaccacttctttggaggtaagaccggttgctccgatttcaggcatttccacggctgttgttgcactcatattccccagcctaccgtgtcttgttccgcaatccgctaaggctcagggatgattcagggtgctttctcagcttcaagggcctgattcggctcaggaaacggtgactttgatctcgcgttcgtggggttcgtcgcgcgtgatggtgagcacggcgtcagtaatagtcattggcttggtatcggcagtgtcgccagaatcggcactgttggtgttgaggtgaaggatgacggcgtacagcagttcatctttgggcgcatgctttggatcaatgagagcgactggaataccggcttcacgcgcattggtcaacgtctggttccagctctcccggttggcgtcggtaacgtcgatgccgctgataaccacgattttgaccgcgcgagctacgaaatcggcaacaccctgctgtgcggtggccgcattcttgtcgacgccagtatgagcatccatactatcggcaccgttttcgctggtagtgccggcgtcagaagattcggtttcaccggatacaccatcagttgcgtttgccgagcttgcggatgtttcgagcgaggcatagtagacattgagtttgtcatcagacagcgcattgatgacgaactcgtctgcggcggtgtcagtcgaccccacaaagccgactgtgacatccgtgggatgtgtggaatcgtgggcgacttccggcatgctgtcttgggtatcgccgaccgccctaccggccggcgtgcaggcggccagggacaacacagccgccatgcaggccagcaatccgagaattcgtcgtgtcatatgctcacctgtcagcgggtaaacagggccaccgtctcaacatggtgggtcatcgggtagatatcgaaggcacggatgtctttgagctcgtagccttcgccgatgagtgtcgcggtgtcgcgtgcgaggctggtgggatcacaggcgatgtagaccacgctggatgcgccggccgcggcaatctggcggcagaccttggcacgagcaccggcacgcggcggatcaagcactacgacattcggcttggccagatgcgccggcacatggtccagcgtgcgcgagacgtcacccgcgcgggcgtccacgtcgttcaggttcatggcgcgcagattgcgctgggcgttcttgacggccacacgcgcgccttcaacgctgagcatgcgggtgcgttcaccggtcattgtggccagcggcagggtgaacaggccggaaccggaatacaaatcccagattacggcgtccgccgctgactgcagatgcccgttgaccaggttgatcacgtgcgtaccgagggcgatcggcgcttggcgatgcacttgccagaaaccgttggcgtcaacctgatagtcgaaggtcgtgccgttgatggtcacctgttcggtgagcagctgggagccggcgcgcagttcgccgtccacaagtacggcgtaattgtcgtctgctgccgcggtatcgacgatctcgccgcgcggttcgggcacggaaagacgaatctgggagccgggttcaaagccgccttcccacacgtgttcgcgcttggcgacgtccagcagcgtgcgcgtggcaagcggcatggtgtcgatggccacacggttgtgtgtgccgcgccggcgcatggatggcatgccgttgtcgtcagcaatcatttcgatgcgggtacgccaattgaggccgccggctgccttgtcgccgggcatgcgctcgatgggaacggccacgtcgatatggccgagtcggctcatctgttcggagacagtgatggccttccacttgagctggccgggcaaagagacgtgcacgagatccgcgccgcccactcccccgcccatcgccaagggaccggcaagtggccatgccgggctgactcggtcttcggacggctcgagaacctcgacgacttcgccggtccagaaccggtcgtcccggtcgtggggctcgtcaagttcgactcgcacgagttcgtcgggcaaggcgaagcggacgaacaccacacgaccgtcgatatgggccacgcagcggccttggtcggcgtatcgttcgatacgaacttcagcttgcatcatcgtcctttccggttgcgctcggttcgagttcggcatcaacagcgacttcagtctgtatcttcctagccgcgaccttatgccggtgcatcggcgtggcaataatgaggtaactcacccaaatcgccaatgcccagaacggaatgcccatgagcaggcgggtcacgccgagtgcagctacatggttggtcagatacagcggcacctgcaccaccagccgcagcaggaacagaccgacccacaggccggtgacaatcatataggcgcgtttcagggccttgtcgtccatccagtcatggaaccatgccttgaaatgctcggtgggcaggctacggatgaattcgacgaccaaacccagtccgggcacgcgcgcaatcagcgacacggcaagcaacgcggcatagccagcattggtaatgaatccgaagatgtagtaattgcgggcctcatgagtctgccatgcccaaatcaggcagatgcctaccgccaccagaccagagaccgcgcccattaccgactggcgctgaatcagtcgcacaataacctgcgataccgccaacacggccgaaaccgcaatggtgagattcagattgctcgtggccacgaacagtacgacgaacaccacgccaggcagcatggattcgatgacgccacgcgggccaccgatggcgtcgatgacggagaagtcctcgccttcattgccggcgtcggctagagcggacaggccggtgcgtttgttgtctgccaagtctcttcctataaatcagcgaacttcggagaacatcgggccgcgagacagcgtggtcttcacttcggtctgctggtcctggctcagcggacccttcggcttgttgtccggaatgtccttgaagtgttccttgccgttctcctcaccggcttcggccgcggccttggcggccttacgctcagcgggggcgaccggcggatgcatcgggatcagatcgcgcggcgccaaaggctcctcgccacgctcgacgacgatgtcggcgaagaacttgttcagcgcctcggtctccgggctgtccggatcgatagcagccttgccggagaagatgccacgcagcatccagcgcgggccgtccacaccaacgatgcgcgtgttcacggttttgccgcccttgacattgaccggcagcttcagttcggtgccgaacacaccgtccacttcagaagcggccttgttggcttcaagcaggtcaccgcgaacgtcatcccacagtcccagggtcttgggtgcggcaaaggcttcgatctccaggctggaggagccgaaggtgatggtggagccaagcacttgctgggtggcgcggttggccttgatgcgcagctggatgccctggaggaagggcaggtagtaggcgccgagatccagataatcgtcataatcgggcacgtcctcatcgttgacatcccacgggcctcgctcttcgccgcggccctggtattcgctggccggctcggcgagcacggtctccgcgctctcggcctttgcggcagcgttcgcttctgcggcggccaccttgtcctcatcgacaggctcaacggccggctcggcttccttcttgctcttcttcttgccgaatccgaacagtcccatgattcctcgtttcgtataacggttgcaaccttgctaacactagcactcaggcttagagaaagctgagcatcgcggccgccggtgtccggttcgattcgtagggaggccaaaatagtatggccgcatgaccatcaccattaccacgtctaacgtcaacggcattcgtgcggccaagcgcaagggcatcgaggattgggccggcaagcatgcgccggatgtctggtgcatgcaggaggttcgcgcgcctcagaacgatgtcgattctattttcgatgaatttggttttgaatacgccaccgccggcaaaatcgacgcgccggccgacctccataccatgaacgaggtctgccgggtgaaaggccgcgcgggagtcgggctgctcaccgacttggaagtgcttgacaagcgatatggtctgccaggtctgagcgaggatgtggattcggggcgttggatcgaaaccgatgtcaaaacgcctgagggctatacgatcaccgtggcatccgtgtacatacatgccggcaacaccgatgatccgaccaaaatggaacagaagtatcgttttctggacactatgctggcccgcatgggcgcgcttcgtgatgaagccgcacatggcggcaagcaggctgtattatgcggcgatttcaacatcgcacacacgccgctcgatatcaagaacgccaaggccaatgagaagcacgccggatttctgcccgaagaacgtgcctacgtggacaaatggctggacgaatacgagttcgtggatgtgatgcgttcgttggccggcgacattcaggggccatacacctggtggagccagcgagggcgcgctttcgacaacaatgtcggctggagaatcgactaccagttcgccacgcccgagttggcggagaccgcacgcggattcgtcatcgacaaggctcccacgtatgacaaacgctggtccgatcacgccccactcacgatcacatacgaggtatgacatattccgtgggacaacatccgaaaatcgacgattttcgcgggtcgtcccacgccccacagcatgagtaattatcaaccacactaagaatggcgtaattccgggcttcgtgagaaatctgctgtgggacaacactcatgtctatcgattgatgttgatgttgtcccacaatttgtgggacaacatcgggaaaacaccaatttttgcctttcgtcccacgcgaaccataatgcaaacctgcacatacgaatattgggttctttccacggatggaaagaacccaatacaatgcgctcaaacgcagattatcagtccagaccgagttggagcttgccgccggggatggcgtcgagcaggtctcgggtgtactgcttctgcgggtggtcgaagacctcgtcggtggtggcgtgctccacgagcttgccgtgctgcatcaccacaacctcgtcggcgatctggcgaaccacggccagatcgtgggtgatgaacaggtagctcaggcccttttcggcctgcaggtcgttgagcaggtgcagcacctgatcctgcaccagcacgtccagagcggagacggcctcatcgcacacgatgacgtccggatccagagccatggctcgtgcgatggcgatacgctgacgctggccgccggaaagctcgttcgggtaacggcccatcacggaagccggcatctcgaccatgtccagcagttccttgacacgattggcacgcgacttcttatcgccaatcttgtggatgcgcagcggctcctcgatggaacggaagatggagtacatcgggtcgagcgaaccgtacgggttctggaacaccggctgcacatggcggcggaaaccgagcagatccttggccttgaacgtggaggtgtcgcgtccttcgtagaacaccttaccggaagtgggatccagcaggtgaagcaccatgttcgccacggtggacttgccggaaccggactcgcccacgatggccagggtggtgccgcgcttgacggagaaggacacgtcgtcgacggccttgaacatctccttcttgcggggcagcttgaattccttggtcaggtggtcgacggtgatgatgtgctcgcttttctcaagcgtgctttcgccggcgatgtggtggccaagcagggcgtccgcgttctcaccgcgctccttggcggagatgatgcgctgggaggccagcgacggggcggcggctacaagtcgcttggtgtacgggtgctgcgggtgctgcagcacttccagggacggtccggattcgacgacctggcccttgtacatcacgacgatgtgctgggcgcgctcggcggcaagacccagatcatgggtgatgaacagcacggcggtgcccagcgagtcagtgagcatgtgcaggtggtcgaggatgcgcttctgcacggtcacgtccagagcggaggtcggctcgtcggcaatcagcaggtcagggcggcaggccagaccgatggcgatgagcgcacgctggcgcataccaccggagaactcgtgcggga

SEQ ID NO: 174 - DNA, 3501 bp, Unknown
  R101_18m  MAG No. k141_3896
cccatgcaccatattcatgccgcacgcaaacggatactcgcccggcggcaacgccggcagttccacgtcggtggtggcgttgcccggcagcatggcgtcaagtcccagatcagcaaacaccacatgcgaggtgcattcgccggtctcctgccggtcgaaggctagtgtgatcggcgtacccgcacgcatgctcaccacggcgggggagtacccgcccttgacggtgatcgtcgcggattggcgttcgccggaagcgtccatggccccggccgttgccttctgcgttccgaagaagaaccgcaggaccagccatgtcaatgcggccgccactatcagcgccgcgacggtcgagaagatgctgaactccataactgttccttcccattcctaatgcactgaacaacagtgtataccctatacccctagagggtatataatggggtgtgttcagctgacggataagtatcagggggtttgcgatgcatggttatgacgaagacaaggccaaggtcatcgcacgattacgccgtatcgaagggcaggtgcgcgccatcacgcagatggtggaggatgacaaatactgcatcgatattctgacacagatttcggcgtcgaactcggcgctgaaatccgtggcgttattgctgctggacgatcatctcaaccattgcgtgcggcaggcgtcggtccagggcggcgaggtggccgatgaaaaacttgcggaggcttccgcggccatcgcacgtctcgtcaaatcgtgacgagttctgccgcatgatgacgcgcgctggcaaatcatgaaaggccgtctgacgctcgggtacgacacagcataataacggttgatgctcgactgtgataaggccaagcgtccaatgtgggctgctgagcgtccgtttaacggcttgaaaccgtcgaattcggtaaaaatttaccgtcattcaccatcgatgacatactgggtaccatgtttgagcaaataggaaccgtgattatcgtcatcgtcgtgctagtggttggtgcagggcttggcctcttcgccggcttcgtgctggggcgccataagggtcaggagatggctcgaggcgtcaaaagcgaggagctggaggaggccaagacctcgctggagaatgcgcgattcgagaatgctgagctcagtgctcgcaatgctgccgcacaggctcagattgaaggcgtgaaccagcaattggctttcgccaagtcacaacttgcccaggcgcagcaggctgagcagattcgcattcagcaggaacgtgagcgtgcggctgcggaggcggaacggaagcgtcaggcggatgctcgggacgccgaggccaagcgtgctgaacaggaagcacgtttgaaagaacagagcaaggtgctcgaggcgcttgcgccagtggccaaaaatcttgataccttgcagaacaaggtcacgcagatcgaagagggccgcaagagggaaatgggcgcattgggagcccaactcaaggggctcaacgaccagcaggcccgtttggacaaggaaaccagttccctgtccgccgcattgcgcaacaacaaggtgcgtggcgcgtggggcgaggcccagctcaagaatattgtcgagtccgccggattgctggaacatgtcgatttcgacattcaggtggtggtcacggatgccgatggacgtacgttgcgcccggatatgatcgtgcatctgccgggaggcaagaccattccgattgatgccaaagtgccttatgccgattaccagcgtgcctgcgagatcccggacaccgccagccccgaggatattgcccgccgcgatgatttgctgcggtcccatgccaaggcgttgcgcgagcatgtacgtgctctcggcgaaaaggcctattggaatgcctttgatgtggcacccgattttgtggtggccttcatccccaatgaggcgctgttgcaggccgcgctcgaagccgaccccacactgatggatgatgcgttctctcgcaaagtggcgctcacctcgccggtcacgctgtgggccgtgctgaaatccgtggcctatgcctggcagcagcagtcgctcaccgatgacgccaagcagctgttcgatttgtcccgagaactttacgaacggttctccacgttgggtgattatgccatcaaattgggcacccagatcaccaagacagtcagcgcttacaacaagttcgcgtccagtttggaacgccgtgtgttgcccaccgctcgcaagctgcaaaaaatcgaaccgaccaagatcatcgaggaagtaccgatcatcgaatcagacaaaggcaatgtgagcgaactgtccgcccctgaagtggtgccggccgatgaaggtgatactcatctgactgcctcaggcgatagtctggagtcatgactgaatctggattccgccccactggtaccccggacctcgccgtcgcgaagagccacaatgactttgccatgctggagccgcgtgaacagctagccaccttgctgagggagcatgtggtgggccgtccgttctccgaacttgccgcggtgacttttgaccaccgtgccgccaccgtcatgggccatgtactgattgacgctttggaagatgcgggctattcggttgatgacttcgatgctgttggtgccttgaccgcagcatctgtgcccatggtgtccgccatgatccaggccgccgcctctcgtggcgaggacctagacggattcgtgatggacttcgtctacccgtccatcaagggcccctccatcgaaggccgccgtgtggtgctgttggatgcttggctgtccgaaaagtcgtacgtgcagaccagctcgctggtcaccctgcgcaacggcaatgagctgagcctcgactttggcatagtggagcagctgggtgccaaggtcgtggccatcgcctcgctggtcggtggcggtgccaaagacatcaatgtggtcaacccctccaccggcgacgagcaaacgctccccttcatccaggtcttcgacgaatccgaactgcggtaaatccacctttgacttccctcgcataaagtcagccgggctgagccgcgaagttgactaagaggaaccggtgaatagcgttatcgaggagaaagattgcacgcacccaaccagatttctttggctgccaaagcttcaggtgaaccggaattccgtgaaatcggccttgggccgtggtctgagacccatcccggcgagcctcgtcccgacgatccgacttctccgaattatgacggtcgtttcgactcggtgctgttgaacgacggagaccgccgcaacgtattggaccgttaccgctactggaccgttgctgccattaaggccgatcttgacgctcgagggcgtcacgacttcgaagttgcggtggaaaactggacccacgattttaacatcggttccatggtccgcaccgctaatgccttccaggccaagcgcgtacacattgtcggtccacataagtggaatcgcaagggcgcgttgatgacc

SEQ ID NO: 175 - DNA, 89152 bp, Unknown
  R101_18m  MAG No. k141_4072
gaacatgttcgcggaggggtgcgttgacggtgacgtattggcgacggtgaacatatcggcggcaggagaagataagctgttctcaggggaacatcagcacaacaaaggagttacgcatgcgagatttcattttccataacccggtgaagatctacttcggcaaagggcaggcgcgccatatcgcacaggaggtggagcgtgtcgagggcgccgttctggtggtgtatggcggcggatcgattaaacgcaacggtgcctatgacgatgtgatggctgcgctggcaggaaccgggcgcaaaatcatcgagctgcccggcgttacgccgaacccgcgattggacaaagcgctggaaggcgtacgactggtcaaggagcatggcgtcggcctgattctggccgttggcggtggctcggtaatcgactgcgcgaaatttatttcgttgggttccggcatcggtgacgatgaggatttgtgggatgactacatcgaaaccggcaaaccggcacctgaagggctgattccggttggcgtggtgctcaccaccgcggcaacgggctcggaaatgggagatgcggccgtgctcaccaattgggaacgtaaccgcaagctcggctatacgtcgttcccgctgatgcccaggttctccgtgctggatccaagctacctgatgacattgcccgccgaacagacggtgtatggcttcgaggacatgttctgccacacgtgtgagcagtatttctcctatccggtggacgacaacctttccgacgaaatcgccgagggaatccaacgtcatattctgcgttcgtggcgagcgtgcttgtccgatccgaaagattatgaggctcgctccaatgcaatgtgggattccacgttggctctgaaccgcattatctcgcgcggcaaggaagaggattgggtgacgcacggcatcgagcacgcgctgtccgcatacaccgatatcgctcacggtgctggtctggctgtggtccacccgcattggatggcatacgtgtatttggtcaacgatgaggtgacggctcgctttgcccgctgggcggtcgacgtgtggggtgtgacgcccaccggcaaaaccgatcgcacggtggccgaggaaggcattgatcgctatgtcgatttcctgcgtcgcgtaggtgcgccgctgactctttctgaggccggcgtgcccgacgatcccgcctctctcgacaagtatgccgatcatgccggtgaggccggcggctcattcgtgcagattcaccgtgacgatgcccgagcgattctcgaggcatgcaaggaaccggtgtcgttctgacggttggactaatcccgtgatttgagccgccgcgtgctgtcccgcaccaccaaagacgtagaaagaaccacgcgcttctgaatcttgcgtccttcattggtatcgatgaccatgcgggctgcagtggcggccatgtcttgcaatggctggcggaccgtggtcaacgccgggcccatgtacgcggcggtctgtatatcgtcgaatccgataacggacagatcttcggggatacggattttcagttgacgggccgcctcgtaaacgcccatggcctgtaggtcattgcctgcaaagatggcggtcgggcgactttgttcgtcttcaagtaacgccatggctccttcgtaaccgcctggcgtggtgaaatcgccttcggtgatgagttcgggagaggtggggatattgcgttcggcgagggccgccgaatagccgtcaagccgggcacgtgagcagagcatttcatccggtccggtgatgatgccgatgcgcttgtggccgagttccagcagatgacgggtggcgatgacgccgcccatccagttgtccgcctgtacggagagatcatctaatgccggattgccggaagggtcgaagacgacgaaaggaatgccgtgtgattggaacatgctgcgttccttgtccgtcaagttggagaacaccagaatagcgccaatgggctggcggtcgatgatgccttcaacccaggaagagtcggggtgctgccggtcgccactttccgcaaccatgacattgatgttgtgcggcttggcctccgtgatgatgcccctgagcacctccagcgcccaaatggtctcaaaatcccgaaataccacctcgatggtgcgttgtttacgggagggggagacgcggcgaatgtagccgttgtctttcagggctttgtcaatggcctgccgggccgcctccgaaatatccgccttgccgttcagggctttggacacggtggccagtgagtagccagtctgtttggcgatgtctgcaagtttgaccttgttctcgtcgttgcttttgcgctgttctgccgacgccatcattgaccgccttcatcagagaatgttggtatcagtatattcgaaactttcgtaaagtcaatttgacgataaagaatggtatgtatagataaaaaaggttggaatttcaacgattttgatagtaaaaaagccgatataaatttcgtttgaccgtcaaactaaggctctttatgataaaggtatcgaaaacataaagcgagttttcggtaaagttgaagaaggctgatggggtaggtgaaacggcgaagtttcactgaaaacatcattaattaccagctgttagatatgtaactggctgatatacctttcgaaactttcgtaaatcgcggatcggtttcatgctggtcaagaacaataaggagacgacaatgaagttcaagtccgtggccgccgcacttctggcggcggtaacctgtgtcagcatggccgcttgcgggagcggcagcgacacgaacgccgatggcaaggtggaaatcaccatgtggcacaactccaccactggcgacggcaaggcatactgggaatccgccgccaaggcgttcgagaaggaaaacccgaacgttaccatcaagatcgaagccattcagaacgaggatatggacggcaagctgcagaccgctctgcaggacccgaattccgcccccgatatctttatggcgcgtggtggccagaagctacgtgatgtggtcgaagctgggcaagccatggacctgaccgacaagatctccgacaccgtcaagaaccagatggccactgctgaagccaccggcaccatcgatggcaagatctacagcgtgcagcagtcagtgcttcccggcggcatctggtattccaaggatctgttcgagaaggccggtattactgaaactccgaagacctgggatgagttcaagaccgtggtgcagaagctgaaggacgccggcatcacgccgattgccgtaggcggtaaggacgcctggccggccgcccactggtggtactggttcgcactgcgcgaatgctctgctgacaccttcgacaaggcccagtccgataaggacttcagcgataagtgctggacccgtaccggtgatgatgtgcaggcgctgctcgacctcgatgccttcaacgatggcttcctgaccactccggcccagcagggcgcaagctcctccgccggcctgctcgccaaccacatggcagctatggaactcatgggcggctgggagcccggcgtgatcaaggacctgactccggacaagaaggacatggccgacctcggctacttcgcattcccgaccatggacggtggcgaaggcgatccaactgccatcatgggtggttccgatggcatggccgtgggcgagtgggcgcctgaagaggctgtggacttcctcaacttcgtctccgagaaggaatggcaggagaagtacgctgaggcgttctccaccatcccggccaacaaggaagcccaggatgtggtgaccaacgaggctctgaagcaggtgctgaccgtctacaacgacgcatcctccgtgtccatgtggctcgacaccgtgttcggtcagaacatcggcaacgcactcaacgaaggcgtggtcaacatgatggccggtcaaggttccgcccaagacatcgtcaagggtgttgaaaccgctgcggccaagggctgattcgctctgacccgaccgtaattcccgggctgcgcgaatgcttgcacagcaacaaccgcggcccaatttgttttcttaggaaggcctcaacaatgtcagtttcagcaggcgcgagggtacagcgccgcacgtcgggcttaagcgacaaggctcgcaaacgtatcgaaatcaccatcctttcgcttcctgccctgatcatgttcctcggattcgtcatcctgccggtgttcatggccggctactacggattcttcaagtggaagggctatggcaagcccaccgtcaacggccagttcatcggttttgaaaactacaagatcattctgaccgacccgaacttccagcaggcattggggcacacgctattcgtggtcgtcgcttcgctcgtcatccaggggccgctggccatcctcttcgccctgctgctcaaccagagattcaagggccgcgcactgattcgtaccctgattttcgtgccgtacgtcgtttccgaagtcatcgttggcaccggctggggcctcatcctccagaccacaggcgcattgaatgcgctactcaagaaaataggacttggcggggcggactggatctccgatccgaaaatcgccatctggacattgatgttcatcatttcgtggaagtacatcggcttcgccgtcatcctgatgattgccggcatgcagtcgattcccgaagacctctatgaagccgcgaaagtggatggtgctggattctggcgtcagcagtggagcatcaccctgccactgctcggccccaccattcgtatctgggcattcatgtcgattatcggttctctccagctgttcgacttggtctacatcatctggggtcagtacgtgtcgtctaccgcaggaacgtccaccatggcaacctacatggtgcgcgaaggtcgactcgccaacaactatggttacggttccgccgtggccgtggtgattttcatcatctcgctggtcattgccttgacctaccagcggttcgtgcttaaccgagatctcgaaggtgcgctcactgacgagagggatgccaagcgtcgtgccaagcgtgcggcgaaggaagcggccaagcttgccaaggtcaatggcaatgccgcagcagttgcaaatgaggtggtttcacaatgacgaccgcagtctccccgtccgtaggcaagggcaagaacaagacctatgatccgtatacactgagaaaatccgcaaagaccccgtggggcaacccggtcgtctacttcttctcactgctgcttgtggcgctgtgcgttggcccggtgctgtacatcattatcggcggcttccgcaccaattcgcagattacgagggacccggccggctggcccgatccatggaactttgagaattacaagacggtgttcacttcgaacatcttctggtcggaactcgtcaactccctgatcgtctccattggcacaatggtgggcgttgtggtgctggccttgatggtgagcttcgtcattgcccgatacgagttcaaattcaacaaactgctgtactcgctgtttgccgccggcatgatgttccccatcaccgtggccatcaccccgttgtatctgctgctgcgcaatctgcacctgatcaactcgcatctgggcattatcctgccccagatagcattcggcctgccacaggccatcatcatcctggtgccattcctcaagtccattcctaaggaactggaagaagcggcagagctggacggctgttctcgcatcggcttcttcggccgtatggtgctgccgttgagctggcccggcgtggccaccgtcggcatcctgagcttcgtgagcagctggaacgcctacatgctgccgctgttcctgctcaacgattccagcaagtacaccttgccgctcggcgtgcagatgttcagctcccagcattcagtcgataccgctcaggtactggccttcacctcgctgtcgatgatccccgcgctgatctgcttcaccattttccagaagaagatcgttggcggcctgaccggtgctgtcaagggctagtcgcagcaaccataaccgtgccgtggaaaggtacatggctctttgggccgattcctttcaacctcttcctttcctcctttccacggcccctttcttttcaatgaggagaagaccatgaagatctccaatcccgtactccccgggttcgatgcggacccctcgatgattcgcgtcggcgacacctactacatcgcaaattccacatttgactggtggccgggagtccgtttgcatgaatcccgcgacatggttcactggaatctgctgcccgggcccttaaaccgcgtttcccagctggatatgaagggcaatccctccggtggcggcatctgggcaccggacctgtcttatgcggacggcaaattctggcttatctataccgacgtgaaaatcgtcaacggcgcgttcaaggattgcgcgaactatctggttaccgccgacgacattcgtggtccgtggagcgatccgattcgggtcaatggcgtcggattcgacgccagcctattccatgataccgatggacgcaagtatctggtgcagcaaacctgggacttccgtgaatatcatcatccgttcgacggcatcaccttgactgaattcgatgtcaaaaccatgcaattgaagccggaaacagcgcgcaccatctggcgcggcaccgatgtgaaattggtcgaaggaccgcacctctacgccatcaatggctggtactacctgttttgtgcggaaggcggcacccaatacgagcaccaggagtccgtggcccgttcgcgtaccttgggtgagctttcattcgaaagcatgccgagcaatccgttcctctccaacttcgatacccccggcacctacctgcaaaaacaggggcatggggcgctcgtggatacgcctagcggcgaatggtattacgcttcgctgtgcggcaggccctggcggcacgagaacgagccggctcatggtgtgcgcggctggtgcacgctcggccgagagacttcgatccagaaggtcgagtgggatggcgacggttggccgtacgtggtcggcggccatgggggagagcgttacgtcgaagccccagccgacgccatcgcaaccgaggcccctacgaatcatagtcagcatgacgagttcgaatcaaacaaactcgacctcaactggaacaccctgcgcgtaccattcaccgagaccatgggccgcgtgggcggcggctcgctgaccttgcgtggtcaagggtcgctggcaaacctgtttgaactgtcgctggtaggacgccgttggcaggcgttcgatttcaacgccgaaaccaaggtgacattcgatccaagcaactacatgcagatggccggcctgaccaacttctacaaccacctgtgctggtcatgggcattcatcacctgggacgagaagcgaggacagcgcgtaatcgaagtcgcccagaacgatttcgatacgtacacgtcgttcctcaaagacacagccatcgccattcctgatgacatcgaatccgtatggttgcgaaccaaagtgcgtacgcgtacctacacctacgagtattcgttcgatggcaagacatggcatgagattccggtgacgctggacgccgccgtgctctccgatgatcgtgtggcccaacgttatggcggattctttaccggcgcgttcgtcgggttggtggccgtggacctttccggatacggcaaagaagccattttcagccatttcgattacatggaaatatgatgacgccaggcggctttcctgataatcagggaaagtcgcctgactattcggtactggggaatgaaaggcgacacttgtggcaagcgacaatgaacattgcggcgaccgtggccgcgaatgtaccataaccgtctccaacccggtgttgcgtggcatgtacccggacccgtcctggatatgggatacgacgcgcgaggaaatcgtgctggtcaactcctcgtttgaattggtgccggggttgcccattcatacgacccgtgatcttgtgacgtggacgcgcacggcgaatgcggtggatgaggcgatgtctcatcggctgctcattgatggcgtcgaggattccggcggcctgtacgcgccgaccattcgccgtatcggcgggcgatatgtgatcgtatgcaccgtggcccgcgtggatgaggtgaaggcgctcgctgcgggatgctcgcagaaggatattgataactgccgtgacgcccaaggcaatttcgtcatcgaggccgatgagttgaccggaccatggcgcggcccgtactgggtggccggggccgaaggcattgatccggacatctttgaagacggcgatggcacagtgtggtggacgcaaacgcgcccggcattacacccgcagtgggatggtcaaaccgagatctggacgcagcccatcgccccaggcgcgtggacgttgcaagaccataaaaccgtgatttggcgcggctatggcatggatgcggtatgggctgaagggccgcatttgtaccgggtgggcgattacctctacctgatgaccgccgagggcggcaccagcttcgagcacagtgagatgataatgcgcacgcacgcaccgcgcggattcgcggcggcgctcgccggttttgagaagaaccttgctgcgcaagatatctggattgagctggcgcgtgacggtgaacgaagcgtggtgggccgcgatgaccggctgtttgaggcttgcaaacgcaatccgatcctcacacaccgtcatttgggagcgggggagctagtccaatgcgttgggcacgccgatctgctgctgcatccgaccgtcggctggctgctcgtgtgtcttggcgtacgcgagactccgggcgaggaacccggagaaacgttcagctactgtggccgggaaacgttcgtggcaccggtcgtatggcagcacaatccggtctcgtggaagctggacggtggggagccgaataagcgtatcgatatcgacgatcccggttggccggtcgtggctccggggcttggccggcttcccgagaagttggtcgtggacgttgacgaggatggattgccatgtgcagtgaggggtgtggattctgcggggtgtgattgcgctgctggtaataatgccgcatgccctgctgagctcatccagctcgacgatacccgcctagtcggcgttcgaggccgtgacgattaccggttcctgcgtgtcgacgggcaggaatatgccgcgttcacccggcccgaatacacgatgatgatacatcaggattccacccatgctgtcatggtcatggcggaagcggaatccggccaattgacggccgaaatcaccgataggggagataagcggtgcattgcgcttggagcgcttggagccaacgaatggttcggattgcgcttgcatggcaatcgtttggaattccttgccgggcagcctgcatctgacagcattgatgagggaacaatgcctgatattgcactaattgcgcacgcggacgttacttatgctcgtatcatggcagattgtgatgcgcgattcctcagtaccgaatgggccggcggattcgtgggttgcctgatcggcgtaaaacggcggtaatggtctcagcccgctctacaatattgtgcaatcatattgtttaatcgttaaacaaatgcaagggggcaatcgatggcgcacgatctcgaacaactcaagcaagatcacccggatgtggcgaaactgttcgccgatgactggttgcagtaccgtaagtcggagattttgccggaacttacgcgcgaggcgcagtccacgtgcgatcgcatcaatcgcatctactttgaagacaccgccgaagctgagcgactgttccgcgaactcgtgcccgaggccggcgagggcgtggacttccgcccgccaatccggcttgattacgggctgggcctgaaaatcggagaccgtacgttcatcaacatggacctgctgattgtgggcggcggcccgatctccatcggctccgattgcctgatcggcccgcgcgtgagcatctatacgccaaaccacgccatcgcccgcaagcctcgactggaaggctggcagcacaacgccgacgtgaccatcggcaacaatgtgtggctgggcggcaatgtggtgatctgccccggcgtcaccatcggagacaactcgattatcggtgcgggtgcagtcgtcacccacgacattcctgccgattccatcgctgtgggcaatccgtgccatgtgattgccgaagtcccggatgactggactcctgaagagcgggccgctgccgagggtcggtaggtttgctgctctgaccaactgttacggcgaaaccgggatacaggagagaaaggaacaatgcaatgacgcaatatcatgtttccgcgcaggcggcgaagacgaacggcgccggcagcgcggccgacccgtttctgaccatcggccaagcggcggccatcgcccgagccggcgatgaggtggttgtgcatgccggcacctatcgggaatctgtcgacccccgattcggcggcgagagcgccacgaaccgcatcgtctatcgtgcggccgcgggcgaaccgcgcccggtaatcaccggctccgaacgtatcgacacatggcagcccgaaggtgatggcgtgtggaaagccgtaatcctgaacgcattcttcaacggatacaacccgtacgtggaaaccgtattcggcgattggaccgtatacccggacccaaaggtcgaggtacgccacctgggcgatgtgtatctgaatggcaaatccttctacgaagtcgcctcgctggacaaggtgcgcaacccacagcgttgggataccggccgtgacgccgccaccgattccatcgtgccgctgattgatccggataccaccgtgaacgtgtggtgctgtgcggtcgatgatgaggccacaaccatttgggccaatttccatgaagccgacccgaatgcggaacttaccgaaatcaacgtgcgcgagacctgtttctacccgagccgcccgttcgtcaattacattacggtctccggctttgaaatggcgcaggcggcctgcccctacacgccgccgactgccgatcaggtcgggctggtgggcccgcattggtcccgcgggtggattatcgagaacaatcgcattcatgacgcaaaatgttcggcgatctcgctgggcaaggagatctccaccggcgacaacgaatcgacgcgcactcatcgcaagtccgggtaccaataccaaaaagaggccgtctacaaggcgctgcatgccggttgggagaaaggcgtagtcggcgggcacgtggtgcgcggcaacgtaatctacgactgcggccagaatggtgtggttggtcatatgggctgcgccttctctctgattgaaggcaaccacatataccacatcggcaccaaacgcgagttcttcggctgggaagtggccgccattaaaatgcacgcagccgtcgacgcggtggtgcgcggcaaccgggtgcatgattcggtgctgggcatgtggcttgattggcaggcgcagggcaccgtggtggattcgaacgtgttctaccgcaacacgcgagatgtgatgaccgaggtgacccacgggccgattacgtttatgaacaacgtgtttgcctctgagttcagtttcgacgactatgcgcaaggcgcggcgttcgtcaacaatctgttcgccggtcgcattcgtcacaccgccgtcttggaccgatccacgccataccatttcccgcacgtcaccgatgtggccggcgaggcattcgtctacggtggcgatgatcggtacatcaacaacctgttcttggctgtgggcgattccgccaaaccgttgcgtaccgcggatgccgccggtgcggccggtatggcggaagccggaaccgcgttctttgacggctatccgtgctcgcttgcggagtatgaacagctgattgaagaggccggccttggcgatgaggagttgtatcgcagcgtgaagcagccggtattgctggcttcgaacgcctatgtttcgggcgcgaaggccgcttccggcgaagccgaggccgtggtgagtgatgacggctcttcgttggcgttgcgcgaaaccgatgatgagctatggatgaccgtctcgttgcccgaaccgattcggtcggcgactggaccggtgatctccactactgatcttggccagccgcgcatcgttgaggagtatttcgagaatcccgatggttcgccgattgttgtggaccgggatatcaccggtgctgcgcgcggtgcatgctcggcccgaggcccattggcagcgtatgacgatggggaagtgctcatctggtcgaagtgacgggattgcggtttcgactgttgcctctgcctcggcctttgtgtggcactgagtggggctgggctgccagtatttggcaggccggccccttttcgatttgcattggtaacaaatatgatatatggttaaatcattaaactaagtactgtaagtccatgcatacctacgcaacgtcaatggagatactgctatgcgcgcacatcatgttctgctgctgtcgctctgcctgttggccgcagcctacgccgtactgctattcgtttcaccagccgctgcgccgattggcgtcacgctaaccgctgttggtctggtgctggcctcgacgcgctatgcgtggcgcgccaaattcctggctctattcaacgaagcatgatttgatgaatcttcttcttcctctcttctccttttaagcccggacgctcgccgggctttttcttttggccgaggtcgaagtggggagggtgtgctatggccactttcgtgtcgggggtgccgtgctcccaacaatagccggtacatgcattcatgttcacttcagcagattgattgacatatcgggccgaaatgactggtatttttctgccgtccgccagcccgccgcttcggcgtgtcgatgaactttgagaaatttcatcgataagattggtgaaagcgcaaaaaaaggaaaacgctggaaaatacccgttgttaccgctcacatttagttaaccgaatgaatcaacagtgctgtaatccgtgcaatctctgggaaaagagcggtcgtctgattgttaaatcaaaaaactaatggtatatttttatgcaggttcggcaagggttgcctgaccaaaaggaagaggaaacaagttcctatcaatgtcgaaaggaattcccatgaataagtggaccaaggtgctcggtgtggttgctgcaaccgccatgctcatcccgctggccgcctgtggcggtagccgtggcacgaccactgccggtggcaacggcggtagcaccgtcaaggtcggtatttcgatgcctgagcagatgctcgagcgttggaagatcgatggcgagaatctgaagaagcagcttgaaggctacggctacgacgtcaccctgcagtatgcagatggcaagaccgatctgcagacctcccagattcagaacatggccaacaacggcatgaactacgtagtcatcgcctccatcgacggcactgcgaccggagctgctgccgagcaggtcgcctccaacggcggcaaggtcattgcctacgaccgtctgatcatgaacaccgacgccgttgactactacgccaccttctccttggaggatgtcggcaagatgcagggcgagtacatcgagcagaagctcggtctgaaggatggcaagaagggcccgttcaacgtcgaactcatggccggttccccgaccgataacaatgcaggctactacttcaagggcgcttgggacgtgctcggaccgtacttcaagtccggcgtgctgcagtccaagtccggcaaggttccttcctctgctgatgattggcagtccatcggtatcgataactgggatcgtcagaaggcccagaacgagatggagaaccgcatcaactccttctacaacgatggcaccaagcttgacgccgtgctcgcccagaacgacgccgaggcaaccggtacctacaacaccgtagaggccgctggctgggactactacccgatcatcaccggtcaggacgccgagaaggccaacgtgcaggccatcgtgcagggcaagcagtccatgaccgtctacaaggacacccgcgagctggccaaggccaccgccgaaatgatcaaggacatggtcgatggcaaggatccgaaggctcctgacaccttcaacaacggcactaaggatgttccgtcccagctgctgaccccggtcaccgtggacaaggacaacctcaaggaaatcctcgtcgacggcggctacatctccgccaaggatgctggcctgtgatccgcaggatcgctgattcgattcatccaacggcctaacggctaacagataaggggggcgccgcgctgcgtggttgcggtacggcgccttcatcatgcacagggacattactatcggaggaggtaactgtggctacgaacggtgacgtgattcttgagatgcgtcatatcgtgaagcgtttcggcccggtcaccgcgttgaacgatgtgaatatcatggtcaagaggggccagatattctcgatctgcggtgagaacggtgcgggcaagtcgactttgatgaacgtgttgtcgggtgtgtacccgtacggcacgtacgagggcgacatcgtgtacaacggcgagacgtgcaagttcaggacgattcgcgattccgaggagaagggcatcgtgatcatccaccaggagcttgcgctggtgccgtacatgtcgatccaggagaacatcttcctgggcaatcagaagaggaagggcatcgcgatcgatgccgacgagcagcgccgcgtcgcgtacgacgtgatgaggaaggtcggtctggacgagaacccggacaccctgatctcgaacatcggtgtcggcaagcagcagctggtcgagatcgcgaaggctttgaccaagaacgtgaggctgctgatcctggacgagccgaccgccgcgttgaacgacgaggattcgaggaacctgctcgacctgatcgacgggcttcgccgcgagcagggcatcaccgcgatcatcatttcgcacaagctcaacgagatcgcctattccgcggacgcggtgcaggtcatccgcgatggccgcaccatcagccatatcgacatcgacgcggcccacccgctggaccaggatgtgctgatccgcgacatggtgggccgtccgttgaccaaccgctacccggtgcacacctccaggatcggcaaggagatgttccgcatcgaggactggaggatgcgccacccgctcgacgaggcgcgtctggtctccaaggacgtgagcatcaacgtgcgtgccggcgagatcgtcggtctggccggccttatcggcgcgggccgcaccgagaccgcgatgagcgtgttcggccgccagtacggcaccaacgcgtccggcaggatcttcgtggaaggcaaggaagtcaagttcccgaccgtgcgttccgccatcgaccacggtgtggcctacgcgaccgaggaccgcaaggtgtacggcctgaacctcatgaagacgattcgcgagaacacgtccctggccagtctgaaggaactgtcgaacaggctgggcgtggtggacgagacccgtgagaagcggacggccgagaagtaccgcaaggagttccgcaccaaggcgccgaccatcgagatgcctgccggcaacctgtcgggcggcaaccagcagaaggtcgtgctggccaagtggatggccaccgacccgaaggtcctgatcctggacgagccgacccgaggcatcgacgtgggcgcgaagtacgacatctacgagatcatcgaccaattggccgactcgggttccgcggtggtcgtgatcagctccgaactgcccgagctgctgggcatctgcgaccgcatctacacgatgagcaacggcgtgatcaccggcaacttcgacgcgaagaagacgaaccaggaggagctcatgcgctacatgacctccgccgtcccgctgcccaaggagcaggccttcgcctgacccgttcgttgaagaacgttagtttttgaaaggatagtttccgaaatgtctaccgcaaccgtaacccccgcagccaagaagggcggggacgaacagagcctgaaggccctgctgttgggcaacatgcgttcctacggcatctacctggccctcgtgctggtgatcgtcgtcttccagatcctgacgggcgggcgcctgctgaacccgaacaacgtggtcgccctgttccagcagaacgcgtacgtgctcgtggccgccatcggcatgctgatggtcatcatcgccacgcacatcgatctgtccgtgggctccgtggtcgccttcatcggcggcgtgggcgccctggccatgaagcacggggtcccgtggtgggccgcgatcctgctcatgatcgcgatcggcctggccatcggcgcgtggcacggcttctgggtcgcctacgtcggcgtgcccggcttcgtgaccaccctgggcggcatgctcatcttccgaggcctggcgaccgtggtcgccggcgagtccatcccggtgtccaacgcctcgttccgcgccatctccaaggactacatccccaccatcttcgtcgggccgttcgccctgaccgccctgatcgtcggtctggccgccatcgtgctcgtggtctggagccaattgtccaagcgcgccagggccgtcaggaacggcctgcccgcccagccgatgagcttcgtcatcttgaagtgcgtggtcgcgaccatcgccatcggctacgtgacctacctgcttgccatgtccggcaacaccacccagggtggcgtcccgatcgtgctcgtcatcatcggcgtgctcgtgtgcgtctactacttcgtcctcaaccgcatggtcttcggccgcaacgtgtacgccgtgggcggcaaccgcaaggccgccatcctctcgggcatcgacaccaagaaggtcgacttcgagatcttcctgaacatgggcttcctggtctccatcgcctcgatcatcaccctgtcccgactcgcctccgcctccgcccagaccggtatggagttcgagatggacgccatcgcggcctgcttcatcggcggcacggccgtcaccggcggcatcggcaccatccccggcgccatggtcggcgccctgatcatgggcgtgctcaaccagggcctgtccatcatgggcgtggacgccgcctgggtcaagaccatcaagggcctcgtcgtcatcgccgccgtcgcctacgacctactctccaagaaaaagaaaggctgagccaaactcggcctccgggcccgcccggtggccacggggatgggaacctgggttccattcctcctccgaaagggacgttgttgcatgcagcgtcccttttccgtttgtcgcgatggatgatggggatcccggtgtacgttcttcacgaaatcagccctgacttggggtgtatttcgacaatatgattcggcgatgtgcctcagcggatatgtgcggccaatgaaaaagcgggataccgatgtcgatatcccgctttcagtgaataggtaaagcagagcttacttcttcttggctttcttaacgcgcttgggctttgccgccggcttcttgggctcgaagaacggccacttgttgagggcccaagtgtgcagggcggggattttcgccacggcgaaaccgatgaccaggccgataacgatggcccaagtttccatgtcgcggttcaggagcagcaatccgatgaacaccaacgcaatgatgaagctcatcatctgcgatgcctttgactgcttggcggtcaccaagtcggccttcaacggaataagccctaggaacatgccgcagggcacgcagatgatggccaataccacactgagaatgattgacaaggttgttgcgtccataatgttctgatgttcctttggtgaagtgatgaattcggatgaagtgattattgattgcggctgtgccgaggcgacttatgtgttgacgacttatttgttggtggtgtcgccggaggcagcgctgccatcagatttggtgctctcgtcggattcggcgctctcatcggcattatcgttatcatcttcgtcatccttgctgggttgacgccaccacaatatcaatgcgttggcggcgcagtagacggcggcaatgccgatgcataccaaaaagatgatgtttgaggtgctgatcatcgtgccatcggccattgcttctttggcggattgccatatccaaatcacgcatgcgacggcggtcagggcgtacagcatcatacgggagcggtcgttcataggatcatctccagacttgttcaaacgacttgattatagccgtatttgtggattgcgtgggaaacgaaaaatgccgccatgtgtgcttcagcgaggagcgcggtataacagcggctcttcgcgatgcttgccatggcggcattcatcaggaatcgttattcagttgttatctcatggattgtgctggcagcgtatcagccgcgcgccttggcgtatgcctcgtacacggcttcggtgggctcgccggtctccacgccctcgatggtgagttgccaggtcagcggttcggcctcgccggacagcacccaggcggcctgacgggcggcgccgatggccacatattcgtcggtggccggacgggtcacgtccatgccgaggattgagggggccagcgtgcggatggccacggacttcgcgccaccgccaatgagcaggatgcggttgatctcggcacccagcgaacgaatcagctcgaggcagtcgcgctgggaacacagcaggccttcgacgaacgcacgagccagattctccttggtggtgttgtgcagggtcaggccagtcagcgaggcggtggcgtccggacggttcggcgtacgctcgccgtcgaagtacggcaccagggtgatgccgccggcacccggctcggccttaaaggccagttcggccagctcgtcgtagtccacgccaagggcggcgcgaccggcgtccagaatgcgcgaaccgttgatggtgcaggcaagcggcagataatgaccggtgcagtcggcaaagccagaaatcgctccggtcaggtcgtacaccgggttttcagcgatggccgcggccacgccggaggtgccgagcgatacggacacatcgcccacggccatgccgaggcccagcgaggccatggcattgtctccgccgccggggccgatgatgcagccgccttcaacgtccttgccggcaatggcggggtcggccttgacggcggctgcctcacgcgggcccagcacggtgggcagcacaatggcgtcggcgtgggccttggcggcttcctcgccctcggcgggggtcagcaccatggcgatgagatcgcggcggtactcgtcatgcgcggcatcgtagtaaatggtgccggaagcgtcggaacggtcggtgaacagggcttcgagatgagcgtcctcgccctcggtcaccgggccatagccggcgatacgccagctcagccaatcgtgcggcagacagacggcggcaatcttcttggcgttctcaggctcgttctcggccacccacgccaccttggtcagcgtgtaggaagcgacgggggaggatccgacggccttgacccagcgctgcttgccgcgggcggtcacgtcgtccggttcgtcgccctcggccggagttgcaccgagcttgtcgatcagggcggcggcctgcggggcggaactggtgtcattccagagcatcgcatcgcgaatcacgttgccctgcttgtcgagaatgaccatgccatgctgctggccgccaaccgcgagggccgcgacatcgtcaagcccgccggcctgctcggcggccttggtgaaggcctcccaccagaattccgggttgaccgaggtgccatccgggtgcttggcctgcccgaaccgaacctgttcgccggtggcggcgtccgtaatgcggacctttgttgattgagttgacgtatctacgccggcaaccagtactctcgtcatgcattcctcctcgatgagggtcgcgcttgcaagtttcggcgcgccacaaccaataagttagacgattaaactatactgtattgcagtgtatgattgcaaacagaaacacgcgagggtgcgtatctggttcaatcgtttgacgcacaatatcattgtgcgatagacggatgtgagcgcctgtgcggcgttcgagactaggggtgcaaggaggtaggagcctatggcaagtctacgcaggatcaatcaggaggatctgcgcaaccataatttgtcggtggttctcgacactttgttgcgcgcggagaaacccatgagcagggccgacttggccaaggaaacgggcctgaccaaggccacgctttcgctgttggcctcgatgctgatcgatagtggcgtggtgcaggaaggcgagccggtcgtctccaccacatatgggcggcccagcacgccgctggagattcatggcgggtccatcgccggcatcggcctgcagatcaacaccgatggctacggttgcctggcactcgatctgaacggcgacactctcggtcaggagtgggtgagtgaggatatgaccggcactgacccgtacgagatcttcgccaagctcgatgcgatgaccttcccgttggaaagccgactcaaacgacgtggctgcaaagtggtgggagccgggcttgcgctgccgggcatcgtcaccgacgacatgtggctgttggtggcccgcaatctgggttgggaaaacgtcaacctcacccggttcaacgtggcacgccggctggatgtggtggccggtaacgaagcgaagatggccgccatcgctcagattccggggtatgccaccgaacgtgcgtccttcctgaatgtggtggatcgcacggattcctttatttacctgtctaccgatatcggcatcggcggcgcggtggtgcgtgacggcgaagtggtgatgggctcgcacggattcgccggcgagatcggccatctgtccgtggcgatggatgggccgttgtgcagctgcgggcgccacgggtgccttgaggcgtttgcgggccgtcgcgctttggtcgaggctgccggcattgccgaggatggggatgccaccagcagcgaggccatcgatacattcctccagcgttggcgtgcgggggatccagacgtggccaaagtggtcgatcaggccgctgatgcgctggtttccgccatcgcttccgccgtgaatctggtggatgtcgatacggtgctgttgggcggactgtggacgcacttcggcgacgagctggccaccgtgcttgaaggccggctgcgttcggaaattctgggatacccgaatgtgaagatccgcgtgttcgtgccgccggtggcgctgcatccctcgctatatggcgcggccgaaatgggcttgcgacggttcatcgagaacccgttggggtacatgggggagaagtagcgccgggagatgctgcttgttgtgctggcgggtgcatggcatgggtgcatggcgcgtgtgccggcgttggtgggttcatgctacactttgcaagttggctgttttacgcagcgaacgtggggccgtagctcagtcggttagagcatgcgactcataatcgcccggtccagggttcaagcccctgcggccccactcttttgaaatcgttgagaatggccgctttgccttacgtgagtatggccgagcggctttttcgtttatctggttttatcctcgtttatccggttttattggaataatgtgggcaaaatgtgggcaaaaactgggccccgcgtcttgtggctgcggggtcctgcattgccctccgggtgtcggcatggtggacgggtttggtctggcattttccgacacgccggttactttttgtaaccgagtgtggtatactaataactgtcaacgggaagcgcaaggcaagcccggaaagagcagaaaggctccacaatggacatcaaggcaatcagcgacagcaccaacgaaaccatcgaagtcacccccgtcgcccttcaggacatccccggctactcggactacagcgcactcgccatcttcgacgccaaaaccggaagccccctctatcaggactacagctacgactggcgtctgctgcccgccgaagagggctatgacaccgaggacgccgagaccatccacgacatctacggcgaggacgaggacagttgggataccgcagctaacaaggggctcgaagactacggcctgaagctcggcaaattcgtggatacattcgatttcgaggtcgctggccgccgctacgacgggtacatgctcgaagaaatctgatgataggcccgcaaggagctctgatacgggcctatactggttccatcggcatcaatagccgtatgtcgcccgccaagggcgtggattgaaacattctttttatcggcagtatgcccggtcttatggccgggcctgcgaaagcacaccttttttcacgttttttaaggagtcatcatgaccgtattcaccgatcacaagcgcaccgtagacctcaagctgcaggactgggacggcgacgactggtcgcccgactggagcctcgatttctggaacgtcgtcgatttgaagaacctcaacgacgattcggatgtgtggcccgaggacgccccctacgcggcactgctcgaaaagcatgacctcagcgcatccgagccggtctacgaggtcgaggacatcgattacctcatcgactacgccaacgacatgatcaacggcgaaggcgattacgcggacaaccccagcccgaacacctcgctgttcgccaccgaactggactagcgcgatgagccggcagaagaaactgcggctcaccccatcctggctgccggtcatccgtgaccatctggtagaggatggccggcaacgcgccgccttggcaaagacgggcggattgctgccggtggacgaactggtcgattccatgtacggcgagttggatggtttggaggcggcgagcctgtggtgggtcaacagcgacatgtgcaaagtcgtggaagcccagttcaggtcgggcgagctgcctgaaaccccagaatatcccacgaccaacggtttcgtcgtgtacgaggacggtgtctcatgcatcacgaaccttggcacgatgctggtcaacgccgtcgcatgggaggcaacagctgggcggataggtttgcgcctgtacacgtcggacccggatacggtgcggcgcacggttctcgacaagcgccttcccatttgtccgatggacgtggaggtggtgcccaccgcgttgggcgtggtgcttgacgtgactatggcgttgatgcgcgagccgcgagtcagcgcggtcaaaccgtgcgtttggcggacggaacgggacggcccccgccccgtgagcatggaacgccagtccgagaaagtgaagatgatagtgctgcgtccggggcccagaagccaatcttcggaatgggcgcagcgttcgagaagacgatgcgagtaccggtatttcgtccgtgggttctggcgcaaccaagcgtacgggcctgcgcattccaaacgcagacggcaatgggtcgctccgttcgtgagaggcccggaagacgggccgttggtcatcaaggaggcggtgagcgtatggacacaccagtgacacggctgatagccgaatacttggcgagcgttccggcgaaaagccgacccgcgtataagcgggtgctgggcttgtggctgaaatggtgttccgacaacaggctgaacgtgctgcagatccgtcgtttccatatcgatgcctacagggtgtggaggatagagcggttgggcaaacagccggccaccgtggcgagcgagcttgtgccgatatgctgcttttacgagtacctgtggcaggagcagtatatcgaacgcaatccggcagaacatgtgaaacgtcccaagctgcgccgttggagcgacggctcgtggctgccgcaggagcaagccgcaccgttccttgacctggctgaggccgaccacagggctttcgtcggcgcggcttgttgcctgctattgctcaacgggctgagggcaagcgaaccgctgaaactggacatatccgactactaccgtgtgggtgacacgccggtggtgcatgtcaacaggaagttcgattggatgcaggaggtcggcttgtccgaacgcgccgtcaaggcggtggaacgagcgataggcgaacgtcggaaagggccgctgcttgtctggaggggcaagcgcgtcacctaccagcagctcgcaagcgtcgtgaccagcctgggcgagaaagtgggttcggcgcgtagaatcacgccgcactcgttgcgccggtcgttcgccacgaccgcacgcagtcagagggtgccggaccgggagatcatggcatcgggcgggtggagcactcgtgagatgcttgaccggtacgacatgaatcggctcgctgtggagaacgcggccagcgtcgccgtggcagaatcattgaagaaacagaacaaggaggaaacatcatgacgatgacgagcgccgagatgaaatgcctgcgcgagagcatgggactgaccacgaaatggctggccgcccggtgggacgtcgccgagttcagcgtgaagcgctgggagcgagaccggtatctgccggacaatctcgaaaccgacctgcgcgggctcaaacgccgcttcgacgcggaagtgcggcacacggccgccgtcaccgccgaagccggtgaggaggccgccgtcatcgtgccgagaaccgagccggaatcgaccggcgatatgcccgccgcgtggcaccgtgccatcgcccaacgcgcacgggagctctccggcgcacgaatcctgtacatcgatgacgaacagctgtaggcgttacatacggacgtgttttataacacatatccgattatgtgttataaatcggtgacttatcataaccgatttcgggggcgataagaatgataatgacggcaatcagctttgtcttccgactctctggcgaacgcgacttgtccggcccgatctgctaggggattagaaaatcggccccgtccggcagcagtcgagctctgtgcgagctgtctgcgataccggacggggccgaactatgtgtggttatgcggcgcggtcgaggcgttgtttgatggcgctgacgccgatgagcgcgccggcgaggatgccgagcgcgttgagcgtggtcactatcgcgtccacgtgagtccagccccatgcggcgccgaccgtgttgacgaacacggcgagtgcgggcaggacgatgaggccgagccatttgagcacatcgtagacgcggctggggatgagccagtcgggcacgtcatgggtgacgtcggccgtctcgggccagtcgctcacatcgacgccgggaagcgtttcgccggtgtcggtcgtgtttttgctgtcggtcatgtttgctccgatcaataagggatgatgatggggtgatgccgtcacccggtcaagcgggtggcggcatctgttgagtctcagcggcaggtcaccacgtcgcccacatagtagacgttgatgttgccggaggggacggtgcagcggttgacgctgtagccgtgggacgtggcgaactcccacacggtgtcgccccactggaggaccttggataccccggtggacggtgcgggggtggcagtagagccgccgccgtaggtgacgacatcgcccacgtagtagcggttgatgtcaccgcttggcgtgtgccatgcggacaggggccatgcgttgtaggctacggcgagtccccagatggtctcgccccaccgcatggtgtgggtgatgccgcccgtgttggtctggggtttgctcgtctgcgcgggcgcgggcggggccggcgtggacgggggcgtgccgcctccggtcgggttggcgtacaaatcccactgccagccttcgccacggaacacgttgaggtcgatgggactccacgtgttgacgacaccggtgccgctgtactgtcgcatggcctcgccgtacgcgcctatcatccacgggttggcctggtagccggtcgggctcatgttcgcgtactgcgcgatccacaaaccgtagttggcgcggatgtcgccggggatggtgccggccacggggccggtgtagagcagcggcttgacgccgcccgagagccgttcgcattccgccatgaagcggcgcacccagccccagttgccccacgccggattatcgtccatctcccagtcaagggcgacgatgccgtgacgccaatagttgctggtgttgcggtagaagaattgggcttcggcttccgggttgccgcccatggcgtaatggtagaggccgaatttcttgccggatgcctgcgcctggtagatcatgcggttggcgtcggtgttgacgccggacaccaggcagttgttgttgacctgtccggtgccccatgtggtgccgaccacgataaaatcggcctgcatgttgtacacgtccgcgccgcactgccagttgctcatgtccacgccctgcatgtccgcgtgggcggtcgccgggagcagcatcatgcacacggcggctgccagcgcggtacccttggcgagcagccgcttccgcaacggcttgtccttgttattgaccaatgttttcccctttctcgggatggattgttgtttgtggcccacggtcgtgggccgggattgtcacggcccactcggggccgtcaatggaaaagccccacacggaatggtgtggggctagaatcagtcgatcttgtacaggcggggagtgaacgtcttatcgacctcgcccgtggtgttgacgaaaatgttgcattggagagtgccggccttcaaggttttcggcccatagttattagggccgaacacatttgctccttcgctcccgtcgtcgtgggagatatgggcttgtatgccgaacagccatgaattgttgcccagcggccagtccgtggcgtccatcgtgtacgttcccgcatccacatgcaccacacgggtcaagttattccacgagccggcccctgtcgtggtggagcctttgaaccggtaggttcccggcgttgtttccgtgaccgcaatccccgggttggtgcccaatgttgtaggcagtccggtgacacgcggatacaggttcgctggttcaccatccccccccccctgaggctggtgttgtcgggtcgcatccactcgtgcgcggtgtcgccggattcaagctggactttgaggtcgccgttcttcatggtgggcgtggcctcgctgctcaggaggtcgaggcgcaggctgacggtgccgtcaggcgctgccatggcagcgccttccgagacgagctggccttccagctgcccgcctttggcgtcgaggaatttgacgctgaaactcaaaccgctgatagaaacgctggtacgcaatatcatggtctcttgtaccgggaggcggaacgtccacgacagtccactccaccgccgtgttgcggtgccggtgacgtgcagcgacccgtcagtgttgacggtggcggtcaacccgttgccctcggcgggaccgtaggacagcaggttacgcgacaatacggtaatcggcacggttttcgtaatcttgccggcggtcagtttcagactcgtggaccccggtttgataccggttattgatagtgcgcccatattggggcctccttttatggtgaaggccccaatatcggggccttagttgagtttcctgagaattggggtgatggttgcgtccacggtcttgccgggcgagacactgacgagcatctggtagtcgcccgccgggagcgtcgccttgaccgtgccatgcgagaacaggtcgatcctgccgtccgtggatttgagctcgcagaacaggccgacaccgtcggcgagcgtgtgttcgagcgtgtactcgccggccggcaggtcctgggtgacgaggatggtcgcccagtcggtcgctgtgcccttcgcgtgtaccatgccgtcgccggccgcggtgaacgtgattccgttgcgcgtggcgggcagggtgggcagcacccatttgtttccccatacactgaccgggatggtctttacgatgctgcctgcggtgatggtgatggaggtgtcgccctccttgagggcgcggacactagcccccccccctaaacgctgttgttgttggcatgatattgccccttactgttgtctgactgatgcgagactcacatccttgatggatgccgtatactcctgcggcgcgtaatccggcaggatgttgacgttcgggctggcggtttcgcccaccctcaatgtcaacgattccggcgacacggtgatgccggtcggtttcgcgtcgccaaccacggcgatatccggactggcgccgctggccgcgaactcctgcgatgccgcatcgggcaggatcgtcaccttgaggttcttgctctcgccgacgcgcagggtgatgttgtcgatgggtttgccggaatcgtccgtgaccttgatggactcgggcgcgtaggccgcgctgatggacgcggcggcggaagtgaaaccgttgaccgtggccgtcaccagaatggtgccgccatgccgccacgtgagcgtgttgcccgaaaccgtggcggtggaggtgtccctgctcgcgaacgtcacgtcattggtggtgagcagatcgccaacatgaccgtccgcgtaggtggccttcgctcccagtttcagggtgccgttgacggctagagacttgggcaacgtcctgcccttgtcgtccgtgatcctgatggagacgaccgtgtccctgtcgaggggccatacgagtttgccgttgaacatggcgttgtacgtgtggcctctcatcaacggtttgccgacacgtttgccggcgtatagggctggcatggtcaggcctccttcacggtaaccttcttggccttggctttcacggccttggctgcgggctcctccgacacggttccggtcggcgtttccccggtggagtccttgccggtttcctccgtggtgccttcaggggtgccggcggaaggcagttcggcggaagcgctctcggccttgtccttgaccgcccgcaccgtcgaatcgatggcggcgatggccgtctcgcccttcgccgcgaccatggaagcggtgtcggccacggtctgcgaatcgttggcgacggaagccgccgccatactggcgttcgacgcgagactgctcaggtcggactgggtggcggtcgcggaatccgcggaggaccgggcgctcagcatggcgctcttcgccagcatggcgttcgtttgagcttcggccgtgatggactccagcgtgctcaaggccgcagcggccttcgcggtcgtggcggtttcgtcgaagaacaccagctcgtccgggtattgtgcggaaagtgtctccgcctccgactgggtggaagcgtggcgaaccttcaacagttgggagccggccatatccttcgggacgaacgtgccggcgtccacttccacgaggtccgcgtattcgaccttggtcttggagtccggcacctcgacgtagcgcgtgtacgcctgcggcgtgtccgccaactcgatgacctgccaaacaaacgcgctagtcgtgggcagcaggtcaaccgtcagctcgccgctttcggacaggtccgcgtcgaacgaggccgcgatgacaagattcttttccgcgtcgaaatgacgacgcaccgggcggaaccgcatcaggccggtgaccgggtccaagcctccgggcttcggcttcctgatgctgatatggatttgggtcattactgttcctccttaatggattcgattgtttcgggggccacgtccgggcgaagctcgtccggcagcgacggcttgggatgacgttccagaaactccggttcgacgacttcgcagaacgattgcagccagtggtacaggccgcgcacataggccacggccttgaaatacttgcgttgcacgtcctccaaatgccgtatctgctcctcctgataggcgacctgctcacgcaacgggtcgatgatgttgtccgtgagaatcttcaccgccttgtccgcagcatcggcggtgatgtcgtctatgtcggcctcgttcttccgccggttcgaccatgcgccgaccatgccgccgacaccgccgccgcccagcagcgcgagtatgaccgcgctccagaattccactgagccgaacaattgttggaatgggggcatcccgctcctttctctttttattgataaacccacacgtttgtcccgcgcggatcggccgtgcggcgtgtgggttttcggaggttgaaaatgctgttgcgagagttttggaccaaccggttttggccgtactgcatggcgaatctgcgtgagagcacgcgcgtgggctacgagtccgcgtggcggctgcatgtcatgccatacttcggtggcatggatatgggcgcgataagcgtggaactggtcgacaaatggcttgcggatttcgacaccgcgggagccgcgcgcaaggcatgggccgtactacgcgcgatactcaggcgggctatccgctggaacctgctggacgtggacatcaccaggcgtgacatccaactgccggccaaacctcattacgagccgcgaatattgaccatccgccagcagcgcacactgttgcaaggcttctacgctcaccctttggaggcgtggcttatctgcgccgtctcatgcggattgcgtaccgaggaagggtacgggctggagtggggcgacctcgacctgcgcgccggcatcctgcacgtggagcgcggcctgcaatgggtcgccgggcatgaggccgtcgtgccgccgaaaaccgaactgtcccgccgcacgctcccgttgccgcgcttcgcggtcaaacgattgcgcgaaatcaaaccacgcgagggaggccgactcatcggcaccctcaccccgccgcaagccgcacgccaatacaaggcctactgcaggcggcatgatctgccgcatgtgcccgcacgcaacctgcgccactcatgggcgacgaacactctggcggcgggagcggatatcgccatcgtgtcgaaaatgctcggccacagcgatatcaaaaccaccgcgaagtactacctcaaaccggatatcacggctttgcgagacgcgcaacgcctctgggaacgagccctaatagcctgaacgggattccctaacccgaatgccgtatattctgtgcggaggccataccgtcaccacgaatgatgacggcacattctacatcaacgtccaatccccaaacgggaagaaagccgattacgcggcctacacgattgggccgttcaacactggtttcgcccaggccggcgagtacaccgcacaacgttgggataccagcaacgtaaaccagatacgcttccgcctgtggaacaccaaagacaaccgctggtgcgggagggtcgcgatattcggaagctggaccgcaatctggaacaggcaatagttttccctaacccctgtcacgggccaagtcaggatgccgtattccgacaggtatatcactctggttcgtgtcggccgtattgtcaccgcctgcgcgtatatcacgctgacaagcaatttcaatcagaccggcaacacatccgtcaacgagacaatcccgaagggtttcagaccgtccggcgattcccgcgcggtcatgcgcggcaccgacaacagcggcgcgaccagtttctacctttacggcacgccggaggggaaaatggtgttgaacggcaccggaaataccggccgattcgtcggtatatccggctgttggattaccgcgtagctttccctaacccgcaccgatgtcacgaccctcatcagtggcaattacggcaccgtcaatggctataggtccgggccgatggtgacgttgcgaatcgactggaagtcgtcggcctccggctcgtggaacaacggcacgttcggcactctgcccgaaggatggcgtcccccgatgaacttgaacttctcctacggcggacgcgacggggccaaccagaagaccatcaacgtaaacgcgaacggaaccatgacctacgccaatcagggcggcacgcagggcacgaacgcgttcggcatgaccgtctcatacgcgctatgacccgtggggtcactgcaagacagtgcaaccgcctgagccagtgtcccgaagctatgcggcgggcatcgggtcggcggtcctccatacgccggtgcatcccgcgtacgcgctgttcggattgccaagcatcgtgacggtgccattggcctcgccgtaacagatgaatgtcgtttcaccaccgaaaacggccacgggcgtattgacggaaacaggtcgatacccttcggggaacttctcctgagccttcgtgtaattgttctgcccgctactgttgaattttacgttgccacccatgaaacagatatcaccgatgcgcgtaagcaaaatgctgtctctgctgtaaggtactcgccacgtcgtagaacgctgggttagggaaagctatgcgatggcataggtcacggaaatgtccacgtttacccacgtctgggatttgtagccgtagcggtgtatcagcgtcacgtcaccggtggtgccgaccgtcattagtccccaagcgccatcagtgctgacaccgaacagggcgcgtaccggcacgcccggccagaagccgggcttgagcttggctatcacgctgtccttcgtggtggttatcgcattggatccttgcgcttgtatggtgacggtaccggccttggcacacgcggtgacatgcatcgccggaaacacctgactggcgatgatgtcagtactggttagggaatcccacacatcctccaagggctgcataacattgaccagcgtgtcaatcgatgtgatggtgatgccgtcgaggttgacgcggcagagtggcaggtcggagacgatggccccgccgatgatgctgccggtctcgatgcccggatccgcgggcgtggccgcgctggggttgcccttgatggcttcgagggtgaccgtctcctcgccggtgcctgagttcaacgcgtaccgggccacgatgagatcgcgtcgtttttgcccttgcgagccggattggatgttcacgtcggtcggtgcggcgatgtagatctgccggccctcgaccacgaggtcccatgctgggatggtgatgttgttcgcatccttcgccgtcggtttcatcgtccaattccgggttttcaaaatgtatccgcttcggccgagcatggcggcgtgcatgagcgcgtcatgcttcgattccacgtgcgggtcgtcgccgccgtgcgagccggttacaagcagatttgttgccatgatcacttaccttccgcgttgagggacttgttgagccagaggtcataatccttgtcctgattttcggccaactgtaggtactgctggtagtcggattcgcaaaaaaggattttcctctggttgccgttgcggtcgacgcgcgtgacctcgtgccagttggggctggccgtcgcgttgggcaacacgtattctttgttgacgcacgaaggccgatcacaggagtagagggtgatgttgggctgtttcggcatgatgctcctttagtcttgttcatcgggccaactgtattggccggcttcgtatcggatggttggtgtgccgttggcgagtttgacggtgatgcgcacgatggggctgtccacgctgacgccggtcagcgcatcgtaggcgcgcacatggtcgtcgatatgcaggccaaggttctcggggatcgtcaaatcgacggtgccctgtttccacatgtccttgagcttgtccctggtctggtcggacaattcggcgccttcggaggatgtgagctcgtagatctgagctatctcccggtcgccggtcagagtctgggtctgggagatgttgccggacgcatccgcataccagtcgctgcgcgccctgttgcgcagctggcctttgcccaggcccgtgaggtggttgacttgggtccagatgcgttgcgcctcgaaactgatgcgctggtcgctgtccgcgtcgccgtacgtgtcggcggcgaccgcgcgaatccggcagcgtccagcggtgtaggtcaggtcgagtctggctccctgcgcggtgagcatcatgcgcaacccgtcccacgcggtaatgtaccggcggaacgaatagttgctgagggtgatgccgctcgtttccgagggcacgtcgaacaccgtggacagtccgatccggctgattatcgtgcggatgatgttgttggcgtcgccggagaccgtgagccggtcggcgccggagtcgggttggaggatcttgcccgcaagcaaaccgtgccatgtgcggccggtgagcgtatacagggcatgcccgtcatccacagtgatacgcaccgcgtcgacgcggcctccgaactcggtgccttccgccccgatgtagcagccgtcggagagcagcagtccgggggtggagtgagtgagttcgaaatcattctgctcgtcgccgtactgcaggtcgagtgcgggggagacgagttcgccctgcggcacgtgagcggtattggtccagatcaggtccatggcagtcccgtctgctccaaccagtactccacgtcgaacccgaacgattcatcccatgagacctgctgcagtcccggcgggagggtggcgaacgcgtattcgttggaggcctggtcgcgatgcgttttgtcgaacacgttggtgatgtcgccgttggcggcgaccatcacggccgtgcgtggtgagccggtgccgtcgatgatgaggtagccgccggatgggacgctcacgtcggctatcaccttgttgccgccgatgatgatgctcggcgtagagaccggcccgtaaatggtgagcctcatccgcgagggcagggcggattggttgtcgatgctgctgatgttgcgggtcggcgcgtaatcgtagcgatagtcgtagggatagtccttgcctctgttgtagcgggccgtcgaccggctgaagctctgcctgaccggtttgtgccacaccccgtcaagcaaggcgaccgtgaaatcgccgcgcacgagcacgggtgatatgtagtcaggttcgtggccgaccacgaggcaggtctgtgaccatccgtccaccgtgatgacgccgggtttcgcggcatcgttgaggtaggcgtacatgtccgcgtcgaacagttcctcggccttttcgagcgccgggataccgtagacgagcccggtgaccttgacggtcttcgcgggccgcgtggcctgcaatgaccggtagccgagctcgaactcccacgtgcgggtgcgtagctccaggatctgtccgcacatgattccctccgggtcggcgagatcaatcacggttccggcgcggtttgacgtgtaggtgagcgtgtgcatcatgtgcgcaaggcctccttggtgagccgctgtaagtcgcgtttgctgagttgcggggcatacgcgctgatgattgggccgatctgctcgcggaaggcgcgtatctcctcgatgacgccgctcacgtcgatatcccgaccggagaacgattccttgggtatctgccggcggttcatggccgcgtatgtgtcggcgccataatatgcgacggatttcacgttggacacgaattcgccgctcttgactcgcgcgttcgccaacgtgatgttgtcgccgcccgtagtggtggccttgcctggcaggaggccctcgatgacgcggtcgccagtggcgtagccgcgcatcgaaaccccataaccggtgaacaggccgccggtcttggagggcgggcgaacgcccacgctgtcatccggcacgtcgtttttcatatagttatcaacgaagttgcggacgatgttcgtggtgaccgtgacctccctcggggtttccaagggttcgttgttcacatcgcggatcgcttgcaaagcctgatcgttctcgccgtagatgtagccggttttcgggtctatctgccaaccgttggcctcggccatcttgttgaacagtggatcattgttgcccttgaggataccggtcttgtcgtcgatttttgcgccgccggcgattgccatggcgacgtcgaactggctcttatccaagtccaggtagccggtcttggggtcgatcttcgcgttggtggcgtcggcgatcttctgcatcaggtcggtgtcgtcaccggtcaatcgcacggtcttgtcgtcgattttctcggtcttgaccttcaccttgtccagtacgtcgctggcctcgtccgtaatcgtaatcctcacgtcaacagggttagcggcctcgctgttcatggattcgatgctctgacgcagattgtcggcctcgctgcgggccaaaccgtaacggtcggcctggtctccggccgcgtcggcgctcatgccggctgcggtcgcgttgtcgatgtatgcctggcgtgcccgttcgaggatgtcgcccgcctgctgggtggctgctgcagcgtcgccgtgggcctggccttcctcgatgatcttctgcgccgtgctctgcgcggtcgaggcgagaccctgcagcgcgctctggctgtcatacgcctgagactcatagcccgccagagcgttgccgttttcatcgaacactcggccgttcttcgcgatgttctcgttaaggtcgagtattccctggttgaattgggtgacggcctgatccgcggacaactgcactcccggcaggttgaggaagtctttcaccagaccgtcaatggcgtcggcgaggtcttcggcgcttgtggtggcgttgtcggcgctgtcggcgtagttgttggtgccttcggcggccgtgtctccgctggctcccgccttggcgacttcctcattggttttgctgacctgttccttggctttgccgacctggtcggagagcttattgtaactgtctcgaatactgtctgtctccatgatggacatgctgtttccggcgtttttcagctgttcgttgaacagtttttgcgcttccttggatccgttgacggcctttgcgaacgtgctgtattcgatgccggctttgtcgagtgcttctccaagagagcctaagccggtggcgaacttgtctccgaagtcccaagttttatcctcgccgctggcgattttcttgatgagtgtttcgacggtgttcccggactggtcgattgcgctggagaattccttgatgttggctttagcgtcctgcgcggattgggcgaaccccacaagcagcgcgcccgcgaccgtcaaggcgatgccccatgggccgcccaaggcggcgaacagtccgctgccgatgcttttgaaaccggccataacgccttgagaacgactgatagtggtgccaaacgtgtttatctgagattctgcactgccgaaagttgcgccccatgtctggaacgctgacgcgattccggagccgaggcctatgagcctttgccctgggtcggcaatcaatccgagggtttgcgcaagctggctgctgctagagttcagcggccccatcgctttgtggactgcgacactgcctccaaccagagccgccatcagcactatggactgctgtacgggcgcaggcaatgacgcgaaaccgtcaacaagggtgtcgagtgtctgcacgagggagcgcaatggtccctgacctccctcgcccaaagagatcatgagggattcgaaagagccgctcagattctccagatcgcctttcaggttgtcgttcttcttggcggcgaggtccgcggcgtagccggattggctgacggctttcgtccagtcgtcgatgccttccgcgccctgctcgtagagcacgttcgcggctcgcaccgcgtcggctccgaagatggtgttgagcgcggcattgcgttcctgttgactcaggccgctcaaaccgttctgcaattggcctgcggcaccggcaaggccgatgaacttgccattggcgtcgtacacgttgatgccgagctcgtccatgagggtctgcgccttgtcggtggggctggccagtcgttggagcatggtcttgaggctggtgcccgcgtcactgcctatcatgccggcgttggcgaacgcggcgagcgtgccggtggtctcctgcatgctgacgcccatgctgttggccaccagacccgcctgattcaatgcgaggccgaggtcatgggcggaaccgacggccttgcctgcgccggccgccagcgcgtcggccacctgagtggattcggcgcccgtcaggttgaactgtttgagggtggtggccatgagttcggcggcgtcgcctacggccatgccgtcggacgctgcgaggttcaatgcgccgctcaaaccgccggagagaatatccgaggtcgataggccggctttgccgagttcgttgatggcgtcggcggattcggtggccgagtatatggtgtcggcgccggcgtcgatggcggcctgacggagctgattcatctcatctgcgctggctccggtgttggcctgcaccgtcgacatgctggcgtcgaagtccgccgccatcctgacagcggccacgcccagcgcggtggcggcgacaccggccgccgcgatgccggtggtgatgagcttcgatttgcctccggcggcttccatggtggtcgcggtcttctggctttcgccggacactttggccatgccggcggtgaaattgctggtgtccgcgagcaggcggacggtgatgttgcggttcaggccaccggccatggcatatcctcctgtcggatcatcgtgggttgatgcccacggtcagtgagtcaagtttcgtggcggattccgcggaatggtccttgcggtattcttcgagcccgatgcggcgcatcaggtcgatctgacagacgccgacctcgctcgcgtatttggtgggggccagctcgtcgtggcatatgctgacgggcatcccgcagcgcggacacagcgtgcgctcgtattcgtcgagtgcgagcatccattcgcgttcggtcgcatcccattcggtttccggcgtgtagccggtgatgcgcctatgcccgtccctttccacccgatacgacggttcccagccgagccaacgcttgtagctgatgccgagcttctggcagattcgcagttcccttactgtctgcggattatccgcgaggctgattcgagtgcgtcttttgggtcgatgagcttcgcgttcaggtcacggatcgcgtaccagatggggctgatctggccgtcggacagttcggtcatgacgttcgccagctcttccacgggggtttccggcacggtattcctgaccatgagtttgatggcgtcggcgcagatgtcctcgatgcgctgcttcggcaggccgttctcggtgacggtgttcgcctcgagcacctgacgccactgggagagcggcagcgcctccaaggtgatgcggatggtgtcgtccttcacctcgtcgcgcagcctgtcgatctgttcggcgatgcgtttggcggcggcgttgccgccttcggtcacatgctgcgccatggcgcgttccaggtcggctcccaatgcggcgacctgttcggccttctcctgatccaatatgaggtcgacgtccacgcgcttgcgcttcacttccaaagccatgattatccctttctacaaatccgaaaacctttctgagagagaagagagaatgcccgtgcggggccagaaaggcttagaatccccgcacggaagaacttgtcaggctgcggtcagcacggcggtctcggactcccagccgggagcctgagcgaacagcgggatctgactgcggatcatggtgttcgcatccgggttgatgaccttcttttcgccgcacttcacgctcacgacggtgagcttctggccggaggccaatggcgcgttggtggccatgccgcggcgacgcacgatatagccggacgcgccctcgtgcatgagggtgacggcctcgttctgttccttgtgctccgtgttcgtgttgtcgatgacctcgatgctgatgtcgccggcgctcttgcggccgggggccccgaagtcctgcacggtgttctcgcgctggtcggacacggtgtcctgcgacgggtcgaagctccagccgccaagcatgacgtagttcgagatgtcggtgccggcctcgagctcgatgatggtcggggccttgatgttcttgatcgccggcacccagatggtggtgatgttgccctcggcactggtgccgggaatctctgtacccagtttcagggtcatgatgcgctccttaaagcaaaaagccaccccccgtatggggtggcgttgaaggcttttggtaaatgattggttgattacggtcggctccatgtgaatcggaaccggaggacgcgcacctggtagcggcgcgcggtttcgtcggcggtcagaccggccgcgtatgcgccggaatcctcgtacagggtgagctggccgaccgtgtagcccggcggccgggtgggtgagcggttcgccaacgcgggaatcagcatgtcgtcgcaccagatgttcacgctgtcggcggtggtgctgacggcgcgaacctccaacagggcggagtgggcggtgaaccgcatcgtctccgccgccacatgacggtcggtggagacgcgcgcgatgatccacggcggcatctccgactccagcggctcctcctgccggtagaccttcacgccggacggcatggagggcagcaggtcgagcaccgcattggtcaagtccatgacgctcataatccgatggctcctatcagcatgtcgtcggcggcatcggccacgtattcggcgagcgtgggcagctccctctccgcagcttcgtagaagtcatgggttccgccgcccttcgcggtgccgaagaacgcgatgttggccaagtcggaggccccgccgtcgcgggggctcacgtccgcgtacacagtggtgccggtactgcccagctcgtaggcgacctgcaccttgcggatgccggcgttgccggaaccggcaacgtcctcctgaatggactccttgacgttctgcgcgcccttcttcaccgcctgcgcaaccttgaccgaagccatggcgtgggccgcggcgaccctgcggccgaaagcggtcagctccgaagcgtcgactgtcacgtcactcattgctgttgcccacctccttcacattccaccggcatgcggtggagtgtgtcttctcggactgcatgttcaacaaccggagtttcctgcccttgagattcgggtcatcggcctcggttatctcgcacacgtcacccggcaataaacccatggtgccgtaggggaaatgcacgtacatgctccacacgggagtgacggcacccaacgcttcgacaatgccgccctccgtgttctcggcagccagaccgcccgaggtctgcaccttgcaacggccctcatacacggtgttcgcagccggttccaccagtcccgtttcggggtcggtgaccggtttgcccatatgggtgacgcggcactggtcggtcatcaacgattcggcgagctgtcggcctcggttgaggatgtgctgcacgttcatcggaacacccctatggcgatgcctcgcatgccgaacctgttgcggagggctcgtttcgtgccctcgggcagttcgagtgcgtcgatgatctcggagtcgccctgacggtagccgatctgcacgtcgtcgattcgcgcgtacgattcgtcgcggtgagcgccggggccgccgttcgactgctggacgagtccggctgcgaccatgctgcacacgaggcgcacgatgtccgggggaaccgggtcatagccggcgagcatggtgacggtgacggaacaggggaccatgttcggcaggctccacaggctttccctgtacagcgcgttgccgagcagtttccaatcaccggtctgctcgccgtccacgagcacgcggctcacggaaatcacggggcgcatgggcaggtcgagcctgcgtgaggcttcgccggggatggtcaccgtgtattcgccgcgtgtgatggggcaccctgcggcgtcgcgcaccgctgcggaaaccgattcgagcagcttgcccgcgagcttttcgtccgcgtattcgatgccgtatgaatcaaggtccttgaccgttgccagcgtgtccatgagtcaccccctatgcggttattcggcttcgcccaagtagggcatggcctcatagctgccggccatcacttgcccaccttgaagtgtacggtggccagcgcttcggggcgcacgaccttcgcgccgtacaggtgcaggcccttgacgatgtcgtcgaagcccttctccttgcgggtggcctcgaccttggcgatctgctccgcgaacgtggtggccgcgttggtgccggcgatgatgacgttgccctcatcggtcggagactgggtggagccgcccttggctgcgggagcgttgttggacttgaggatggtcatgcccgcggcctcgccgacgactccgttgagcagcgtggaatgagcggactcggcgccagcgacgaaacggctgtccttgcgcagcagaccgtagaagtccgggttgacgatgacccaacggcccgcgtctgacacgttctgcttatccaatgcggtggccagatccacgatggtgtcgtacgccttggtggcggtggcgccggaaatcgggtcgagcttgctcttcgcgcctgctaccatcaggccggccaggtactggtcggtcaggtcgcgcagcttgtaggcggcgtcccgggaatatgcggcggtcaggttattcatggcctggcgcttctccacgtcgtcgatttcgaacgcgaagtacttgctctggttgatgacgagttcgccggcgttcttgtctgtggccggttcgatggtgatgtcggtgtgggccgtgtagtcgccgatgctgatgtgcgcgatgccggtgatgtgcacggtgtcgccgtagttggcgatgtcgccctcgtagtcgcggttcacggcggaaccgtagacgaggttcttctggagttccagcaggatgttggcgctccacagttcggggatgaaattggtgatggccatttaaggcctccttccgttagttggctccgagcaggtccttcagtcgtccgtcctgttgggctttgacgatttctgcggggctcatggttttcaggtcgtctcgggtgagctgaccctgatggcggtcgccgtcccgtgttccgctgggcggcgtgatgttcgcacccgagggtgcttgctcggctttcccgagataaggtttctgttccagcagttcgccgatcgaattggcgatggcctggctgtccacgcttccgtcatccgtgacggtgaacttggacaggtcgaggtagcgcagggcgtcggccgggtcggtgagcttgccgctggctgcggcgcggacttcggccttgaggatgcgctggttggcggcggcaagggcctcgtccttgacggcctgttccttcctggcggcctcgtattcggcttccttgccctgcagggcggcgatctgtttttcgagttcgtcgaccttgtcggccttggcgtaggcttcgttcagtttcttttcgaggtcgcggttgactttccgctgtccttcgaacttcgactgccaatcctcgccgccggtgttctccggcttcttggactcgttgtcgcctgtctgctggttctggtttgcgggatccatgttcttcctttcgattcgctggatcattgctggaaaatctgtccgccggaggtgacccatcggcggtattcgcgttcgcattgggcggcgatttcgggggtgaggggcatgcggccatcgttggggttgcggccctccaatacggcctcgtagcggagcttcgcggtctgaacgcgcttctcggcggcggtcaatagttcgacgcgcccctgccggtacgtgttgtcgtgcagccacatgcttttgcggatctcgggcaccttgccgcgccagtcgttgtccacgtagtagccgttggccttcaacgcagagatggtcttctcccggtcgcttccggtcagcgagtagatgccgtcgatggacaggcggcgtttcatcctccggccggactgctgggcgtattgcatgctagcccacccgtatcgtgtggtgccctcgctggtggtcagcgccgtatagcctttgcccaccctttgcatgccgcgtttcgagttgacgacctggtagatgtcggcgccatcgcggatggcctgcgcgtaattcgcgccgaagcgcttgtcctgctcctcacgggagaggcttttgaaaccctccatggggtcgctgatccacccctgttgtttggccatgccctggctgcagggcacgtggcggccgtggcagtgcgggtggcgcaggaacccctcgttgaagcggaaccacttgccggccagcagcatgcatcggtcgcagcagatggcggactcgacacgcacgtagccgaccttgggacggctggtgatgtccagtgattccgcttggcgggcggtgtccatgacggccagagaggtgagcattaccagcaggttgcgcccatattccaatgcctccaacggggagctgccggtgcgtatcgcgtgcagggcggcgaacacgggggattggaagtaggaggcgatgtcgaggccggacggagcccagcctgcgaatgcgttcgggttagccaaagcatggggagtgacgtacacgccctgttcggcgagcatcatgccgctcgcgtcgatggctgtctccgccgacttggtttggatggtggagaacagggtgaggaagtcgcggcttatcgacttccacgacgcctggatgttattggcgtcgaccctgttccatgttctgcgtgcggctctgtccgccgccagctccaaggtcgccagccgtttctgactgtaggccagcacctgagattcgaccgccatcagcgcctccgatctgcagggcacggttcaacgattcgagttcggggtcggccatctcgtcggcgcgcatgcgcatgatgcgctgcacctcgtccgagctttggcccatctgctccgcgacccattggatcgggaagccgagctgcttgtacttgagcatcgcgtccgccatcagcgtctcgctgcgatactgcggggtcgcgaactgcaccttggagtcggcgatgatgtccgcctcagccacgtcgttctcgtagcgcatggcgatgctgcagatgtcgcggatgggggatttcaggaagctgatgcgttcgatggtcttggatacgaggccggcttcggcgacctcgtagccggtggccggaacctccgcgttcgtcagcaggtaatggccgggggtgcgtgtttcggcggcgatatgctccaccgctttttcgatgaccgggatgaacacgttcaggttcgagcttgaccattcgcccaggttcacgttgtcgccggtgaactggtagatgcgctccagcacctgcttgtcgagttcgatgggcttctcgccgacctgctgtccctcctcgttgtagactggctcgacgagcgggtctccgccgaggatgactcgtgccggcagtgaggcgtagtccaatgcgttcagcaggtaggcccatacgacgttgaccgtgtcctgcatcgattcgacgtgcgcgatgtcgctgatcggcgcattgtccaatagcatctggttgcggaactcgcgcagggggatcgtgtccagaccggtgggctgagggtcattcatcttccagccgtacacgtcgggcggcacgcgctggtcggtcagatcgagcatcttcttgcgttccatgctgaccgtccagccgggcagcatgagggtgccgtactccttgtcgtcgccctgctggatgaggaacccggctgacggctggccggtgcgcgcatcgtagatgactgcggcgctgtccgggtgctcgaacgtgatgcgggccctgccgtcgacctgcgtgaccaaagcgaacgcgcggcccgtggtggtcatcatcagcgcggcttcctgaagtccgcgttcgaagtcgttgcggtcgaggcatttcatgatgccggtgccaagcttcacgtcatcataagggacgaagcccttgaacttgatgcgttccactggggcctgcgccacggggaggcaccagttgtcggagaagtcggagaaccggtcgctcatgtagcgcttgaattccttggacgcgaacttgagcttgccgcgtttgcccaagacgtaatcggtgtgggtgccgatgctgggtcgacggaactggatcttatcggccagtcggttcgccaatgaggacagttcctgctggctgtagtccatcagtacctccttctggtcgatgatccggtaagcatgtaattgtgtttgcgagcgccccagccggcggctcgcgcgtcgcatgcggcttcgtgggcgagcacgctggtcacggcggcgtctatcttcctgttctgctggggtttcgccagcccgtagcgttccagggtcttggcgacctttcgcgcgttcatcatgtgggtgcgggtgacggggcagccgtcctgtgtgatgcgatgtgtggtcaggtcggcttcgaatcggcgcaatgcctcgtagacggccccgatgcgggagctgcccgacatgctccatggcatgaatttcttcggcccgtaggcgcgatcccatgcttctatctccgattcccatgacagttcgtcgcggaagccggggtcgcagtaggcgcgttcgattttgtagcggtcgttgagttccgcccatgctgcggatacctcggcgcgggggatgcgcccgccccactgcttcgggttccagatggtcgcacgccggtcgggcccgtatcggggagtgaatatcagcccgtcgagggtctccatcttgatgcatgtccagtcgtcgttctccgaaccgtcgaagcccgcgcatacgcgcgtgccttttggcgggttcggcaaccagagttcatgcgccggcatagcagctctcccacagtccgtcttcgagccatgcgccgccgccctgcaccagacggttcccgaagaaccgttccgcttgggtagggtcggtcttcatcagcgccttggcttccgattcgatggaattaaggtcgacccacggggagccgcgatacacgtattcgagcatcttcaagcgttcggatttcagattgaagtccaacggccggccgtcgcggtgacgcaatgatttcgcgagatcggggttccggtagaacacgaacacgtcgtcctcggcgttctcgaacacctgctgcgcgtaactgtcctcgcccggatcccatgcgttcgtccacgcatgtgtgcggccgcccatgccggcggctcctcggcgctgcgtggtggcgaccgctatcatgccgttcgatttcgtgtacaggccggcctcgtcctgttcggcgtccgtgatcggattgcccagacgggatttcgccgaggcggtgaccacgtcgatgcgatccaagtccaaggcgtcggcctcgccttcgcgccccggctgcaatatgcggatgaaggtgtccctcacgcgcatgagctccttgagcgggcccagcaggatcgtcgccacgagaggacggtagatgttgcgtacctgttcctcggagttggcggtcagctggatgagcggcgacggatgtcgacggcctttcggctcgcccggattgtacggccactcccagccgcacggacaaccgttgtcagcgcaacggtacatgtcgccttctcgcgcccagccatcgaagatggtgggcccgcagccctcggcggcggtgaagaacgccgtgcatggccccttgccccatttctgcggcccgacggtcagcgtcatgcggtattcgaatgcctggttgagtaccatcgggttgtcgacggtgacttcctcgggcggcacatatggggcgtcctcgcggatgcgccaacggttcgccgccagccagtactgccagtcggacagcaccactggacggcctcgcaacgggccgtcaggctgccggcagtgacgttcgatccatgcgcacaccagatgccccaacgtggggaagtcgatgagccatgaatcctcgtcagccattgccgctcatccgacgctggtacacatgcttcgtctcgtccatgggagagcgttcggcggctgattcctggttcagctccttggccctgcggcgcgtgaactccgaatcgactggcttccgctcggcctccgcttcgattttccagcctaatgcctgcaatccggcggcgctcatgccgacgcggtcggagatgcgcagcagcacggtcaacgccgtgggtgccggcgcgatctcgcatgcggtggaaagccgcgcgtacaacgccagttcgtgaatcatccacttgaactggggcagatgccaggcgcgtgcctgaggcagcttccacagccacttccacttctccgcctcaagtttgcggacgcgctcgtcatcggcgggctccaagggccattccggcggcttcatccggcactcggtgttcggcaggctctgcaatgtgtatccgagtctgcggctcttctcgctgttcgggtccttggccggcccggagcgtactcgtttgcctccacttggcatgatgttcacctctcgtcatggccttgcgccctagcgacagatcgacgagaccgccctcgcggcggcccgccagcgatgtttgaaccctgcgcacccgacagacagctcaccggcggtccaagcggggtggtcgtcaccccaccccccccctgggtgttgtcggtcgtttttgtcgtgatgcacagtgttcctgtttattgtctggtgttgaagcctgctggtcttgttttgccggtttttacatcgtggcattgtttgcataggcctcgtccgaacttcgggtcgttggggttgagtcgcatgtcgatgagttcggttctttcgtatgggtaatggtctgcgattgtgcttggattgccgcagagtccgtggtgtttgccgcagcctccgcgtccggagtcgccggggcatgtgcagtatgggtctcgtgcgagcacttgcctgcggaatgattggtgccccttggtgccgtaggggttatggcctcgggtacgggcgcggtcccgctgggcccgagcgcaggcgtcgcatttgcgggccggcgtctcgatgaggttcgggcatccgggggtcgagcagactcgccagctcatgtacgcctcgcagtcattgtgttcgttggcgtgtcttggtgtccccggcttgcatatctatagttattgtgttactatagatatgtcagcagaaaggaggtccgatgaatccaaaggattggttcgatgtcatcaacggcatcatcgccaacgtcctcgccgcgatagccataatcatcgcaatcagacgaagaccgaagcacaagaagtaaaacaggttccggctaaccctactagccggaacctccccgccaatcctatctcatcggaaacacatcatgagaacatcactgattttcggaatcgtggccctgacgttcggagccatggccttgggcggcgcgctatccgacagcccgatagtatctggcggcttcggtctcgcggccggaatcatgggccttgcggccggaatcatcaacggcaaggaagacaacaatgacgactgaatacctcggcgtcaaacaggtcgccgaacgcctcggcatcaccagcggcggcctgctcaacctcaaactccccgaacccgacgccacgatagggcgcacgcgcggctggttgcctgagaccatcgatgagtggaacgctcaacgtccgggacgtggtgtcggaggggggagaccacgcaagaacaaagcatagatacgcgaaaacccagccacttgagctgggtttttcgacacttctgccactgcatattatggcaacactaagccataactgtcaaatcagcgggtccgatgagcagccggtacacgtcgcagtaggcgtatccgtccgcgtgacggaagagcttgtcgcgttgcccccacatggtgatggtcttgcgactgaccttgatgccagcctcggcgaaagccttggcgatgtcggcggcggaacctcgcttggagtcatcccagcacaatgtcttgagcctgcgcagtttcacggtctgcgctcgctgttcgcgcccgcatacggggcatgtgacccactggtcgttggctcctgcggtgagcatggtctcgcatagttcgcaggtacctatctcgcggcgttgctccggcgggtccagcgcagtatcgactttgcgggcgatgccgtcaacgacgtgcatgtagaagcccgcgtcggcgaacgtggcgagtttggggtgtccggcgcatgcgatgagcgtggccttcagatcctcgttgcgtttgtctttgcgccagtcgagtgcgtcgatgccgtcgaggcggcgccatagttcgcgggccgtggcgtcgagcatgtcgatcaggtcgagcacgtccaagcgtatcggtgtcgggggagtggcggtctggatgcgcacgggcgaatgccctcccggatgcaatgtcgcgtcgaggctgtcatgcaacggcgtgacatcacgcgccaagcgcaataatgtgcctgcgaagcgcatctcgcacgtctcgcacagcgaacactcctcttcggtcatcgtcctgcagttctggcagttcatactgagccccttccggctggtcggctagaataatgcttggatctcatcgccctggccgaccttgttggttggggttttctcatgtttgagctggctgtatggcatattccagatgcgtttgaattcggctatctcctgtttcgatagtttcggcccgccccacggtttgcccggcgaacactcccttttcggcggcgtgaacggtttgacgctcacccgagccaaatggcacgtgtgaccggcgaggtattggccgtccggtctgatgcccgcacatccgctcacgctgcgcaacagtgggtgcccgacggagggcagccagaccacgcgcgtcaatgggcggccgaggattatcgccacggtcaggtcgtcaccctccacacatccgtaatcccacacatcccacacggtttcgcgatcctcgatgacgtacaggccgcacccctcgcagacagtgaccacaagggggcttgatttcggaacgaacgcgcgaagccatgctggtttgcgttcacgggcgcgtggcctgctcactcctccattgcctttcttcttgccgcgtcgaacgcgattctgatgatgttctccatccacgcgccggggagcgtgatgaactttcgggtttcgcccatggcggcggcaatctcctcttcggtgatttcgcgtgacgctccggccttgtatcctcgtccccacgcccactgcaggtcactgtcgatgtacgacgggtcacgctgcttctgtgcctcgatttcactgctgatgatgctcattcgtttcctccgtttcgttgttgattgccgtttcgattcgtatgcacaggtcgagcgcttcccgccagccggcctggtagccgagcacatacgcctctgccggcgactcgctgcccaatcccgctgaggccagtgcgctgagcgcccgttgaatcacgtcaatcggtccggccatgggtcagtcctcccatttgatgtcctggatttcatgcagcaccgcttcgcaggcggtgatgagtacgctgagcatacggcggccgtgatgtcctctccggtcaaggttgaacaggacgggatggccttgactccactggtcgatgccgatggaggcgattgggatggtttcgaccagattggtgtcagcatcctcacagcggtattggatggtgacggattctttcatgcttcctcgctttcagtcgtgtaacagttcgcgtcgagccagtcggcgatgacgcggaagtccttggcccattggatgcggttttcccgctcccgctcgtccttgggagctggtttcggctcattgaggttgagtagtccgtattcgggtttcttcagatagtggcagcgggcgcgtccgcgtcccttgccggcttgcttgtagttgatgagctggaggatgtgcagcatctccaatgctttggccgggtcgaagttcggcgtctcggggtctgcgtcgaaccgcttcctcaattcgggcacggtgccttctccgttgcacagctcccatgctgtcgcttcgacttgctctctgaaggtgagtgccattttggggtttcctttctgacgttttttggttgggaacaactagtgtcgttgacgtgctttttttgctgttccggagggccgagtcgcagttgttcccgcacccacccacacacgtagtgtgggtggggagtgctgggaacagctggacatcgctactccagttgttccgggaacaactcggaacaactgggaacaacgggaacaactagatttcgagatggttttccttatccaattcgttcgcctcctccctgctcatccggtccacgaaagcgtccgatttcgggtcgttcatctgccggtatggtctgacgctggcgtagatgttccggttgtttcgtccggagcggttgctgatccactcgccctcgagcagccggttgatggcggtgagcacggtggtcttccgggcgcttgaaccgtcgtccttcagcagttcgatgatctcggtctggttcggctcctcgggcgcgttctcgacgatccggctgatcttctccatgagtccggttggccgttcgaggccgcgctgtcgcgtggtttcatcgctgggcatcatgttggggcgtgcgatggtgacgcgcatgagtttcggatccgtgctgttgatttcgatgcgtgcggcttcgcgcaggtggctgccgttgctgctccagctgacggcgcaatgctcctcgatctcgctgatgcggtccttgcctgatttgatgacgatggtgccgcgcacgcccttgccgactggtttggtcatgtccaccgagtagctgatgccgtcgatgagtgcgagtttctgcatgctgccgccggcgtagcggccccggttgtccttgcttttgacgacgtggtcgatgagtacgactgccggcccgcaggcgctgatgagtcgtggcatggtgttgtaccaggtggcgatgtcgtcgccggaattcgagtcgagtcctgcgtaggcgaggcagctggtgacgccgtcgatgacggcgagcgtggcggtgtcggcgtagtcgagggtctcgcgccagccgccgaggctggtggggctgctgggcttggcgctgggtcgcacgtagtggaaatgctgcacgatctgttcgccggtcacgccgagcagcaggaggcgtttgacgacgtttctggcgctgtcctcatagtcgatgtagatcacgtcatgtccttgtctgagttcctgtgcggcggcgatctgggcgatcatgcttttgccgcagccgggttcgccgtgcaggtcgttgaccgctccccggtagaagagtccttgtccgtcctcgcgttggaacacggttggagtgggcggcagttcaacgccggacgccaactgggtgaggtcctcgaaccgccaactggaggaggttttatttgcctcgtaactttccgttgagccgttttgaacctgagatgcggtggttgaaccggtttgaaccggcgtcgttccaacgttttgaacctgctgtggataactttccaccatttgactcgtaaccgtgttttgggtgggttcgttgaactcgccgggtgtcatgcgttcgattttcgactgcccgcatgggtccgtgtgggattggatgccgttgactttttccatcgcgccactgagaatgctggcccattcgcgtgcggcctcgcgttccctgccctgacggtcgggcgctatttcgctgatgaagcgtggtttgagctggttgatggcgtcgagcgcgccacgatgcccctcctgcgcgaagttggccaacgtccagacggcctgcaacgtggtgtcgtgtcgggagcctttggacgcggggttggcgagcgtcctgttgaggaacgtgttgaccgccttgcacatgcgggcgtcgtatcccctcggattagaggtgattggagtggtcgacgggtttgaatgtgtcaggttcgccatgctgtcgggtttgcgcaggtagtccacccacttccatggcagtgtcgccaagtcgctgatgtgggggagcgtgctggcaaccctgccgctgggcgtgtaccagcagtacatttcgccgctcgggtggatcgacggccagaccacggaataccggtggccgggctgcaggatgtcgaccccctcgatggcgccgcccttccacgcgaggccttcgggcaccttgtagaacaggtggcgtgccggactgtcgatgccgtgcgccgtgctgctccacgtggccggaagcatgcccagttcctgagagagttcgctgatgcctttcgccccgtccgccttgacctgatggccttgtgcggcgtcgatgtccaacaccaatacgccttctggtatgacgatgcccgtgttcgcgtccggggtcgcctgcgaccagaaccgcacctgctcgtcggtgacgggtttgcggctgcgtccagtgaaaccgctgggtggtggggtcttgcggccttccggcagggggatgacctgcatccaccccgccgcacggtacagtggcgcggctgccgtgtatccgtagatgccggtcatccttgaaactcctttgatgtgatgtgaatatgtgtggtgccgtgcacgcctttgcatacgtgccggccgcttggatacggctacggcggtcgggactggactcagtccttgtcggaatccttgctcttgtgccagcccaggagcacgagtctcacgctcatgagctggaggctttccgagtcgacgtcacggaaaccgtcctgatcggaggcgagggaatccatgtctttcatcagctcgagccactagttctgcaggtgtttcagcagttcgtccatcagaattcaccggtttccaattgctgttccgagccgccgtggttctgcggctgcgcctggtcggtgacggccgtcaccgcttcgaccggcacgcccaacaatgcggctatctcctgcggcggcttgcccaacgccttcaactggttgaccttcatcggatccacctgctgctggccgagctgcacaggctgaacagattgctgctggccctgctgtgcgggcgggttccacgggtcggttggggccggcgcatatccctgattcggggcctgcatgggctgctggggcgcgtactgctgctgcgggtatgccggctgggcttgctgcatgccgggctgctggggttggctgccgttcacgagattgttgacgctggacgcgggttcgatgtggaattcgaacaccttcggcggctggggcgcgtcgccccgcgggccgagacccacgaaccgttccgtgatggtgtcgcccggcttcgggatcttcacgcccgcctgacggcaggcctcgcgaaacgccttgagctggatgccccagcccttgatccagagcgagcggcggccgtcgtcgtcatccacgctcgggtcgcgcaactgggtctggatgatgacgtggatctgctccttcggacgcccgtcgttccaaaaggcgggctgcttggtttggaagtcgttgacctgcgtggtctcgattttttcgatgacgccggtcaccgagtctccgggctggctgttcgcgccgaagtacgctttggcgctgttgccggcgagcaggtcgccgagcgagctcaactgggcgggctgtcgttggggctgctggtagccgtacccctgctgcgggtacccgtactgttgtggttgtccgaacattgtcgtgttcctttcgttgttttttacttggtgaactggtattcgggttcgagcaggtccatgagctgcagccattggtccggcacttcgggccatgcctgttcgtcgaattcggggagcgtggtcgagtccggccacgtgttgcagtcgaagcaatgccccgtgctgtgtggtagtcggcggatccacgagtcacgcatcttgggcccgtcggcgagctctatcacgtcgagcaggttcgcgagcaggttcgcccgtgacaaggcccacatgcccggcttctcgtcgaactcccactcccacgggtaggcgtcattgagcgtctggctgttgcggggaaggaagtaaatacagctgagccgcacgtccacgccctcgttcctgagccctattccgtacaggctggcctgcacccggtatgtctgcgatgggccgtgggccttcgcgagcttcagtgtggagttgtcgttcacgtacttccagtcgatggtcgcgccttcggccacgtcccacaggtcgatgctgcccttgatgtcgtagccgcccgtgaggccgttcaaccggcccacggtcaccgtgtactcggtgcaatacaacggtttgagctcctcgggggcgggtccgtcgaacacctggccgccgtacatgacctgcgggttggagaacaggcgttcgaaatgctcgtgcagacaggtgcccgtgtagggcagccatgccggctgcttcgactgttcccagcccgccagcttcgccgccagacagtgcaggcagtccgtgcccagttcgctgggtccgagctcacgctgtaggttgcgcggcttgttgacgatgtccgcctcgatgatgccgcgaatcttcggccacaacctgggttcctccatcgtgccgattttggttttcggcgtgacgggcggcttgcccatgacgggtgccgactgcgtcatgggcggtatgtccacggggatcgcatcaccctgttgggcctgcgcgacggcgaggatagcctcattcatgccgttcatgggttttcacctccttgagaaagtcgttgatggttttcttgacgtcggccaatgcggtcttgttgaggcctttgactgcaaccgcttcgctggcgttgtcgaagcgcagcgtgtaggtcccgtcatccgccgtcgtgatggttggcggcgtatgcccgcagagcatcgaatgcacgggaaaaccggtcttgccctgcgcctccagttcgcgtatggccttgtggatgcgtctggcgacggtgaggcccagctcgtcgagctgctcggagcggatgacgtacaggtcgtcggtcagctcgttgccgttctcgtcgtgcaggtcgtagtcggcgatggcgctttccacgatcagggcgatgcccaggctggacagttccgcgctcatgagaccaccaccataggcttgccgctcatcgcgtaatcggccaccgcgtccgccgacagcagcttctccaactggctgagcggccgcggccgcaactggtaggctccgggatacttggtggccgggtaggctttttcgaacgtgccggcgttgatgcggcgcgcgcccggtttcacctgcactttcaggttgccggcctggtaggtgccgacaggatgcgagtcgaggatacgggccttcagctcgtcgacctcctcctgacgggacgcgatctcggcctgcagttcgacgatgcgcgccgcctgagcttcgaataggccctggcgcaacccctcgtcgggattcttggtttcgacttccttgaaatcggggggcaatacttcattcgcagtcatttgatttgcctttcacgatgatctgggcgtgggtgggataccacgccgtctgatgtttggtttggttcgtgtgccggttgcagcaggtgaccgcctcgtccaggccggtgggcttgccgagtggcccgcatgtcctgcaacgcggcatccaaagacgccggtcaggcatcatgcctgtcctcggaggtgaggcgcagtccggcgatgacctccgccgaagcgtccgggttgcgcagcagcttcgatatggccgcgccttccttgacggtcagttgggcgatggcgatggccgacgtgacggccgtatgctgctcgtcggtgagtatgatcttgtcggacagcaacagtttggtggctttgtcgatgaacgtgctggccgcgttcgtgatgccgttcgccgtcggcaccagggccgccagttcgaaactcagatcctcgtccgacaccagcgcctgctgcaccatacgcggctcgttgataggcttgctcatgattgtttcctttccttcggctcccattcggggagcggcttgatacagatatagagatgtggctcgtactcatgcccgcaacacgtgtacgggtcgccggacttgcgtttccggtatttgcctttggccccgtacacccacaggtcgggcatgcacttggtggcatgggattcgacgacctgcgcgtcatccacgtaggcgacgccgttcagcgagtccaaaaccagcttcagcaggttgtcgagatccggacggccgcgatggctcatccagaattcggcctccaagcgcacggggcattggaacggtttcgcctgcgggtatttcaaccggaattccgcgaacaggcgttcctccgccctgacggtgcgcttcggcgtgatggcatgacccccgtagacgcggggacggcctttcggcacggggtcgcccggcaggcagagcgtgaactcactcggctgttccatcgccgccccacttcatgacgaccgcgaggaacaacagcggcaggatgatggccagtacgagactgccggtgatcatccactgcggcgtacccacagggcttggtatgcggctgtgcgtggccgcgaaacccgccacccagccctcgacgaacgtgagggtcagtaggagcatggacttctggccgtcagtcaggcgttgcttcggacgacgcatgcgccgcttcttgcgccgtaatgcttcgatgctcatttcacggccctcgacttctccatggtcacgatgccggccaggtccaccacgtcggattcgacctgcaacaccttgcgcatgatcttcagatcgccctgcatgtaggcgtcatagccgatctgatgcgccacgtcgaacaggtcgcccagcatgtccgcataccgctgccacttgtccgcctcggactggggttcgggctcgcgcgtctcgccgcccaaatccttctccaattcgacctctccctcgttcaggagctgctccatgagctccttcaacgacatgtcctcgggaacctcgacgccgatggcgtggactccgctaaccttgttgtttgacatcacttgtcttcctttcaactgttggtgatgttgggtgccggcattcgagccttggacagtgcggcgccggcacccttttccttttctcccggctgcgagaccgggaaatccttatttgccggacccgtacaggtattcggcccgcgtacgctggtttgcgccgtcatagcgcgcgacctcctcgggcctccagccgagcacgcggcccgtgggccccaaaacgggcgtcggcgcattgccacgccagacccgctggtacatcgtgcgagtggtcaccccgtaatgctcggccaacgccttataggtgagcagcccctgcgccatcacgccaccgcctcctgctgcgcgcccagtacgaactggtcgttgaggaagtcgccgggctgatagccggtgagcttggcgaaagtctcgacgtccgtgagggacaggtctaccttgccgttgattctgcgtgagaccacgtccaccgactggccggtttgtttcgcgtagtccgcgacgctgattttctgtgcggccatcactgctctgattcgagccgccgcttgttcgctgagctttgtcacggttgcctccttttgtgttccgtgttgagcgatggctacagtatgcacgcaattgcgagcgtatacaaattacggcgtgtcgcaattgcgtgcaacttaaaggatttgcactactaagaaaattaacgtcgcgcgtgttcgcgcaattacgcgctattatgaagctatgggaagtaacaagattggtgtcagcgatttcgcgctgacggtaagcgccgccatcagagcgcaaatgggaatacgccgcatctccaacagggaaatcgcgaaactcatcgaccgaggcgcaacctacgtcaactccagaatcaaagacgagaacgaatgggccctcggcgacatcgaacgactctgcgaactctggaacatgacgccatgcgaactcatcgaatccgtcaacagcgagcagtctcgtgtggccgaaactctcaataagctcaagcgcggcgatctcgatatcgccgcctatgaggacgaccacaagtttgatggcgacggagatgaccccgcatgacggatccgctcccgatatcgccgcgcatgagctacgggcagatacgcatggccctctaccaggtcgcgcccgacctgcacgtggccagcacccgcctgcccggcaaattggacggcatctactgcctgaccacgaacaccgtgctcatcgaccggcgcatcacctacacacgcaaacgctgcgccctggtgcacgagctcgtgcattggcaacacggcgacgacaccacccacggctgcatcggcggcaaaaacgagcggcgctgccgacacgagaccgccagactgctcatcaacccggccgaatacgctttggccgaacgcatgtatgacggcaacccgtaccagatagccgccgagctcaatgtcaccatccaaatcatccaggattatcgacagtggctacatgacaacgtgactgtataggaagaggatgaaatgaagaaaacgattacacttctatgttgtatggctatggttgtgtccttggcctcttgcggggaacccgcgccattgactgaaggacatgcccttaccgcatgtaaacgtcaagcgaaaatcgaagcgcccaaaggtttttactacaagctcagcaatgtggatataaccgataatgatgatggaactattcgcgttatcttcaacgatgcaacggttaatcagtctgtagtccagacggtcgtgtgtgacgttggaggaacaaatgaccggccgtcgatactgacatttggagatattcgcggattgaacaacgagtcagacaagcaggacacgagtgagcaactaaaacagcagtccggagagaaatctggagagacggcttttctttccgcaactgtaaagatcatcgatggtgatattcagataaacacgagcggcaaagttgaatatagtccgctgattaccgtttattccgttactggcgatgaagcctcgttcctcccgctcgggaatgatgctaataccatcgtgaaagcagacggaagcaaaacatcgatttcttcttccgactacacatggaagtatgaccaaaaaggtgatgcaacattcagtatcagccttaaccctgccgaatatatggggataagtgaccctatcgacagagtggagttggccgcatatatgaggtcagcaaaacgcacaataggcaaaaacatcgtattgaatttcgattagaaagaattgccctatcggtcttgcacaccgatagggcggttgaagatccagctagttcaagaaaggaggaacttcgcctacctatcctaatcgataggcaaggcgaagcacacccgaaatggccaacgtcaccagatacaagaccagcaaaggcgaaaccagataccgcgtgaggtatcgcaagccggacggcacgcagaccgataaaaggggtttccaccgcaagatagacgcggagaactgggccgccgaacacgtcaccatcgccaaggccaccaacagctacatcgacccgcagggcggaagagtcaaggtcgaagccctatggccggcgtggatagcggccaagcggacgcgctgcaagaaaagctacacgaacacgctcgaacaggaatggcgggtaagggtcgaaccgaaatgggggagccgtgaactctcgtcaatatccaactccgaagtgcaggaatgggtcgccgcgatgagcgcggcgggactgagcgccagcgtcatactgcgtgccgaagccctcctgtccggcctgtgcagacaggccgtgaaagaccggctcatcggagccgacccatgcgacgatttggagctgccaaaaaagaagcgcaaggagcaccggtatctaagcatgactgggctcatacggttggcggaggcctccggctggcgcaagcccatcgtgctggtcctcggtctgaccggcatgagatggggcgaactcgtgggactgcgcgtcaaggacgtgaatctggaacgccgccgcctgtggatacgacgcaatgtcgtggaggtcgatggggagcttgtcgtcaacaccccgaagtccgacaaatggcgtcaggtcgtatatccggccatattggacgatgacgtgcgtagcctggtcgagggcaggaagccggacgatattctcttcgaacagccgggcagcggtttcctgcgccgcacgcacgggccgaagagcagcagctcgtggttctattgggcgaaaaaacatgccgatatcgataatgagcttacggtgcatgacctgaggcacaccgccgcctcgctgatggtcagggcgggcgcgaacgtcaaggccgtccagagacagctgggtcacacgagcgccgccatgacgttggacgtttacgccgacctgttcgacgatgatctggacgcggtgggcgaggccgtgaacgcgatgctgctggagaatgtgggcaaaatgtgggcaaaggaaacggccgaggccgcgtaattcaagcgggagtagggctctcgggttcgatgccatagggttcaagcccctgcggccccactcttttgcgtcgcctcctgcggcggcacagcgcgtcttcacgtccagataggcgcgtacaatcccttaggttccggttcacgtcctgccataggggcatgacgacccgggtcccccgaatccataggagacgtaaaatgcagcagggtatccatcctgattaccaccccgttgaggtgacgtgctcgtgcggcaacaccttcgtgacccgcaccgctggcaaggaagatcacatgttcgttgacgtgtgctctcagtgccacccgttctacaccggcaagcagaagattcttgacaccggtggccgcgttgctcgcttcgagaagcgctacggcaagaagagcaagtagcatacttcacgccagtccgattcgattcggcatgctccggcatacccgatcgaggactggcatttttgtattctttgacatttttttgacctgcacaaccgaatagacaccaccgtacgaaagaaagtgtgttatggcagacgaacagttcccggcggcggcaaccgcgcttgaggagtaccagtccatcgaagaacagatggcgagccccgaagtcgtgtccaacccggacaagctgcgcaagctgggccgtcgtcacgccgaactgggtgccatcgtgggcgcctacaaaacctggttgcaggtgaaggacgatctggcagccgctcaggagatggccggcgaagacgccgacttcgccgaggaagccaagcgtcttgaagccgaactgcccgacgccgaggagaagctgcgcaccgcgctgatcccgcgtgacccggatgatgcgcgcgacaccatcatggaaatcaaggctggcaccggcggcgaagaagccgcactgttcgccggcgacctgctgcgcatgtacacccgttacgccgagaagcgtggctggagcgtgaacgtgcagtccgagaacaccaccgagctcggcggcgtcaaggacgtgcagattgccatccgcgccaagggcacgcccgctcccgaagacggcgtgtgggcttcgatgaaatacgagggcggcgtacaccgtgtgcagcgcatccccgtcaccgaatcgcagggccgtatccagacttccgccgcgggcgtcatcgtgttccccgaagccgacgaggatgacgacgagatcgagatcgatccgaaagacctgaaaatcgacatcttcatgagctccggccccggcggccagtccgtgaacaccacgtattccgccgtgcgcatgacccacctgcccaccggcatcacagtgaacatgcaggatgagaagtcgcagatccagaaccgcgccgccgcgctgcgtgtgctgaagtctcgcctgctggccatgaaacatgagcaggaggccgccgaagccgccgacatgcgtcactcgcaggtgcgttcgcttgaccgctccgaacgtattcgcacgtacaacttcccggaaaaccgtatcgtcgatcatcgcacgaattacaaggcctacaaccttgacgccgtgctcgatggcgacctgcaggccgtcatcgattccgacatccaagccgacgaagccgaccgtctggccaaccagcagtgatagccgacctgattcgtcaagccgccgcgcagttgcgcgaagccggcatcgagacgcccgaacatgatgccaaactgttgctggccgaggccgtggacgccgaactacgcgatatcgacaaggccatgctgatgggggagggcctcgattcgctggcccccgccggcgggggctgtcgcgcagcgactgggggtggtcaggccgaccctgtcaccaatatccttgccgccttccacgccatgctttcccgacgcgccaaacgcgagccgctccaatacatcaccggccacacgcctttccgctacctcgacctgcaggtgggccccggcgtctttatcccgcgcccggaaaccgaaaccgtagtccaggccggtcttgactggctgacccggcacagcatgatccacccgcgcatggtcgacctgtgcgccggttccggtgccatcggcctgtcgatagtcagcgaagtgcccggcagccaagtatgggccgtcgaattatccccgcgtaccgccgaatggacccggcgcaatctggcggtaaccgcgaaacgatacccctccatcgcctccaattaccaactggaagtcgccgacgccacgtcactggccacgctggcgcaactcgacggcaccatcgacatcgtcatcaccaacccgccctacgtgccacaaaccgacatccccgaacaaccagaagtacgcgactgggacccggaactggcgctatacggcggttcggcagacggcacgctcatccctgaacgcattattgagcgcgcctggcgcctgctcaagcccggcggcgtattggttatggagcatgatctcacccaaggcgagcgattagtggcctatgccaaggccacaggtttcgccaccgcctccaccggcaaagattggaccggccgagaccgctatctcttcgccgagaagtagccacaggcgcggggccgccgctgctactgcgcgtaatactgcagggcggaggcgtccgcgtccgtgatttcgcgaatcggacggaccggattgcccacggccacggtgtgcggcggaatatcgcgcgtcaccaccgagccggcaccgatcacgcaaccctcgccaatcgtcaccgggcaacaatccagcacagtgaagttgaagttggcgaacacgcgctcgctggcgcgcggcatacgcagttcgacgggaggcatggtggtggattcagcattgattccgctcattgaacactcctgtaatttcgcgaaagagcatggatgaactcattgtatctacggtctgtgcgtatggggcgaatcggaaaacagcagtacggcaaacgagcgatgatgaactatgcaagtcggggcgcaatggtgcaatggtagattgtgaatacacaggcgaacggaggtgtcgtgagcgtggagggcggaacaacgctgaaagtcacggatgaatcgctggcacaagcggcgcgtgtcatccgggatggtggattggtcgtcattccaacggatacggtatatggagtggcgtgcgatccgcgtaataaggccgccatcgaccgtatctaccggctcaagcgtcgcccgcgctataaggcgttgcaggtactgctcgcatccaccgaccagcttgatgaactcggtctcgacctgccgtctccactgaatcgtttgtcggcggcgttcctgcccggcgcgttctcgccgattgccgtagcccggcccgactgcacgttggagactttggccgacaccgccgatggtcgccccggcacgcagggcatccgcatccccaattcggcgctgtgcctcgcgattctcaaggccactggtccgctggccgcgtccagcgccaaccgttccggcgacgaaagcgcacagactgtccaggaggcggttgacgcgttcggcaacgaagtcgacctgtatctggacggcggtcccacccaaggccatgtctccagcaccgtcgtcaaagccgatccgtacgcgcgcgacggcatcgagatcctgcgtgaaggcgtcatcgcccaaaacgtgattcgcaaggccctccacctcaacggcgggggactcggcgcatgagaatctacctactgattgccgccatcgccggtggcgtcacctggctggtgactccgctgattcgccacgtcgccatcgaaatcggtgcggttggcgaggtgcgtgcccgagacgtgcacaccattcccacgccgcgcatgggcggccttggcatgctgatcggttttgccgtggctaccgtattcgccagtcggctgccttttctctcgggattgttcaacggcaattaccagatgtgggtgattcttgccggcggcatcatgatcagtctgctgggcatggccgacgacctgtgggatctcgattggatgctgaaactcgccggccagctgctgatttccgtattcgtggcttgggacggattgcagatcatctcactgcctttgggtggttcgctgattaccgcctcgccgagtctgtccatggcgatcaccgcattcctgatcgtcgcctcgatcaacgcggtcaatttcgttgatggcctcgatggtctggcggccggtatcgtggcgattggtggcatagcgttcgccgcctattcgtatatcatcgcccggtcttccccgagttatgcttcgttggccacgctgatcgacgtgatgatggtgggtatctgcgtgggcttcctgctgcataattggcatcccgccaaactgttcatgggtgattccggttcgatgctgcttggctatctcatcacctgcgcttcgattgtgatgaccggacgtcttgacccggcctcgattcatgccagcatctatctgccggtgttcatgccgattctgctgccggttctggtgttgttcctgcctgtgctcgacatgtgtctggcgattgtgcggcgtttggccaaaggccagtcgcccatgcatccggaccgtatgcacctgcaccatcgcatgctgaagatcgggcattcggtgcgtggcgccgtgctgattctgtggggatgggccgcgttgatcgcattcggttcgctgacgattctgttcttcaaagcgcagcacgtggccgtgggcatggccatcgctgtggtggtgctgaccatagccacgatgtacccctatctgcggcatcgtattcccgagatccaagccgagaacctgacgttcgaatccgcacgtaaaaacgcgcagcatacagtgcctaaatcgcagtctgcagtaggggagagccgggattcgattggctctcaggcagcggattcgatgactgattcgcctgcaaattcgcgggactcgcaggtgggtgaggtgcaggacccggcagcggataagtgagcgctcacaagcgtgtgtcgtgaaggtcagcgcattttcatatagtgtttacatggctacaaaccttgatgaattaaacgcccagtcggcgtatgctccccttcccccgattttcgccaagctcggccttgcctatgacgatgtgctgctgttgccgaacgagacggatgtcattccctccgaagtggacaccagcactcatctgactcgcaagatcgtgatgaaggccccggtcctctccgctgccatggataccgtgaccgagtccgagatggccatcgccatggctcgtaacggtggcatcggtgtgttgcaccgcaatctgtccatcgacgaccaggccgctcaggtcgatgtggtcaagcgttccgagtccggtatgatcaccgacccgctgaccgtcaaccccgaggtcacgctggccgacctcgacaagctgtgcggcaagttccacatctccggtctgccggttgtggacaaggacaacaagctcgtcggcatcatcaccaaccgtgatatgcgcttcatcgcctccgaggattacgacaccctgaaggttaaggatgtcatgaccaaggagaacctggtcactggcccgtccaacatctccaaggacgacgctcaccgtctactcgctcagcacaaggttgagaagctgccgctcgttgacgaggaaggccacctgaccggcctgatcaccgtcaaggacttcgtcaagaccgagcagtacccggacgccaccaaggatgagcagggtcgtctgcgcgtggccgccggcgtcggcttcctcggcgacgcctggcagcgtgcctccgctctgatggaggctggcgtggacgtgctcgtggtcgacaccgccaacggtgaggctcgtctggcactcgacatgatttcccgcctgaagcacgactccgccttcgacggcgtgcagatcatcggcggcaacgtcggcacccgctccggtgctcaggccatgattgaggctggcgcggacgccgtcaaggtcggtattggccccggctccatctgcaccacccgtatcgttgccggtgtcggtgtcccgcagctcaccgccgtgtacgaggccgcccaggcctgccgtgccgctggcgtgccctgcatcgccgacggtggcatccactactccggtgacatcgccaaggccctcgtggccggcgcctcctccgtgatgctcggcggcacgctcgccggctgtgaggaagccccgggcgagaaggtgctcctgcacggcaagcagtacaagctgtaccgtggcatgggctccctcggcgccatggccccgcgcggcaagaagtcctactccaaggaccgctacttccaggccgacgtgacctccagcgacaaggtcgtgccggaaggcgtggaaggcgaagtgccgtaccgcggcccgctgaacgccgtgctctaccagatgctcggtggcctgcaccagtccatgttctacatcggcgcccacaacatcgccgagatgccggagcgtggcaagttcatccgcatcaccgacgccggtctgcgcgaatcgcacccgcacgatatcgtgatgaccgccgaagccccgaactactccggcttccacaacaactgatcggttgatgcccgctagcttgcgctagttaggggttgattccttgtgaaaagggtctgcttatgcaggcccttttcgcgtatgtggctcgagatagcttgtatgcgctggggtatagtctgaactgttctgcataagcgatgaccagcgaagaaaagaggcacaccatggtcgacagccatgacgcggaaacgtacagcgcgaaggactcgcgcctgatttggatcgattgcgagatgaccggacttgacatcttcggcggcgacgaactcgtcgaggtgtctgtggttcccaccgactttgacctgaatgtgctggacgagggcgtggattacgtcatcaagccgtccgagaaggctgtgaaccacatgaacgatttcgtgcgccagatgcacacccgttccggcctgatcaacgagtgggagaatggcctgagcctggccgaggccgagcagaaggtcaccgaatacgtgctgcgcttcacgccggaaggcgtgcgcccgctgctggccggcaacaccatcggctccgacaagaagttcctcgaccactacatgccgggcctcatgagccacctgcattaccgcagcgtggacgtgagcaccttgaaggagctcgcccgccgctggtacccggccgtctacgagaaccgtccgccgaagaacggcggccaccgtgccctcgccgacatcatcgagtccttggacgagttgcgctactaccgtaaggccttcatggcccccgtccccggcccggatgatgccgcctccaaggccatcgccgccgacatcgtggccaccagcattctcaataagtagtccgccgtacttggctcccctccctgaggggagtctagagaggttgatatgcgccaaaccgaagccctagccattctgaacgccggcgcgaacgtgtttctgaccggtgcgcccggtgccggtaagacctatgtcttgaacgagttcatccgccaggctcgggccgacggcgccagcgtggcagtcaccgcgtccacaggcatcgcctccacgcatatcaacggccaaaccatccattcgtggagcggcgtcggcgtggccaccgccctgagcccgagtctgctcaaactcatcaaatcccggcgcaaacgcaagattcaggctacggacatcctcgtcatcgacgaggtttccatgctgcacgcatggctgttcgacatggtcgaccaagtctgccgcgaagtgcgtcgcgacccacgcccgttcggaggcatccaggtcgtgctgtccggcgacttcttccaactgccgccggtttcggtgtccgggcgcaaccgcgacctcatcgcccccacccccgaattcatcgccagtcgcgaacggtatgcccgtgccggcttgaaccccgaaggcttcatcaccgaatcgctggtatggcccgaactcaacccggtaatctgctatctgaccgaacagcaccgtcaggacaccggcgaactgctgaccgtgctcaccgacattcgcgaaggcgacgtgacccagtccgaccgtgacgtgctcgtcacccgtctgggcaaactgcccgagcccggccaggtcgccgtccacctattcccggtgaaccggcaggccgacaatctcaacgacatgcgcctgaaccagatcatgcttgagccgcacgagttccacgccgaaaccgcgggtcccgccaatctggtcgaccggctcaaaaagaacatgctggcccccgagcgactggtactcaaggaaggcgcggctgtcatggccctgcgcaacgacaccgatcgccagtacgtcaacggctcgctcggcaccgtgcgcggcttcgcgcaggagaacaagggcggctggccgatcgtggaattcgaaaacggcaacatcgtcaccatgaaacaggccacatgggaaatgatggacggcgacaccgtgctcgcctccgtctcgcaggtgccgttgcgttgcgcgtggggcatcaccatccacaagtcgcaaggcatgacgcttgatcgtgcggtcatggatctgaagcgcaccttcgcgccgggcatgggatatgtggcgttgtcccgcgtcgaatcgctgggcggactgtatttggctggcgtcaacgaacgcatgttcctcgtctcgcccgatgccgtggtgctcgacggcgacctgcgcgaagcctcggcctcggcttccgaccagttggccgatgaaggtgcaagcgcgttcaaacccgccgagccggacgaattcggtgtcaatcccgatgatgacttcgcccaggacgcgttattctgacggtcgatatatcgaacgaccgctaatttgagtgtttctgcacttcgaggggcggattttgagttttcgggacatctacttccgtttcaaggggctgatgtccaagtagacagcgcttaaaaacggcggaatgacgttggtatgaagccgtttctatgtgcgattgagcggatgaccagcccctcgaaatgcaagtagatgtctccaagaggcggaatcggccccttgaagccgaagaagacactgcgaacttgtcttcattgaggaactgaacggctaccatggaataagaggtggtagttatggtgctatccgagatatttcgtggaaacaatgaggttcgcgaggccgcccgggccggtgtgcaaatcgatacggttagtgtggctagtgcgtcagatgcagcaagcgcggcagacggcagcggcaaaatcactggcgcaatacgtccgccagcggtggctggttcgttctaccccgctgaccgcacaacgctcaagcaactcattacccatcaattggattacagtcgagaggttctgcaacagttggagcccacgcttccagcgggagtgccaaaggctgtaatcgtgccgcatgccggttatgtgtattccggcacggcggccgcgcttgcctatgctttgctcgaacgagggcgggggagtgtgactcgcgcggtaatcgtgggaccgactcaccgtgtggccgtgcgaggcgtcgcctgttccacggcagcggcgtttgaaacgccgctgggcactgtgccggtagacattgcagccgagcgtaaggctctgggcctgtctgtcaatgagccattgcgctccggtacacatgcccgtccgggcgcgtcggctcccgcaatgatcgtcaatggcccaacccacgcacaagaacatgcggtagaagtgcagattccgttcctgcaaaccgtgctcggcccagacctcactattgtgccgttgaacgcgggcgatgccacgccacaagaggcgggtgatgtgttgcgtgctttgtggggtggcccggaaaccgtcatcgtgattagttcggatctctcgcactatcatccgcacgaagtcgcccgcgcgttggatgaccagaccattgcggacattgcggctttgcatctgccgattcaccctcgccgggcctgtggcgcatacccgatcaacggccttctggatgtgttaaaaggccgcaaggacatgaagctcttcgagctcggctgttccacttccggcgacgacggcgtggtggcgcttgccggccaacctcgccccgcaatgcgagacgccgacgagccggtagtgggatatgtctcgtttgccgcgtgggaatccaaaccagaagcagatgctccagccggtgcagatgacttaggcgaatcgggaacagcccatggtgatgtgctgctgaaactcgcccgtgccgctatccgggaacggttgcatatcgagcatccaacagccgccgattcgaccgcgtccattcttgccgcaaacccatggctgaacgagtccggtgcctgtttcgttaccctgaccgagggtggccggctacgcgggtgcatcggttcgctggccgcccaccgctcgctcggcaaggacgtgaccgagcacgcagtggatgccgccacccgcgacccacgtttcaacccggtcaccgccgcggaatacccgttgctcaacgtggaggtatccgtcttgggcgcgcccgagccgattaccgtgaactcctgtgacgccgatttgtgcggtaccggctcgaagaccgcgactctggcatcgctgcaatccggacctcagaccgacgccgtcaaacgggacggcagcaacgtcgaacgcccggtacgttcgcgcactgaacttgaggaagtattacgccccggcaaagacggtctgattctcgccgaccgtcgtggccgcagcgccacattcctgccacaagtgtgggatgagctgcccaatccgcacgatttcgtcgctcacctgctcgccaaagccggtatccgcccgtactacgactggaacgatggcgaaatcgactgtcaacgctacgaggtgaccgcctatgccgagcactaacgcagcaaccatgtcccctcccgctggcgggaggtggcgcgaagcgacggagggtggtcaccgagaatcagagggtggtcaccgggaatcgtgcggtcatacggcgtcagtcacagatgttcgtaaccccgccatagcccgctggcaaacgcaattccacgacggtaccaaccgcgctcgctgcgaactatgcccgcgccgctgcgtcctcaagcccggccaacgcggcttttgcttcgtccgctcaaaccacgacggactcatcgtctccgacacctacggccgcagctccggcttcgccgtggacccagtggaaaagaagccgctcaaccacttccaccccggttccagcgtgctgagttttggcacggctggctgcaattccggttgccgattctgccagaattgggatattgccaaagcccgcagtttcgaccggctcggcgtggaagccagtccggagaaaatcacgcaggtcgcggccgaccggggcatcgattcggtggcgttcacctataacgatccgatcgtgttcgccgaatatgccatcgacacggccgaagcctgccgagcgctcggcattcatcccatcgccgtgactgccggatacatgagcgccgaagcccggcccgacttctacgccgccatggacgccgccaacatcgatctcaaaggcttcaccgaagaattttattggaaagtgaccggcacgcatctggccgatgtgctcgaaaccatcgactatgcggtcaacgaggcacgcacaccagaaggcgaacacgtgtgggtggagctcaccacgctactcatccctggactcaacgatgacgacgctcagctgcatgctgaatgtacatggatacgcgagcacttgggcccggacgtgccgctgcacttttccgcattccactccagttaccgcatgatggacgtaacgcccaccccgcacgagactctgacccgcgcccgaggcatcgccctcgaagagggactcaattatgtgtacaccggcaacgtgcatgatcgtgaaggcgataccacatattgcccaaaccctgaatgcagggccaagctcgtggaacgcgattggtatcgaatcattgccaaccgtttatctgccggatacagtggcaatgggcactgccccgtatgcaggactgctatcgccggacgttggtaatctgcctcaggtcgcccgcgcgatttagcgcagatcgccaatacgcgcggcgatcgtcctcatcgatttgaggctcgcctcatagcgcgcggctgccacaatcagaatgatgccgcccaaagcaagccacacccaccggtagtggcgggagaattcggcccgccatggccacagcacagtcaccgtgctgacgataagaatcaccgtgccgtagatcaacggtgcttgcagcaaacgcacacccacaatcagcgcggccgctccggacaggccgattgttccgggaccgacataggcgattgcgcaaatggtggcatggccattggctgttgcgataccggttgtcgcggaactgccgttgggaattgcggggttgcagcagaaaattgcggggcccatgctgggccggttgatacaccggttgctccgcgggttccggctgattcccctgttgctcggtcggctgcgtcatcgtgccctcctacccttctagccatcattgttgtacgaatgagtccgaatgccaagatgaaggccggaatagtgcgaatagcaggcgggcttgtcggttcacgcgaatatcttggaacacatgacttccaatacccttcgtatgtcaaccatgttcctgcgcaccctgcgcgaggaccccgctgatgccgatgtcgattcggccaagctgctgcagcgcgccggctatatccgcaaggccgcacccggtatctggacctggctgccgctcggtctgcgcgtgctgaacaagatcgaggccatcatccgcgaggagatcaacggcatcggcgcccaggaagtgcacttcccggccctgctgccgcgcgaaccctacgaggccacccatcgctgggaggagtacggcgacaacatcttccgtttgaaggatcgccacgaggccgattacctgctggcccccacccacgaggagatgttcacccttctggtcaaggacatgtactcctcttacaaagacctgcccgtcaccctgtaccagatccagaccaagtaccgcgacgagttccgtccgcgtgccggcctgatccgtggtcgtgaattcatcatgaaggacgcctactccttcaccatcgatgaagaaggcatgcgcaaggcctactatgacgagcgcggcgcctacgagcgcatcttccagcgtctcgacctgaagtacgtacctgtgttcgccatgtccggcccgatgggtggctccgcatccgaggagttcctggctccgatgccgatcggcgaagataccttcgcgctggcgccttccggcaaggcatggaatgtggaggccctgagcactccggagctgccggaaatcgatgcttccaccactcccgccgcttccaaggaagccaccccggatgccaagaccatcgataacatgatcgagcgtgccaacgccgaccacccgcgtactgatggccgtgaatggcaggcttccgacatcctcaagaacgtggtgattaccgtcaagcaccctgaggatgaagagcatgacgagccgtggcgtgaagtgattgtcgtcggcgtgcccggcgaccgtacggtggatatgaagcgactggaagcccagttcgctcccgccgagcttgaggaggccactgaagaagacctgaagcagcaccccgaactggtgccaggctacatcggaccgatggtgcttggcccgcaggccgaggctgctggcgtgaagaacccggttcgctacctggtcgacgcgcacgtggtcaagggttccgcttggttcactggtgccgatgagaacgaggtcgactactacaacctggtgtacggccgtgacttcaaggccgacggcgtggtggaagccgttgaggttcgccacggcgacatgagcccggacggttccggtccgttgagcttcgagcgtggtgtggaaatcggccaggtgttccagctgggtctcaagtactccaaggcactggacctgaaggtgctcgaccagaacggcaaggccgtgccggtgtggatgggctgctatggcatcggtgtttcccgcgtgctggcctgcatcgccgaaacacaccacgacgaagccggcttggcttggccgtccgtgattgccccggccgccgtgcacgtggtggccaccggcaaggacgccgtggcgtttgaaggtgccgagaagctggtctccgagcttgaggccaagggccttgaggttatttacgatgaccgcaagaaggtgtctccgggcgtcaagttcaaggatgccgagctgatcggcgtgccgctggtcgccgtggtcggccgcgattacgtcaacgacggcaccatcgaactgcgcgaccgcaacggcgaaaacaaggtcgccgtgcccgccgccgaagccgccgacgcgctcgccgagcgcttcgccgccctcagctgagtcccacttactcagcctcggcgttaatcgcatcaagcgccattctgcccagtcgcagaatggcgctttgttgtggataaccgaaacttatccacattcttaaaatttcaactgcgtcacagtatccacatttgccagttgcccttgtgcacttcaaacgtcatgcctcacagtggaggtaccgctggggcgtgcaagccggcaatgaagccggagacaggctccggcggtccacatccaaacaacaggccagcaggccgaggaaaggaccgatcatggcaaatcaacaagcagcagtgaccgtcaccggctttgtggccggtgatccgacactaggcggaactgagagtttccgcgtgctgacattccgtatgggcagcacccgcagtcgactcaacccgactaccagacaatgggaggattacggaaccgcatgggtgggcgtcaaagcgttccgtgctttggccgtgaacgccgccagttcggttcgccgcggtgaccgcatcattgtggtcggctcactcatcaccgagcagtggaccaatgagcaaggcgaaccgcgcagtagaaccgttctcgaagccaccaacattgggcatgacctgaccttcggcaccacgtcgctgatcaagccacagcgtgccggtaatggtaacggaggcaatggtggcaacggtaacggcaatgccaatggtgccgccgaaggcatggatggcggaaacgggcaacgagcatcgtcaccgcacatgaggccaacgcaatatagtgtggacggtgccgcatccggtgtgggtatggacccgtatgcgacctcgtcggaatctggccccgtcgaatttggggtcacctccgattccggccaatcgccgtcgccatcaaccgagtcagcggctgcgtccatggccgatgccgtcatgtcgcaaccggacgctggcgctaatcagccacagtccgcagcccaacaaacctacgtcgacggtttcgccgaatcttccgatcccggcgaatccgaattctgagtgccaaccatacatcatgaaaaaccgctgtgttcgcctgtaatcgaggcaagcacagcggttttctcttacataacggggattaccagatgcgtacacggtccttgggtgcgagccacatggcgtcgccttcggtcacgccaaaggcatcgtagaagaggtccacgttgctggcgatgccgttggtgcggaattcggccggagaatgcgggtcgatctgcaggtactgttcggccagctcgtcgcggttcttggtgcgccagatggaggcgtagctcaggaagaagcgctgcaggccggtgaatccgtccatttcgggggcggtatcgagcagtgccttgatggcggcgggggagccgtcttcttcggcgtcgggcttacctgccgccttgccgagcgcgaatgcatacgccttgagcgcgatgttcacgccgcccaaatcgccgatgttctcgccgatggtcagcgcgccgttcacgtgcggcgccttatcaggctcgtcagcgtacttctcgaccagctgcagcggcacaaagctgttgtactgggcgatcaatgcgccggtgcgggcctcgaagttcttgcgatcctcgtcggtccaccagttgttgagcttgccgtcgccgtcatactgcgaaccctgatcgtcgaagccatggccgatctcgtgtccgatcactgcgccgataccgccataattcgccgcatcctcggccttcgggtcgaagaacgggggctgcagaatcgcggccgggaacacgatgacgttcatgctcggctcgtagtaggcgttcaccgtctgcggattcatcagccattcgtccttgtcgaccgacttgccgaccttggccagctgatagccggtctcgtacaggttcgcggccttggcgttctcggcgggcagcgcatccgcggagacactcagtgccgagtaatcgcgccagtggttggtgtagccgatctttggcgtgaacttggagatcttctccagagccttggccttggtgtcttcgcccagccaatcggaattggcgatggacacgcggtaggcgtcaatcagattggcgaccagctcttccatgcggcgtttcgagctttcggggaagtgcaggcgcacatactcgcggcccacatcttcaccgcagacgccgttgaccaggctcaccgcgcgcttccaacgatcgcgctgcttcttggcaccggagagcaccttgccgtagaagtcaaagttggtggtgtcgaagtcgcgagacagggaggaggcgaagcccagaatcatgtgaacacgggcccacagcttaaggtcggccagatcggcctcggcccagaacgcatcaagaccagtgaggaagctcggctcgtgcacaatgacgcgcgcgaacacagacttgaaatcgatcggctgagccttggcggcctcggtggcgtcataggcggtctgccaggcgtcgatccaggaaccgagatcgaagttcttcagcgtggcggccaaatcggcgtaatcggtggggttgtaggtcttcaccgaatcgcgcgtggccacattgtcccaatgattggcggcgatcttggtttccacggcaaggaagtgtcgggccatatcaagtgcggcttcgctgggaaccgtggtgggagcgttgctctcgtcatcgccggtgttggccggcagttcatcgccaccgttggattcggcggcgggcgcgtacccggcgttcgccagctgggtggcgaccattgccacgtatgcttcgcgcacggggacgtagtggtcctcacgatagtaggcttcgtccggcaggcaaaggccggcctgctcaaggtgggcgatattgcggtccgggtcgccggggtcgccgtaaacggccaagccgaacaggtcggggccgccggctgggttgatggtgccgagcacgcgcgtgagagcggccttgtcgatggcggaatcgatgaggtcaagctcatcgcggatcgggtcaaggccggcggcctcgatggcgtcggtgttcaggaacgaatgatacagagcctgcgatttggtggccgggcagtcgtcggcgtcgaggatgtcgcgcacttggttttcggcgtcttcggcgagcttgtcgaaggagccgtagcgcgaacgatcgtcgggtaggcggtaggtgtcgatccatgggccattcacgtagcggaacaggtcattggtcggcttgatgacggaggagaacgatgccgggtcgatgcccgacgtcagcgtttcggtttcgttggtcatggccctaagcctaatcgcggcgggggagaagcgttggtgatgcagatattgcgttatgggtattgcgctgtcagtgaactagacggattgcctaactgtagtgatggttcaaattaggtaacttgcctaacatggtatgtggaacctgaatatggaccttgggttaaggagttacgatgagcaatccaaacgagggtcagtggaatggccagacgggccagcccaaccagagccagccgagccagccgaatccggcgggccgacctggccaaccgcagtatggcgcgtatgacagcaatcatggcggccaatatcctccgcaaggtgcgccgggagcgcaagacactcagaatcagcaggcgcagaacggccagccacaaggcggaccgaaccagaacccgtactacggcccgtacgcctacaatccgaactatggcccgaacggccagccagcatggggtccggacggtcggcggtatcaggcggacggccaatcgaatagccaagcggacgggcagccgaatggttcatggggcgatcaaagtcaacccggctggcagcagaccaactggtatgtcggcaatttcagtccattccacctgatcgaggaatggctgccggaaaaggccaagaccaagattcgcatcatttacggcgtggtgggcgtggctgccatcgccttgggcgctgcgctgttgttggtgccgaacaagacgctggctttggccgcattgttgctcggcgtgtatttcgtgatttccggcgtggtgcgcatcgtcagcgctctcgtggagccgggtctgccgggcggctggcgtgtgctggacgtgttcgtcggcattctgctgaccttcggaggcgtcgtagtcgtacgaaactacggtatgaccggtcagaccttggcattactcatcaccctgatggtcggtttcggttggattatggaaggcgtgatggctctagtcgaatcatggcgcatcccgcgctccggctgggccatcgcctatgccatcatctcgattatcgccggcttcgtggtgctgatgagcccgctgagctccgccgtattcatgattatcttcggcggatgtgccatggtggtgatggggattacttcagtgattcgcgcgttcactttcggcaagcgtcgcaagtaatctcgcgctccagacaatcaatctccggacaatcaatccaaagcgcccgtgcaggttatgtatctgccgggcgctttttctcggccttggccgttgataggctactagcggaccctaggcagaccacgggtgatgctctggcggttgaccccgggctgggctagagttgagaacaagtctcaacaaggtagaaagaacctcatgatcgaattgaagacccctcgtgaaatcgaggaaatgaagccggccggccgtttcgtcggcggcattctgaaggaactgcaggagaccaccaaggtgggcaccaatctgctcgaaatcgacgagttcgtccacaagaagatcgtggaccgcaagggcgccgaatcctgctatgttgactacgctcctgacttcggcaccggcccgttcgcccactacatctgcacctccgtcaacgacgccgtgctgcacggtgtgccgtacgattacagcctgaaggacggcgacctcgtctccctcgatctcgccatctccgtggatggctgggtggccgattccgccgtcagcttcgtggtcggcaaagacccggaccccgaagacctgcgcatcatcaagtgcactgaggaagcgctcgccgccgccatcgacgtggccaagcccggcaaccgtctcggcgacatctccaacaccatcggcgacgtcgcgcgcgaatacggctacccgatcaacctcgagttcggcggtcacggcgtgggccacatcatgcacggcgacccgcacgtaccgaacgacggccgcgcccaccacggctacaagctgcgcgaaggcctggtcatcgccatcgaaccatggttcctcaagaccaccgacgagatcttccaggatccgaaggacggctggaccctgcgtgcctccgacggctcgcgcggtgcccactccgagcacaccatcgccatcaccgagaacggcccgatcatcttcaccgatcgcaccaacctctgattggcgtttggcgtatggcgggtgtctgattgacctgtgatgggcgatcggtatctcatcaaccgtctatatgtttgcggttttcccgtgaattcgagacgtaacaagccgaagtgcgtttgctttgatagcatgagcgcacttcggctttcgtgtatcgaccggtgtctgccggcggtaacacagaagacatagagtaccgaacactagcgttcgcgaacgcgtgaacgttaatgtttggggtaagtggttcatgaagaggaaggcgcgcgaatggcaacggcacaacttgatgtcgattcgaacaagttcaacctgcccgtggtgaaggctagtgcagggccggatggcatcgtcgtttccaagctgcgcaatgacggctgggtaacgctcgaccccggattcctcaccaccgcacagtgcgaatcgaaaatcacctacatcgacggcaagcattcgatcctgcgctaccgtggctaccccatcgagcagttgtgcgagaactccgattttctggaagtggcgtggctgctgcgccacggcgagctgccgagcagggctgagtatgagcagttctgcgcggacatcaaccacaagacgatggttggcgaagacttccgtaccttcatgggttcgttcccgcgctccgctcatccgatgagcgtgcttgcctccgccatcaatgcgctggccacgttctatccggacaccaccgatatctccgacaccgaccagctcgatgaggccgccaagatcatcatggccaaggcccgcacgattgtgtcgtacatcttccgccgtcgtcgcgatgagccgatgctgtaccccgattacgcgcgcggctatgtggacgacttcctgcgcatgtgcttcgctgtgccgtacgagccgttcgaatctgacccgttgtatgtgcatgctttgggccgtttgctgattattcacgccgatcacgagcagaactgctcgacctcggtggtgcgtatcgccggttccgcccacgccaatctgtattcggcggtggccgctggcgtcaatgccctgtccggaccgttacacggtggcgcgaatgaggccgtactgcgccagctgaaggcgattcgtgattccggcaagtctgtggccgagttcgtgacggatgccaaggagaatggccagaagatctccggccttggtcaccgtgtgtataagtcatatgatccgcgtgcggcgattgccaagaagtatcttgagaagatcatggagcgcgaggatacgcagaaactgccgtccgatgagcgtgcgttgttcgatgtggccaccgagcttgaggatattgcgttgaacgacgagtatttcgtatcgcgcaacctgtatccgaacgtcgatttctacacgggcttgatttatcgggcgatcggcttcgatccggccatgttcaccacgctgttcgcactgggccgcattcctggttggattgcgcagtaccgtgagatgctggccgacccgaacaccaagatcggccgcccgcgccaggtctacaccggtccggtcgagcgcgatttcgtgccgatggacgagcggtgattgttggtttgagaaagcgcctcgctggagatccagtgaggcgctttctatatgtacagcgcaaaccagctatgctgcgacggctgcataagaacgagcagggctagttctgaaattgaaataatgtgtgcggtatcgaagcgcaccgagggaaggcgtacggaagtacgtcgaccgaggagcaacgaagataacgctccattatttcaatttcagttcttgtgcagcttggcgttgagctcaattcccaccttgcggtagcgggcttcgatacgtccattcaccgagttgcggatgaacaggatgttgtctttgccggagagctcagcacccttgacgacttcgagcggctcgccggctgcggccttggccttgtcccagatgctgatcttggtgccggcggtgatgtacagaccggcttcgacggtgcagttatcgccgagggagatgccgataccggcgttggcgccgagcagcgagtgctcgccgatggagttgcgcagcttgccgccgccggagagggtgcccatgatggaggcaccgccgccgatatcggaaccgtcgcccacgaccacaccttgcgaaacgcggccttcgaccatggagacgccgagcgtgccggcattgaagttcacgaatccggcgtgcatcacggtggtgccggaagataggtaagcaccgaggcgcacacggtcggcgtcgccgatacgcacgccggtgggcactacgtaatcgatcatgcgcgggaatttatccacaccgaacacgttgacggtggtggcaggagctgcggcaggcagtccggcctgagcagcgaaagcgagagcggcttcggtggaggcgcgttcgacatcggccttgcgtagtgtgaagtcctcaacggcgaaaggaccgtagttggtccacaccacattggcgagttgggcgaagatgccgtcaaggttcagcgtgttcggcttggccatgcgcatgctcatcagatggagtttcaggtaagcgtccgcggcgttgctgatcggctcgtccaactggctgacgacgaataccggcacgcggcggatgccacgggcgtcggcttcatcgtgagccagagtgccgaaattgtggtttggacgatcggcctcggccggtgcctcaccgagattcagttcggggtaccagacgtccagggtggtgccggcggcgtctacgctggccagaccccatccccatgcggtacgctcttcgctcatagttgctccttacatatcgttgcgtttgcgttgcatgtgcatcgcggcatgtgatggttccaccttagcgtcaagtacggctaggcgggggccatagttcgtggaatggcttgaaatcgagttgttcggtaaaaaattaccgaatgtgattggcgatgggatgataggttctccggtgaaattcgctggtgaacaactcggcaaggaggtgtgcgatgtgatgctgcatcattcgggagcataggctgtggccatgcgacgcccggcatcatagagtttgcgcttgagcgaatcgggctcaagaatcactacgcggccatcccaggaatactgcaatgcccaccagaacacggcgcgttcgggagcatcgacgatgacttcgaactgtgtgccgtccggcgaatgtttgatctgagggtcgtcgaaccattcgaacacattgttgagcatggattcgtctcgtacggccatgcggatgcgaatcggggcatcggctacgggatacgggcggtgacgcatgaagttcactgcgtcaaaatcagccggcgctggtttttccagtggaactgtgccgttcctgcctttggcgctgacgttggcgattcggttgaccacgaaaatgcggagattatcctcgccatgtagatggcagatgaggtaataccgtccgttcttgtacaccatctggtaagggtcggcggtgtaggtaattcgacctgcgcccgtacggcttttatgcggtatcagggtgccgtccgggccgtaatcacggtattggaaggttacgccgtggccttcttcaatggcctgattcagttggtcgatggtggataggaactcgccgttgatatgcgtgtaggtggccacgtgctcaagataacctactgcttgcccagcggcacctgcgagttcgcggattttaccgatgagatcgtccatggtgtcgaggctgatgcgagacaaggtgaggctgtcgagtagcagtcgcatttcggcggtggataggaatgcgtcaagataccagccgggttgtggattcttgcattcgatgccggcaaggtcgctttcggtgagatgcccgatatgtctgccgagaaattccgtggaggtcagctttttgagctggtttcgtatggtcttctcggtcggcagctcgcttggatcttccagctggtgtttacgggcaagttcatcgagtatttgccgcacggtcaggccatgtccaaagtagctgtgacgccacagcacctcgaagatttcgagggtggtgttccctgcataggatttgcgttgcgccggcttgtctgcatccatacattaaggctaccgcgcgcctcgtctaggatagaagtgttggactgaaatgcattcgctggaaaggaggctcgcccatgagcaaagggtatggtgtatttggccatgttcccgataatgcggatgacgatgacctcctgccttatgaggatgatgattccggcgtttcctggggccatgcgttgcgccgtcgcaatccttggaaaaggggaggcgacgaaggtgccgattacgacgatgatcggtatggcgcagatgacacagatgacactaatgaggacaggggtctctttgccggcaagagcagcggtataggcggtatctctggcgaggcagatggaatgcttggtggcgcaggcgctgccggcagtagagccgtaacgtttggtggaacggacagtttgtccgccgccgatgcggttatgccctatcgtttcaggcaaggacgttccgtatggttcgaagatgaggacgaaggccatttcgccggggctgcgaagcgtgccgaagcccatgccgtccctatccttgcgttacgcaacgatgtggaatcgtcatcgtcgaatgccgtgctcgctcgtgcccgtagcattgcgcgcaaagcggccaccatggttatcaatccggtatacagcgaaaatcatcgaaccgggtatgccgagcttgacggtattctacgtggcaccaccagcccatcgagtaggtatcgtaccagcgtgcaattcgacctcgatacgggagaagccgtcggtggcaagtgctcatgcccggcttacggccgtggctatggcatgtgcaagcacatgattgcgctcgccttcatattctgcgatgatccgcagcgttttgaagggtaccgtgccggggctgtgaggccgtctcggacgctgatcgactatatggagcacgtcgataggcaagatgctcaagccaaagcgcgtcgccgcaatgcgctcatgcgccgattcgatactgcaaaaagacgaaatggcgcaggtggacgacgtacgaatagcggatacggctctcgtgccggcacccgaggcggcgggtatcagggcgatagtgagactgtgggcttggggcaggtgcagcttgttccgatattgagtttcatcgatggcgtgtggagcgtggagttcaagatcggatcgacttccaatgggtccagctatgtactgaaatcgattccgcaatttgtgcttaccatggcgaacggcgactatacggattatgggcagaagcttgcctttacccatacgccggatatgttcgacgatgattcgcgcccactgctgggcttccttgacgacgcgatggccgtgcgtcgtgcggccgagcagcaggaccggtattacgggcatatcgccatcgatcgtcacctgacactttcagcaccggaagtggcccggttgctgtccgtacgtgagggcagaggcgtacagctcgtgttgaacacatggttctccgggcagcctgcatcggtgccggttgatggtggcgagccagattttcttatgcgcattgcgcggcgtgatttcaatacgtatggtccggatgccggatacctgcttgccggagtgccggcggtggaaaccgtgattgatggtggcaaggatgtatggctgttgctcgcctccactaatccggccggtgcggtatccgccatgatggcgggctctcagcgtaaaagcgcagcgggatgtcgattcgtccgttgcccgaaacgattgattccgttgcgaggactattgggagacctgtttgaacccgatggcgaggggcaggtcattgccggtgatgacatcgccctgttcgcacgcacgctattgcctcagctggttggtgccggactgttggaggccagtgagattcctcgcgagctggctgaattaagtcctacggaatgcagcctccagttttatctggatcgtgatgagcatggtgtgcaatgcgaggtcaaggcacactacggcgatgccattgtcccgttgctacccgatggcccgacggtgcatgctgaggacgagcgctccattcccttgtctcggggcgtgattgggcgtgatttcgacgctgagcatcttgcgatcgatgtagtgcgtgaattctttaccatgcctgaccagcgcaagcgcgttgcggccgcctctcatcagacggtgaatgggtaccgaacgccggccgcgcgaaaggccgccaaacaattcgtgcctgatgcggccactatcgatctcgatgacaccacgcagattgttcgtctttttgacgagggattgcccgcactgaaggaagtaggggaggtcttcaccacaccggcttttgaccggctgatcgcgcccaagccgccaagcgtcaaagtcggattgtccatcaa

SEQ ID NO: 176 - DNA, 21009 bp, Unknown
  R101_18m  MAG No. k141_
cggcttcacgctggacgacgtgaccttcgacctgcccaagggctacatcatgggactgatcggcccgaacggcgccggcaaatccaccctcatcaaactcatcctcaacatgatccaccgcgacgccggttcgattcacgtactcggcctcgacaacatcgccaacgaggagcccgtcaaagaacaactcggcgtggtgttcgacttcagctacatgcatgaacagtggcaagtcaagaacattgaacgtatcgtcgcgccactgtatccatcatgggacggtggatgctatcgcaagtatctggatactttcggtcttggtggtgcacagaacggcaagaaacatatcaaggatctttcccgcggcatgcagatgaagctgatgctggccatcgcattgagtcatgatgccaagctgctgattctcgacgagccgaccagcggactcgatgtgcttgcccgcgacgaactcatggatatcctgcatgcctacattgaggatggcgaacattcggtactgttcagcacccatatcactgccgacctcgaacgtgctgctgacttcattacctacatcaccgatggccgtctctactacaccggtccgaaagacgagtttgaggaatcgttccgcctgattaagggcggtccagacgaactggcacaactgcctgcggacgtggtgctgggctcacatacgtatgccaccggattcgatgcgctggtccggtcagacaggcttgatgctgttgcgtcggtggtttcggggcttgtcgttgaatcggcttccattgatgacatcattcgactgaccaatgcccatgattccaatcgtgacttgagcgggaggtgagcggccatggaggcaatactgagggtgtcgcggtctcggcaacatgcattggccactgcattgcgcgtcgatatggcctacctgtgcgtcggcgaacggactgtgttctcgttgttgttggcaccgttgttctccgtcatctttcaaggtgaagcttatggggatggcttcggctatcgcatgggtgtcatcatgacggtattcacctgcgccatgtgggtgctgaccatggcggttgctgacttacagaacggatatcgacttcgtggcattattccggcttcgaggaagagtcaggtggccgcgcgatatgtggttggattggtgatttccgtattgtcgatagcgatgattgttctgattgacgggttgcaagtgctggtcaatccggattggtcattcgcgggcaatctgtgggcggctccgttgggaggtttctgcaccgcgctgatggtcgcgcttatcgtgcccacgggttatctgtggaccaaactaggcggtcttcaagtcacgatgatggtgatttatgtcgttgtattggctggattcatactgctatctattttgcctgcttcggtgaccaaaggattggcccatgccgcgaatgccatcatcgcgcaacgattgtggctggttattgcggtattggcaacgacggttgtggcatatggaatctcgtatgtaattgcctctcgcatatttgcttcaagggaatggtgacgatgagctggaaatccgtagtaaagcaatgtcgattcgattgtgtcgggacgggtctgtttagcgtggcgaatatggtatttctgctggttttcccggtgctgtctatcgtggtatcgctggtgatgatatcgacccacgtcgatgaacacgttgccagtggtctgatgggcggactcggaggtttggcatcgacgatggcatgtatgagtgcattggggcctgcgtcatccgaggaatctgcagggcacagtgccatgcgagggctgattcctgtttcacgcactgcacaagttgtaggtcggtacctttttctgttggtggttggcctgctctgggctttggacgtggtgatatgcggcggcgtcttcattgtctttggcgatatagcagatatggggtggatcggtaccttggcagcaggtgctttcatcttcgctttggctatcattcttgggtcggtgctgctggcctgtgcataccggttcaccttccgcaagatgatggtggcctctggcgtggtcctggttggcttgtatgccgtcattgcgctgctggcccgattgcctgttgactggcaatggcttttgctgaatattaccgatttcctgacgatctggtggcatacggcgcttgttctcgccgtgttgtgtctgctcgcatattttggctccatgcttatagccatccgcctctatcgggccaaagaactctaaccgcgcattcgtccgacagcgatgatcttcagccacatgtcgatcggcagcggcacggtgcggaacatcgctccgccgaactgcaccaccagcacctgaagtgcgaacatcagcgcgaacacgccgatcatcaccttattgcgtagcagattggcgaacaggctggcgttgcccagctcgcggctgttgaaggcgttgaacagctggaatactacgaacagcgtgaacagaatggtcgactgctgttcggcggtgccgcccatgaagttcgtccagcttcgcgagcttctcctgcagcggcgtcataccggtgttggcggctttggcgctcggcacgctttattgcggtttgggccgagcccttcgccgcaatgctgtctactccctcatgggactattcagttgcaggaacagaatctgacaagccacatggattttcccattcgccggcagcatggcgattcccgccttcctagaaaattcaagcaacacgccgttggcccattgccggatgttcaaccgagattcgcatatcttgactcatacggcaaaactgttatatttgatgtagaacaaatggaacagttcttgagaggggtggaattgaccgtgattgtggaaatcgatcagcgcagtgacgtgccgatttacgagcagctgcacaggcagctcatcgcagccatcgcgggcgatgagctgtcgccaggtgactcgttaccgtccgtgcgctcgctggccgtggaccttggcatcaacctgcacacggtgaacaaggcctatgcgctgttgcgtgacgagggatacatcgttatgcgtcgtggtgccggtgcaaccgtcgccgagcatgacggcgggggagaagcaccgaaccgaactgccgaagcacaggatgagcggatgggcgaggaactctatcgccttgccttggcctacagggcgcgcggcggtgattcggccgcattcctcgatgccaccaaacggcaatgcgaacgggcatacggcgtgcgctcctcgcagagcgttactgacggtgcaacaaaaggaaatcaggggagataacgatgaataatacagtcgtgtcgatgaacatcgcgttgtgtgcgtttttactgttgccggtgatagtgaccgccggcctggcaggggttccatgggttaccgaccggcatgaggtgttcggtgtcacagtgccggccgccgcccatgtcaatacgcgcattcgcggatttaaagtcgcgttttcgggaattacggtggcgcttggcgtatgcgccatactggtctcgctggccgtttggcaactctgcggagtcgacgcggcgttctggactgtgtccatcgcagcggtggcgattgcgatatgtggtttcgtgctgcagcagatgtttcgccgcaaagtactatccatcaaagtcgatcagggatgggaggcgtccagtgcccgccgtgcagcattgataggtgagcgggacaatcccgacccgatgagcttgaagtgggaattgctgcaagtcgtttgtctcgctgtcaccattgctgtcgggttgctgggctatgaccggatgccggagcgggtgccgattcatgcggatatcgccggcaatgtgaacggttgggccgagaagagtccgatggtgatttggtacgccgtgctcgcgcaggtggtgctggcagcggtgatggtggccagccatgccgcgatcatctacgccaagcacccgattgatcccgaccaccccgccgccaccgggtatgcctatggtgtgttctcgcgggtctggagcatctacgtgctggtcatcggactgctgacagccggtggattgggcctaggcgttcagcttgtcaccattggcgtgctggatatcaatctaatcggcatcatcggcatgttcatcgccgtggcggctctggtcggcgcgctgatgatcggcgtgtattacgggcagaacggggcgcgcgtctatgccggtgttcggcacagtgacggcggtgacatttcggacgataatgccatgccgtatgacgatgacctgcactggattggcggcatcatctacatcaaccgtgacgatcctgccatcatgatccccaaacgtttcggcgtcggctggaccgtcaacctcgcacgccccagcgtgatcatcggcactatcgtgctgttggcaatcgccataggactgccagtcgccgcgatactgatgtaaacgcaattctgatgtaaaaaatggctccccgctctgaggggagccaatgtgctggtatgttttacagcgcctgggcggccttctccacgtagtcctccatgccgtcgatggccacgacgtccttgaaccgcacgtcggcggtctcaagaccacgcagggcggccggggcggtggtgccggtctcgtgggccagcacatccatgcactcgaagtcggtgccggtggcgtcgaagcccagagcctcgttcaccacgcgcgggaacttgtaggggctggcggtggagagcagcacgcgcggggtcagcgggtcgcgcggcatctgctcaagcaggtagtagccgcaggcggtgtgcgggtcgatcacgtagtggttctcgtcccagcagtgcttgatggactcgcgtacctgatcctcatcggcccaaccggtgccgaagatctgacgaatcttggccagcagttcttccgggatctcgtacgtgccccacttgttgaggtcgttcatcagcatggagatcagacgggtgtcgccctcggacaagtagtacagcatgcgctccaggttggaggagatgaggatgtccatcgagggggagatggtctggaagaacgggcgctggcggttgtaggtaccggtggtcaggaagtcgaacagcacgttgttcttgtcggaagccaccacgaggtgcttgaccggcagaccgagcagcttggcatagtagccggcgaggatatcgccgaaattgccggtcgggaccacgaactcgacctcatcgccgacattgatcacctggtcggcgagcagctgggcgtaagcggagaagtagtagacgacctgcggcaccagacggcccacgttgatggagttggcggaggaaagcaccacgtgcgaattgccggcgagacgctcggccagggcacggtcgccgaagatgcgcttgaccgcggactgggcgtcgtcgaagttgccttccacggcggccacctgcacgttggagccggcctgcgtggtcatctgcagttcctggacctgggagaccttgccttccgggtagaagacggtgatcgcggtgcccggggcgtccgcgaagccggccagcgcggccttgccggtgtcgccggaggtggcggtgaggatcatgatcttctcgtccgcgtcgccatcggccggcgtggtgtgcgccatgaagcgcggcaggatctgcagcgccacgtccttgaacgcggaagtcggaccgttgaacagttcgagcacgtaatcgtcacccaggggcttgagtggggtgatgcgctcatcggaccactgttcgccgtaggcgtcggcgatgcactggcccagctcctcggccgtgaagtccggcagcagcgcgcccagcacctcggcggcgatctgctggtacgacttgcccggcagggaggccacgtccaccttggtcttgcccaacgcgtccgaaacgaacaggccgccgtcatcggcgatgcccttacgaatcgcctgcttggcggtcagcgaatcggtggtgctgcgggtggaatggaaggtggttgtcacgatgaatccttctgcctgaaagggatgatgaatccacaccagtttagcgtgggccgtgggcagaagggccgtccgtctcgcgtagccgaccggtcaaaccggcgaaaatcaccattgccatcgaacggggaccggccatatcatgaaacaggccggctacaaaccggccatacagtaaggcggcaacggcgaatcaattgtcgcccataccaaaggagcacccatgaccgcttcaccccttgcgcagaaagcgaccgatgctttcaacgcgccgatctgcgaaaccgatcctgagatcgccgaactgctggactccgaactgggccgccagcgcaatggccttgagatgatcgcctctgagaacttcgtgccgcgagcggtactgcaatgccagggctccgtgctgaccaacaaatacgccgaaggctaccccggccgccgctactatggcggctgcgaatacgtggaccaagtcgaaaccatcgcccgcgaacgcgccaaggccctgttcggcgccgaatacgccaacgtccagccgcactccggtgcccaagccaacgccgccgtctaccaggcgctcgtcaagcccggcgacaccgtgctcggcctggccctcgaccacggcggccacctgacccacggcatgaaaatcaacttctccggccgcttctaccatgccgaggcttatggcgtgaaccccgagaccttccgcatcgacccggaaatcatccgccagcgtgcgctcgaaacccacccggccatgatcatcggcggttggtccgcctacccgcgcatcgaggacttcaaggccatgaaggagatcgccgacgaggtcggcgccaaattctgggtcgacatggcccacttcgccggactcgtagccgcgggcctgcacccgagtcctgtgccgtacgccgacgtagtctcttccaccgcgcacaagaccttcggcggcccgcgctccggcttcattctcgccaagcaggaatacgccaagaagctcaactcctccgtgttccccggccagcagggcggtccgctcatgcatgtgatcgcgggcaaggccgtgagcttcaaggtggccggcacccccgaattcaaggaccgtatgcagcgcacgctcgacggcgccaagatccttgccgaacgactactggccgatgacgtcaaggccaacggcatcagcgtgctgaccggcggcactgacgtgcacctggtgatggtcgacctgcgcaacagcgagatggacggccagcagggcgaggatctgctcgccgcctgcggcatcaccatcaaccgcaacaccgtgcccttcgacccgcgcccggcctcggtggcctcgggcctgagaatcggcacgtccgccctggccacccgcggcttcgggccgaaggaatacgaggaggtggccgacatcatcggcaccgcgctcgccgccggaccgtccgccgacgtgaccgcgctgaaggctcgcgtcgacaagctcgccgaagacttcccgctctaccccgacctggaccagatccactgatttgctgattcactaatccaccgtggtgtaccggttagtgatgattcgctgaccggagcgcatcacgtcaccggcttcccgcctgagacggaggggagccggttctgtttgcgattcaaaatgtcagacatcccataacaagcgggtcggagtaagcaatcagccgcgttgtgagttacgcttgactgttatgagcgatgaattgagtcctgaggtgttcgacgcggtgtgccgccaggccgatcaggccgcacgcgcgcaggagcgtcttgcacaggcaaataccgaagccaaaaacgaactgctgctcgccattgcggatgcgttggacgggcacgccgcggacatcgaagccgccaacgcgctggacatgctcgaatccaaggaaaacggcatggatgcgggcaagcttgaccgcctgctgttcgacgtgccgcgcgtggccgccgccgcccaaggcgtgcgtcatgtggccaccttgcctgatccggtcggcgaaatcgtgcgcggatacaatctgcccaacggtctgcgccttacccagacgcgcgtaccgatgggcgtcatcggcatgatttatgaggcccggccgaacgtcactgtggacgtggccagcctgtgccttaaatctggcaatgccgcgttgctgcgaggcggtcacgccgccgaacgcaccaatgctgccacgctgggcgccatcgccccggtgcttgaagcacacggtttcgaatccgcactggtgcaatccgtcgaccagtacggacgcgccggagccaccgccatgatggaggcgcgaggccatatcgacgtgctcgtgccgcgaggaggagcgggtctgatccaagccgtcgtgcgcaactccaaagtgccggtcatcgaaaccggcgccggcaacgtgcatatctacatcgacaagtccggtgatctcgccaaggccatcctgatcatcatcaacgccaaaacccagcgcgtgggtgtgtgcaatgccgccgagaagctattggttcataaggatgtcgccgccgaattcctgccgcagatcgccgccgctctggccgaggcgaacgttgtactgcaggccgacaccacgtcgtatgacatcatctccggcgcggcgatcgagggccttgacctcaaccacgccaccgaggaggattgggacactgaatatctggccctcaagatgggcatcaaggtggtgccggatctgggcgcggccatcgaccacatcaacacgcattccacgggccacaccgaatccatcatcgccgaggattatgcggccatcgaggaattcgccaagcgcatcgactcggccgtggtcatggtcaacgcctccactcgcttcaccgatggcggcgtgtttggctttggtgctgagcttggcatttctacgcagaagatgcacgcacgcggtcccatgggattgcgggagatgaccaccaccaagtggatcggttacggaacaggccaggtgcgcgcatgaacgaggacggcaacatgaacactacggctgacacggcaaacaaggcaagcgaactgcggcccgacatcgacctcaacgatcccaagctcggcctgaagatcgcggccgaacggctcagcatcgtccgctatgtgttcctcgtgcagattgaggacggcatcgcctccgccgcccagcgtgcgtcgctcgaatacgcggacgccgtgctcatcggctggcccgagaccgattcacccgaagtcgtggacctcaacgatgcccagctcaagatcgtgcgcgaacacatggaactcatggaaggctacatcggcaaatacagccagatggagcacgacggcgacctcgacggcatgaccgacacgctcatccgcatcaccgagcgcgtggccgaggtccgccgcctctaccagccggacttcccgctgcccaccttcgccgagattcgtcgcgtggtccaagacgaatgggatgaagacatgggcaagatcgatcccaaggaagacaatccctccgccggcgaaatcgaagaggaaaccgaatcagccgatgacgccgccggcgagggcggccaggcatgagtggtgttaccggcagccacaaaacggctgcgtcagttcagtccgaaaaaacagtggaatccgccgagcccgccgaaatcattgccgtcacccaaggcgaaaccgaacggcgcatgtccgacctgtccgtaccggccggggccagcagccacggcaaaggcaggctttccgcacgcggcaactggcatacacgcctgcgcgtcggcatcatgggcggcacgttcgacccgatccacaacggccacttggtcgccgcctctgaagtcgcctgggtgtatgacctcgatgaggtgattttcgtgcccaccggccgacctgtgttcaagctggacaagcacgtcaccaacgccgaggatcggtatctgatgactgtgatcgccaccgcatccaaccccaaattcaccgtctcgcgtgtcgacatcgaccgtccgggcgtcacctacaccatcgacactctgcgcgatatccgcgcccaacatcccgacgccgagctgttcttcatcaccggcgcagacgccgtggccgaaatcatgcagtggaaggacgccgacctcatgtgggacctcgctcacttcgtggccgtcacgcgccccggctactccagcccggacggcgtgaccttgcccgaaggcaaggtcgatacgcttgagatcccggccttggccatctcctcgaccgatgtacgccgccgcgccgaacacgacgagccggtctggtatctggtgcccgacggcgtggtgcaatacatcggcaagcatggtctgtattcgtacgaggactgatgattcgtacgaggactagtgtgcatttgtacgagggctggtgaggattagcgcgaatcagcgcgcatcaatcctcgccagtgcaaggatgaacggtcaggccagtcccatcttgattttcaatgtcattacgcgagtcgtcgccgccgtcaccttcgaagcgaaagccggatcggacttcgcccgttcgttgaggccgtccacaattggctttacataatccgtctgaccgatgcaggacatgtcgccgcccgcctcgacaagatttactcccaattggcttacatcgtagctgcttaacgcttcggcagatatcgaatccgaaatcaccacgcccgtatatttcagggcgttgcgaatatggccgtcgataatcgtagaagaaaacaccgccggattattcggatcgatggattgatacgtggccaacgacatcatcaccattgcaggatcggccttggtgatcgcctggtcaaaggcacctgcctcggccccgtccaacgtggtggtcgtatccagaatgccttcggtggtgaagtcggtattgccgcttaccgcgcccaacccaggataatgtttgaccgccgcaccgacctgagcgcctcgcaaaccctcaataacggcgatgccatgctcggcgttaccggccgcatccaatccgaaatcacgatccagcgcgccaatcggagcatttgaggcacgatcgcccaccaccgtgccgagcaccggtgccaaatcgacatttatgccagcagcagctaattgcgaaccccacgtgcctgccgattgacgcaatgcgtcagcggacattgtgccctgctcaacggcactgggcattgtgtcgaaaccggtaccagtcagatgctgtacctgaccaccctcctgatcggtggcgatgatgagacgattgccggccggcgcatatccttggagttgcgcggtcgcggtcttgaccgtatcgacgccggtattccaattgccaatgagaatggccgagccaatgtgctcgtcggcgattgttgaagccaacgaggagggttcggaaccggcgaacaacggcaccatcactaactgtcccacacgttcctcaagcgtcatggcggataccgcacgttgggcttgtgccgccggatcgtcgttcttcttcggggaaggaacgtcggtgcgcggtaacgcactcgtctgggaggtctggggagtggtggtgttgccgtttgatgtggatttggcgaaccatccgacatgccatccgtagactgccacaccggccaacaccaccgccaaagcacatattgccgccacgattggaatgctcctgtgccgaagttggcgtgtggcgtgtgctgagggacgcatatgttgtggccgttgtctgtccataccggcaagcgtagaacagagcgtagaacaggatgttgcctcattctgtgctcagggcataaccgacctcccgccctttcgataggcttgagttatgtcttttaacgatcctttctcagtactgttcggcaatggcggcgattcacgacgcaacaatgcgaacaatgacgatccgatcatcctcgatgtcgaggccgatggggacggtccggcccacaacaccaacgctggcccctccgggtcatcccgccctccacgtggtccggccaatccgcgtatcacccgtaagccagcgtccggtggctcaggagccagccgtggcagcaagattctgatcggcgtggtgctggccttggccatcatcgtcggtctgttcttcggcctgtcccgattcatcaccgatctgatgtggtacggccagctcggcttccagtccgtggtctggacccagctcggggtgaaaatcggtctgtgggtggcctacgcgctgctcatggccctgaccggcttcgtttccgcctggctggccattcgagcacgccctgattcggccgacggttccaccattcgcattaacggcgatgtggtcgaggtcggcaaatccgtcagctcgaaaaccgctcgccgcgtggccgtggtgatttcgctgatcgtcggcgtcatcttcggttcccagtttaacgcgaactggagcgagattctgctcatgttcaacgcgcagtcgttcggcaccaccgatccgcagttcggtctggacaacggcttctacgtgttcgtgctgccgggcctgaagctcgtgctcgccgccgtggccatgctgctgggcgtgggccttgtgttttccgtggtcacgcatgtgctgatgggcggtatccgcattaccatgccggttaacggacgcggcctgttctccattaccaagcgttgccgtcgccagcttggcatctggctgatgctcaacatgttcgcttgggcagtgcgccagatgattggcgtcttcgaccagctcaccgtgcagggttcacgcatcaccggtgcctcctacaccgccgtacatgccaacatccccgtcaccttcatcatggccgtgctgaccgccatcctcggcgtggtgctgggcatctggctcatgcgctcccacacgctcgaaggccaggcgtccatcggcgtgcgcgcttccgccgcgctcaaggcctggcgtgtgccggtgacctccattgccgtcgtggtcgtggtgggtcttgtactcaccgtggcatggccggtgctgttgcaacgcttccgcgtcaacccgaacgcacaggagatggaatccacctacatccagcgcaacatcgacgccacccgcgccgcctacggtcttgacaagctcaagaccgagcaatacaaggtgaccgacaagggtgagcagggcgctctggccaaggaggccgacaccaccgcgcagatccgtctgctcgacccgcaggtcgtcagccccacgttcaaacagttgcagcagtccaagcagtactacaccttcgccgacaccctggcggtcgacaagtacgagattgacggcgtctcccaggacaccgtgattgccgcccgcgagctcgatctggccggcaatgacaaccgcaactgggtcaatgaccacaccgtgtacacccacggttacggcgtggtggccgcctacggcaacaaggtgaccgccgacggccagcccgaattcttcgaatccggcatccccacccagggcaagctcaccgaatccgaaaagtacgagcctcgcatctacttctcgccgaacaccaccgaatactcgattgtcggtgcccctgaaggcacgcaggcttgggagttcgactacccgaccggttcggaaggtgctctgaccacgttcaagggcgacggcggcccttcggtcggcaacctgttctccaggattctctacgcgatccgcttcggctccgatcagattctcttctccgaccgtgtgaccagcgaatcgcagattctctacgatcgttcccccaaggagcgcgtggccaaggtggcaccgtacctgacgcttgacggccgcgtgtatccggccgtggtcgatggccgcgtcaagtggatcgtcgacggctacaccacctccgacgcctacccgtactcgcaaataaccgacctcggctccgccaccaaggattccaccaccgtctcttccgcaacggtctcgtccctgggctctcagaaggccaactacatccgcaactcggtcaaggccaccgtggacgcctacgacggttccgtggacctgtacgtgtgggatcaatccgatccggtgatcaaggcatgggagaagatcttccctggccagtaccaccagctctccgatatctccggcgacctgatgagccacatgcgctacccggaaagcctgttcaaggtacagcgcgagctgctctccaagtaccacgtgacctctgccagccagtactactcaggcgaagacttctggcagacgccggtcgatccgaccgaatcccagtcccagcaggaccaggacatcctgcagccgccgtactacctgaccttgcagaccggtggcaccgaggaaccggtgttctcgctgacctccacctacattccggctggccagtccacccgtgagatcctgaccggcttcctgtcggtcgactcggatgccggcaatgagaagggcaagataggctcgaactacggcaccatccgattgcaggagctgcccaaggattcgaacgtaccgggccccggccaggcgcagaacaacttcaacgccaacgccgatgtatccaaggaactgaacctgctgcaatccggcgacacgcaagtggtgcgcggcaacctgctcaccctgccgctcggtggcggactggtgtacgtgcagcccgtgtacgtcaagtcttcgggcgtgacctcattcccgttgctcaagaagacgctggtcgcattcggtgatcaggttggattcgcggatacgttggatgaggccttggatcaggtgttcggtggcaattccggtgcggccgcgggcgatgccgagaacgtgtccggtgaccaatctggttccgataccaatggtggtcagtccggcaccacggacggaaagtcggattccggctcgtcttccgaccgcagccccgaactccagcaggcgttgaacgatgccgcccaagccatgaaggacagccagtccgccatgaagaacggcgactggaccgcctacggcaaggcgcagcaggagcttgaagacgccctcaacaaggccatcgatctcgacaagtaacttggcttccctcagggtgaggggagctatcgccgaaggcgactgaagggagtcggttacctcaactgacatagcccgtccttatcataaggacgggctatttgcgtattcaaaggaacttcatgccatacaccttccatccggccgtcgaatccgacatccaagccatcaccgacatctacaacgctgcggtggtggcgggtggggccaccgccgacctcaccccgcgcaccctcgaccaacgccgcgcctgggtcgaatcccatacgccgccctacggcgtttttgttgtggaatcggaagacggttcaatcatcggcttcggtgcgctctccgtgttctacgatcgtgccgggtatgacggcgtcaccgatttggcctattacatcgatccggcatggcaaggcaggggagtgggcacgttcatgcttgacaggctgctcaccgaggcgcgggcccgccacatgcgcaaggcctgtggcatcattttcgccgataacgtcggctccattgccctcatgcgccgcttcggcttcacccaattcggcctcatgcccgccgctgccaccgactccaccggcaccatgcgggacatgtcctactggtatttggacctgtagtcccgaggcggtttacccttgctctccatggattccggtgtcctataacactaaaaagttgtatcggatcagctcttttcctcgaacgccatatatcggacgcgcttatcccagataacggcaaactacgggacggcacgcgattttcgtccgttttgacgtggtatcccgcaatcacgtgggatgccacacacgtcaaacgatgcacatagctcgcgtcccgcaactcttcctgcgaaatcattggaattctgccattcttatgattcggtgcagataacgtgcgataacgcttgcgggatgccacgccaagaacgcccaaaatccgctgccgtcccgcaatatgtcatccgattgcagggaagcgtcatctgtctgagctgtttcccttgcttggcgtcgtaaacgacaagttgttgattgccgctgcatgtttctcctatttgagaaccgaatgctacatactgagattttttccaaccggagttgatgttaaagtgacgccaagctgggacacgctgttcgtgtgcggcatcctgtgcaacgtgctcgtctgcctggccgtgcgcatcggattcgccgcgcgctccgtatccgacaaggtgctgggcatcctgctgccgatcgccggattcgtggcgatgggcttcgaacactgcgtggccaacatgttcttcctgccgatgggcctggtcgccaaaacgtttggtttcggcgccgacgcggcgggcgtcgcggcgctcgacgtgtcgggcatcctctataacctgtccgcagccacgctcggcaatatcctcggcggccctgttcgtggcgctggcctactggtacctcaacggcaaacagcgcgaaaaggtcgctggcggcaccgcctaatagacgcgattcactcgtccccatctcttgtaatactggtattacaaggaggtgcgatatgactatggccatggtgacggcgcgcgtcaatgccgaacggaagcgcgacgcggagaaagtgcttaagcgtaatgggcgcacctattcggacctgattcgtgatctgaccgactaccttgcggatacgggggaactgccggaattcgagcgtctgacgctctccctgattcaggagcgggagcgtaggaaaaagcaggagttgattcaacgtttcgccgaccggaatttgccggaggcggaaggcgatctttcggatgaggagattctcgcgcaggcacgtatggaacgatttgggggacgggatgaaactgctgtttgacacgaatattctgctcgatttgtgcaatgacaaacgagcgcctttccataaacaatgtgttgatttgctcatggaagccgttgcacagccaaacattgagatcatggcgccggtatcgtcattgaatgacgtgtattgcgtgttgcgcaagcattatggcgaggagcgggcggcgcgagacgatatcggtggactgatggaattgttcgacatccgtccacttatggaacgccatgcgtgtatgtcgtaccggtccgatgagcccgacttcgaggacgggctcatccgtgccgttgccgaggacaatgacgccgacgtcatcgtgactcgtgacgtcgaagcgtttcaccattcatcggtccgatcgatggatgccgagcaatgccgtgccctgctgcttgccgattccaaggcttgacggcggcgttgagtacaatcttgacggttgaatccggccgggcatgggccagtgcgcgaggcgaacgcgcgcatgacgtacggaacgtacagaacgtgcatacgggaatataggaagacggacgaggagtggattatggcatcggatttctggctgattgcgggactgggcaaccccggtaaaaaatatgaggacacgcggcacaacatgggcttcatgaccgccgacgtgctcgccgaacgttggacggtgaacttcgccgaccacaaaggtctggccatgctcggtaaaagcgtgatgaacctggacggccgcaccgtcaagttctttctggccaagccgctgacttatatgaatgattccggcaatgcggtggcttccattagcgcctattaccagatcgagcccgaccatatcgtggtgattcacgatgacatggacttggaattcggtcgtatcaaggtcaaggcaggcggctccgcagggggccacaacggcatcaagtcgattgaccgttccctcggcacgccgaaatacgcgcgtgtgcgcatgggcgtcggtcactccaagcgcggtgcgaacgcgcatgacaacacggtgaactgggtgctgggcggattcggtccggaccagcgcaagcagctgcccgaattcctggctgacggcgccgacgccgccgaggacatcatcttccgcggtcttgccaagacccaggagaagttcaatggccggtgaggcgacgcacccggacctgatcaacggctcactggtaggcatcctgtctgagctggaacaggacaagaccttccttagactcgccactggtgacatcgaggtttcggacgacatcgacaattccgttctggccggtgtttccgaaggcttgcgcccggctttggccgccgccatcgggcagggtgtgaccggcaaacccggcaagccggtcgtgctggtcgtggcctccggccgcgaagccgaagagaccgtgggctcgctgcgctcctggtatgacggcgacccggacgacatcgcccagctcgaagcctgggaaaccctgccgcacgagcgtctgagcccgcgcgcggacaccgtggccagccgcatggccgtgttccgcagactcaagcatccgagcgataccgatccgatgttcggcccgattcgcattctcgtcatgccgatccgctcgctcatccagccggtcgtccaaggactgggcgacgtcgagccgctcgtgttcaccgtgggggaggacctgcccctcgacgaagccgccaaacgtctgatcgaaaacgcctacacgcgcgtggacctggtcatggaccgtggcgagttcgcggtgcgcggaggcatcctcgacgtgttcccgcccaccgcaccgcacccggtgcgtatcgaattcttcggcgacgaaattgacaccatcaaggaattccacgcctccgaccagcgtacctacggcgacggcctcaagaccatctgggccaccgcatgccgtgaactgcagctgaccgacgccgtgcgcgcccgcgccaaagccttggtcggttcgattcccaatgctgaggacatgctcgaatccatcgccaacgccattccggtcgaaggcatggaatccctgatgcccgcgctcgtggaccatctggaaccggtgggctccatgctgcccaagcacgccgtgatcctcctgagcgacccggagaaactgcgccgttccgccgaagacttggcaaaaaccgcgaacgagttcctggccgccagctggcatgtggccgcctccggccacggcgccggcgcgcccatcagcttcgacgaagccagcttcctcgactatgcggaaaccatcagctccctcgaatactccgaacatccggtgattcgcctcaccagtttcggcgtggacaccacgctgaccggccatgtgcagctcgacgcccagaacccggccgaattccgaggggatgaggccaaggcctcccaaggcatcgaaggcctgctcgacgccggcttccacgtcaccatcaccgccgctgcggccggcaccttggccaggctcagtcgcgcgatcaacactaccggcatcgccaatttcgacgtcatccgctctcaggccatcgacggcttcgtggacaaagccgccaaaatcgccctgctcaccgaacgcgacctgaccggccgcacttcggccgtggccgtggccaaaacgccgaaacgccggcgcaaggccatcgacttggtggaactcaaaaaaggcgattacgtggtgcacgagcagcacggcattggccggttcatcgaaatgcgccagcgcaccatcggcaccggcgccaacaaaaccactcgcgaatacctggtcatcgaatatgcgccttccaagcgcggcgccccggcggacaaactgttcatccccaccgaccagctcgaccaggtcagcaaatacatcggtgccgaagcccccaagctcaacaagctcggcggctccgactgggcggccaccaaggccaaggcccgcaaacacgtccacgagatcgccgacgacctgatcaagctgtactccgcccgccagcgcgccaggggcttcgcgttcagcccggacaccccatggcagaaggaactggaagatgccttcccctatcaggaaaccgccgaccagctcaccaccatcgacgaggtcaaatccgacatggagaagcccgtgccgatggaccgcctcatctgcggcgacgtgggcttcggcaaaaccgaaatcgcactgcgtgccgccttcaaggccgtgcaggacggcaagcaggtggccgtgctcgtgcccaccacgctgcttgtccagcagcattacgagacgttcagcgaacgattcgagggtttcccggtcaatgtggcggccatgagccgattccagaccaccaaagagatcaacgagaccatcgagggtctggaaaccggcacggtggacgtggtcatcggcacgcacaagctgctgaacccgaaaatcaagttcaaggatctgggactcgtcatcatcgatgaggagcagcgtttcggcgtggaacacaaggaaacgctgaaagccctgcgcaccaacgtggacgtgctgtccctgtccgcgacgcctatcccgcgcacgctggagatggccgtgaccggcattcgcgagatgtccacgctggccaccccgcccgaagaccggttgccggtgctgacctatgtgggcgcctacgaggacgcgcaggtcaccgcggcggtgcgccgcgaactgttgcgcggcggccaggtgttctacgtgcacaatcgcgtgcaggacatcgcgtccatcgccgacaagatccatacgctggtgcccgaagcgcacgtcggcatcgcccacggcaagatgggtgagaagcagcttgaccagatcatccgcgacttctggcatcgtgacatcgacgtgctcgtgtgcaccacgatcatcgagacgggtcttgacatatccaacgcgaacacgctgatcgtcgaccatgccgaccgtttcggcttgagccagctccatcagctgcgtggccgcgtcggtcgcggccgcgagcgcgcgtacgcttacttcctgtacgacccgtccaagccgatgaccgagcagtcc

SEQ ID NO: 177 - DNA, 28316 bp, Unknown
  R101_18m  MAG No. k141_6112
gctgcgaggatatgacaaggagaaggttgatgctgccttcgacgctactcaggagagtgtgaagcgtgcgcagcagacgttggccagcatgcgtgagcagattgcggcggatgacgaccgtattctgcaactgcaggcccagcttcaggaagagaagaacaagaagccggaaggcaacagcttcgcttccctgggggcgaacgcccagcagatgctcgcctccgccgagcagacgagtaccgaactgttggaacgcgccaagcaggacgcatcctccatccgtaccacggctcaggctcaggccgaaacgctgatcaacaacgccaagctggatgcccagcatattgttgacgacgccaatgccaaggccgcctcgattctgacgaacgccaacaatcaggccgaatcagtgaccacctccgccaacgaggacgccgcacaactgcgctccgaaaccgccaagaccatcaccgaacagcgtcagaccgtcgagcttgagctcagcaacgcgcgcgaagagcacaccaagaagatggcttccgaacgctccacccaagagcgcgaaatcgccgatatgaaggcggaagctacccagcaggttgccgcaatgcgcaaaagcgccaatgaggagatcaccaagcttaagtccgattccaacgatcagattgaggcggcgctcgccgaggccaacaagaagctcgccgacgtgcgcgagcaagtgtccaagatgatgaccgaagcccagcgcaaggccagcgaaatcattgatgcggccaagaccaagggtcaggaaatcactgatgaggccgaggtcaagcgcaccagcacgatgagccaggtcaacgccgaagtcgagcagatccgtcacgacatcgccgctcagcaggatgaggccacgaagaaggtcaacgaactcctgcagcacctcgaagagcgtcgtgtggcggccaagcgggaagccgatgagttggtcggccaggccaagaacactcgcgaccaagccgattcatatgccgcgtccaagcgcgaggaggcggacatccaggccgccgcaatcgtgcataaggcgggcgaggaagccgatgcgcagatcgaggagcgtcgtgccgccgcccaaagcgagcttgacggtctgtccaagcgcatcgccgatctgcaggaacgcgagtccgtcatcacccagcgtgtttcggaactgcgttctatgttctcgcaggcgttctccggattcgctttcggtggtaatgcggcggcctctggtcagagtcaggaagccgctgccgtggcgtcattgccggtggtcgcgcccgtcccggaagtcaagcctgtacacaacgaggccgatgatcagccgggtgagttgagcggaaacgagtcggctgccgacgatcacaatgagacagatgcggcaccggctgattcggctgattcagctacgcagaatgagcagtccgaatcgtctgagccgtccgagcaccagacacagggcgaaccggaggccccgactcaggagaatccagccgtatctgagcagaacggcgaatgacaggccttcgattagactactagcggtaagaattacggcacctgcgctttcgagccaggtgccgtattcgtttggatctgcgccacaagcgcaccatcacagaaggagtatgacatgagtgaattgacgcctctgaccggcgaagcactgaataccctgcgcggcgatttcgcacagagcggcaccaaccgtctggccatgaacgcggtgaccgccgccggcatcgacaaggtggctcgcaattatgaccgcgctcgtctgatgcagcgccgtttctccaccatcgttgacaatggcgaagccacccatcaggatcgctccggccgctgctggctgttcagctccctgaacgtggcccgtttcgtggccaagaagaacatgaacttgaaggagttcgagttctcccagaactacgcgatgtactacgacaagctggagcgcgtcaactacttccttaaggatgtggccgctctggtggctgccggagagccttccgactcccgcctgatgcagcacctgctcgccgacgtgatgggcgatggcggccagtggaccatggccatgaacgtgtacaagaagtacggcgctgtgcccaaggacctgttcccggagaccgaatcctccaagaacaccggtgaaatgaacacccagctgcgccacatgctgcacaccgccgtggcgcacatgtacgccgctgacggcgatgcctccaaggtcgaggcgattattgccgacgccactgctgccggccaccgtattctgaccatccacctgggcgagccgccggtctccttcgactgggaatggaccgacaaggatggcgaattccaccgcgacggcgagattacgccggttgagttctggaagaagtacgtgggtccggctggtcttgaggactacgtgtgcctggtggatgatccgcgcaccgagcacgccaagggcaagaagatcggcatcgagcacctcggcaatgtggctggcggcgacgccaccgagtacctcaacgtgccaaaccagttcatgaaggactgtgtcaagcagattctcgttgagcagggcatcccggtatggttcggtgccgactgccacccgttcatggaccgtgagaacggcgcttgggccaccgacctgttcgagtacggccgcgtgtacgacgtggacttcgatttggacaaggaagtccgcgtgcgcttcggtgactccgccatgaaccacgccatggctttcgccggcgttgacgtggccgacgacggcaccacccgccgctggcgagtggagaactcttggggcaccaagatcgccgacaagggctacttcaccatgtccgacgactggttcaccgaatacgtctacgaggtagccgtcccgaaggccctgttgccggaggaataccagaaggccctcgaagagccagccaccatgctccccgcatgggacccgatgggcgccttggcctgacttcgccagcctcccggaatcggcctgacggccgatgctgtgttttttcgcagcctgccggctgctagggtctctccctctgtcagcgcgaagccgctgacgggggggaggccgcggtcgcaggccgcacaacaacacagcatcgccgcaggcgagtccacgcaggcgagttcacccaaagtccataaccgccggcccaacaagcagtccccgtaacagactgctatagttgggcttttgcgtctatagcgccataccgacggtacgtatacaaggaaaggagtcgagcaatggcagcactacgtggtccggatagttccgaggatgaacgtcgtttgggggagcaggccgtctttcccgagaccgtcgatgtcaacattcgtcagcttgaccccattcccgcgccgcgtgccttcctcagggagcagccgctcaccgatgagatgagcgagctcgtgctccactcgcggcaggaaatccgcgacgtgctcaacggccgtgacgatcgattgctcgtcatcgtgggtccgtgctcgatccacgacccgaaggccgcgcacgaatacgccgagaaactggccgccgtcaagcgtgagcttgaagaccgtctcgtgatcgtgatgcgcgtgtatttcgagaagccgcgcaccaccatcggctggaaaggcctcatcaacgaccccgatctggacggtcgcttcaatatccgtaagggcatgtggctggcccgcaaggtgctcaccgacgtgctgagcctcggcctgcccgccgccaccgaatggcttgaccccatcaccccgcagtacatctgcgacgcgatcagctggggtgccatcggcgcgcgtaacaccgaatcccaagtccaccgcgaactggccagtggcctgtccatgccggtgggcttcaagaactccaccgacggctccatcaaggccgccgccgattcctgcttcgcggccggcttcgagcatcacttcctgtccattaacttggacggtcgcgtgatttccgccgaaaccaaaggcaacccggattgccatctggttctgcgcggttccagccacggcccgaactacgatgccgaatccgtgcgtcaagctctggaagacctcaaggtttccaaagcgtccggcccgagccagcatggcctcgtcatcgatgccgcccacggcaactgcggcaaagacgaaaaccgcgaagccgaagtcatcgaagagatcgctgagcgtctggcgcacggcgaacaaggcatcaccggcgtaatgatggaaagcttcttggtcggcggtcaccaaaagccggccccgctcgaccagttggtctacggtcagtccgtcaccgatgcctgcgtgccgtgggaacgcaccaacgagctgttgcacaccctagccgacgccgtcgccactcgccgcgcggctaaatagctttgtctttgtaaaaatgctcactgagacccactcagtgagcattctttgccaataacggtggtcatgtcagtttgttcccgtgacaccttatccttgggaaagatactgatccaaggagagatgttatgcagcagcaggaggaagcagcacattcgctgcatccgttgcaagtcggtccgcagccgttgaacaccccggaagagcttcgcgccattcgtcaggcgatgggggaggggaagaacccgctcgttgccactgatgtgccgcgctgggaagatcaggtgggtgtcagtcgcatcatcaaccgccgcgtattggagctggagccgctgcccacgcctgcgcaagtgctcgctgaactcccgctgaccgatcaggctcaggaaatcgtcgcctactcgcgtgatgagattcgcgcgtgcctgtacggccaagacgacaggttgttggtcatcgtcggcccctgttcggttcatgacccgaaggccgcgctggactacgcgcaccgattggccaagctgaaggacgagctcggtgagcagctgctcatcgtcatgcgcgtgtacttcgagaagccgcgcaccaccatcggctggaagggcctgatcaacgacccggatattgatggcagccacaatattcgcaaaggcctgttgcttgctcgcaaaaccttgcttggtgtgctgaaggaaggattggcggccgccacggaatttctggagcccaccagcccgcagttcatctcggacgcggtgagttggggcgccattggtgcgcgcaacacggaaagccagatccaccgccaattggccagcgggctttccatgccggtcggcttcaagaacgccactgacggctcggtgaaggcagcggtcaacggttgcttcgccgccgcccagcagcacacgttcttcggcattgaccatctggggcgtgcctgcgcagtcgagacccttggcaacccggactgccatgtggtgttgcgcggctcgattcacggcccgaactacgatgccgagtccgtggccaaagccatggaagacgtacgcgccgaaatgcccgccgaatccgcagcctcgcacggtctgattgttgattgctcgcacggtaactccggcaaggacgagcatcgtcaggccgaagtcgtgcgcaatattgccagcagaattgcagctggcgaacagggtattaccggcatcatgatggaaagctttattgaagggggcaatcagaaggccgcgccgcttgatcagctggtctatggcaagtcgattaccgacaagtgcatcagctgggaagaaaccgaggccttgctgcgcgagcttgcggaagccgtggccacgcggcgttggcactgagttgcgtcatcggctctctcgcaggagcaatgcaacgaaacgtctctacccctcagcccgccattcggcggccacctcccctgacatgggagtcgaaagcgttgtgaaaggaacttacatatgggtatgaaaactgtagctattattggcgcattggatgaggaagtggcgctgatcgccaaatcgctcacgcatgtgacgcacaccgccaagggcagccttgacatcgtgtccggcacggtcgactcctttggttctgacgtcatcaaggttgccgcaacggtaggcggcatgggactggtcaatgcggccgccaccacgcagctgctgattgacgagttcgccccggacgccgtgattttcagcggcatcgccggcaacctcaacacccacctgcacatcaacgacgtggtgctcggcggcaccctgcgctacctcgacactgacatgcggctcgtaggccagtggaagcccggcactgcggacgctccggtggaggaattccactctgatgaccgtctgctggaagttgccgacgaggcgcttgccaatgcgggcattacccacatcaccggcatcatcgcctctggcaactacttcgtggacacgccccaaaaggtcgaggaggtcatccgactcaccggggctgacgccgtggagatggaaggcgccgccgtggcacaggtcgccgcccgcaatgacgtgccggcactggtgattcgtgccctttccgacaacgccgacaccgattacgaggtattcaaggagttcgacatctccgagtacgccgataccgccgcccgtctggctgtcgacatcgtcaagcgcctgtagtcggcgggctggcccatctcaccatccacgttttgggtatgatgaccacaatatgagcgttttcaaactattgcttataacctgagccatactcggtgttcggcacagcgatgtgcggggttcatcgctggggccacaagccgtaccagttcttctcccgcatgccggtcgctgtgctcaattcgttaagcgacgacaacaccgtcgcgaagcattgaatacacaatgcgcacgctgcactggggtttatctgcagcatgaggagagaaaaaatgactgcaagcgcaaccgcggctgtgaccaaaccggtgaagaaggattcggttcctgagatcatcgccgcttccatggtcggtacggccatcgaattctacgataactactgctattccattgccgctgctagctacttcggcatgatcttcttcacggacgtcgccaagtccaaccagaccctcgccacgctgatggccttcgtgaccttcgccgtttcgttcctcgcccgtccgttcggctccatgctgttcggccacttcggtgacaagctcggccgtaagaagacgctggttatcgccctgatgaccatgggtatcgccaccttcctggtcggctgcctgcccggttatgagcagattggcgcatggtccgtcgtgattctgtgcatctgccgtgcctgccagggcgtgggcctcgccggcgaatggtccggtgccgcgctggtcgccactgaaaacgctccggccgacaagcgcgccctgtacggttccttcccgaaccttggcgccccgattggcttcttctgcgcttacggcctgaacctgctactcgaatccaacctgagcaaggaacagatgattgccttcggctggcgtatcccgttcctgtgctccgccgtgctggtgatcattggcctgtacgtgcgtgcccgcatgtctgagaccccagtgttccagaaggccactgaagagaagcgcacctccaagcacccgctgcgcgacctgctgccgtactggaaggaagtcgtgctcggcaccgtagccatgggtatcacctataccctgttctacgtactcggcacttggtcgctggcctacggcgtcaagggcttgggcttccagcagggcgagtacctgctcatgcagatgtgctccgtggtgttcttcgccatcttcatcgtggtctcctgcgtgtacgccgacaaggtgggccgcaagaaggtcatgattgccgtgaccgccgccgccttggtgttcagcttcttcgtgccgatgctgctcgtgcactccgccgcccatatcatgatcttcctgtgcgtcggcttcatgatcatgggtggtttgttcggcccctgcggcgcctacctgcctgagctgttcccggtgcacgtgcgttactccggcgccggcctgagctacaacctcgccgccatcttcggtggcgcattcgctccgaccatcgcccaggccctggtcgcctccaagttcggcgttgccggtgtgggctggtacatggccatcatggccgccctcgctctgctcgctctgttcctgattaaggaaagcaaggacaaggactacgagctgtaaatagagctccccatattatgctcccgctggcgggagctgtccacgaaagcggactgagggtggccaatgggatttcggttctttgaccaccctcagtctcactgcgttcgacagctcccgccagcgggagcattttgttatgtcgtcccaccaaaaatgaacaatagacgaacttacgtagtttgggcatctcactacgccttgcacgttttactctggaaatcatggatatctggcagatcgtcgtgattgtggtgctcgccgcgctgatactggcgtgggttgccgtcatcgcctacaacaaaggccgcgtttcaggtcggctcgccgccgaacaggacctgtccggcgacgaggatacgcgttctctattcggtgatgatgcgcccgtgcgccccaccgagcgtcgcctgattgaagtcctgcccgaagccctgattgttaccgaccgcaacggcttggtccaatattcaagccccggctcagtgccattcggcctggtctccggcgaccgactcaactcgcgcgaagtcgaggacatcctcactcaggccgccgccgacggtggcgtgcgtgagcgtgaggttcagctgccggtcaatcgcaattcctatccgtcctctaatggccgaggactggaggccggccagtcacgcccgtccaacatgctgtatttgcgtgtgcgcattggcgatatcggcgatgacctgtacgccatcttcatcaacgacatgtccgagcagcgccgtttcgaggccgttcgccgtgactttgtgaccaacgtttcgcacgaactcaagactccggccggtgccatctcgctactggccgaaaccgtgaccgacgccgccgatgatccggacgccgtacggtatttttccggccgtatctccaaggaatccgcgcgcctgaccgaactggtacatcatcttatcgacttgcagaaagcccaaagcccgcaaagtgtgattgatgcgcggcgcatttccgcgctggatgtggcacgcgctgccatcgccgccaatcagacccaagccgactcccgccatgtggatattcgactgagtgtcaacggacagtcagtgcccacgaaggtcgaggagctggccgatggcgaaggttccttggaagaatcaggcagcccggccacgagcggtccgatgatcaaggccgacaaagaggccatgcaaaccgccgtcaagaacctcgtagagaacgccatccattactcgcccgaacacaccactgtggcggtcggcgtgggggagcgcgatggcaaagtcaccattcgcgtggtcgatcagggcatcggcatccccgccaaatcactggaccgcattttcgagcggttctaccgggtcgacccggcccgttcgcgcgagaccggcggttcgggactcggcttggccatcaccaagcactgcgtgcaggagaacggcggtcggatttcggtctggtcgcgtacgggggaggggtcgacgttcaccatcgagctgccggccgccccggatgaggatgacgacgaggcccggccggacgagtcgacacaagcgtagggccttggttggtgcccgatatggtgccattccattgccacacaatcacacagtgggcgaggtgcgcacaccgcgcgtagcccaattacgcaattacgtactttcgggaaacagcaggctaacggagaacaaatggttacgatagtatcggaaaactttgcgcctatgcgcacgggaacatacccaagaaaggctactatggcacgcattcttatcgtcgaagacgaggaatcctatcgcgagccgctggtataccagctcacacgcgaggggtacgacgtgtccgccgccgccactggcgaggaaggtctggaactgttcaccaagggcggcatcgatttggtgctgcttgatttgatgctgccgggcattgacggcactgcactgtgccgtcgcattcgtgagcagagccgtgtgccgattattatgctcaccgccaagagcgccgaaatcgataaggtcgttggccttgagattggtgcggacgattatgtgaccaagccgtactctttccgtgagctgctggcccgcatccgtgccgtgatgcgtcgcaatcaggccacggcccaggcttccggcactgtggatgacgatattccgctggtgtgcggcgatatcgccatgcaggtaggccagcatcaggtcaccgtacgcggcgaaaccgtgttcttcccgctcaaggaattcgaactgctcgaatacctgatgcagaacaagggccgtgtgatgacgcgtcaccagctgatcgaccgcatctggggttcggattatgtgggcgacaccaagacgctcgacgtgcatgtcaagcgcgtgcgctccaagatcgaggaagatccggcgcaccccaagtatctgactaccgtgcgcggtctcggatacaagatcgatactcccgcggagtaaatggaaggcggccttcgggccgccttttttgttgtggattgtgggctcgccgcaggcgagtccactccaaaaactacgtagcctcaacgtagcccacaaacatccaagtgttcatcttctgtttactgatttcggttttgggcccttgaaaccaccaatacgcttgtagttgtcatgaattgaccgggcagcgctgagccgcccgcgaatagttgatagagggattaagtaataatcatgcagaagaacatcctcattcgctccattgccgctctgtccggcattgtgatgctcgcttccgtggccgcctgcggcgataacaccgccaccacgaccgacaacagctcctcctccgattccacttccaagtccaccccggtctccggcaacttctcgggcgccggcgcctcctctcagcaggccgccgttgaagcctggatcgccggcttccagggcaccaaccctgaagccaagatcgcctacaacccgtccggttccggcgctggcgtgcagaccttcctgaccggtgccaccgcttgggccggctccgataaggcccttgccgatgacgaagttgagcagtccaagtccgtgtgcactgaaggcaccgccttcgatgtcccggtctacatctccccgatcgccgtggtcttcaacctcaagggcgtttccgatgccggcaagcacatcaacatggacgctgccaccatcgccaagatcttcgacggcaagatcaccaagtggaacgatccggccatcgccgatcagaacaaggacctgaagctgcccgacaccgccatcaccgtcgtgcaccgctccgataagtccggcaccacccagaacttcgtctcctacttcaaggacgtcacccctgacaactggacctacgacctctccgagaactggccgaacgaggttggccagggcgccaagggcacttccggcgtgatctccaccgtcaagcaggccgacggcaccatcggctacgctgacttctcccaggtcggcgacctgggcaccgtggccgtcaaggtcggcgacaagtacaacgagatttccgccgaggccggctccaaggtcatcgaggactccaagcaggacgacaccgttaagggcgacaaccgcatcgtcatcaagatcaaccacgccaccgaggccgagggtgcctacccgatcgtcttggtctcctacgacatcgtctgcccggcctacaaggacaccaagcaggctgagttcgccaaggcttggctgacctacgtgacctccgacgagggccagaaggccgctcaggatgccgccggcaccgctccgctgccctcctccctgaagtctaagatcaccaagtccatcgaggccatcaagaccaagtgatgacgtcggcccgcaagggtcgtgtggactggacctgacaactgaacgatagactgtagtagtaagagcagtcgccgccaactttaagccgcagtcgtaaaccatacggctgcggcttaaagcgggtcaggacccgaacggtttggcaaagtcacagacgaaaaccgcaccacttgaatacttgataaccaccctatataaggagaatccgtgagttcgcaagacaaaacggctgtgcagccagttggaggcaagaccgccgacaaggtgtttcgcggtgtggcatacgcctgcggcatcctgatcctggttgtacttgccgctgtgttcctgttcctgtttttccgcgcctggccactcatcggtggcgatcaggccgccaacagcgacaccgtgtccagctttaccggcggcaaggccagcagcttctggggctacgtgctcccgctgttgttcggtactgtgctcgtgtctttgctggcactgctgattgccttcttcgtgtccatcggcattgcgctgttcatttcgcactatgcacctaagaagctcgccaccgcgctgagctatgtggtcgatctgctggctgccatcccgtccgttatctacggtttgtggggcggcctgattctggtgccggccatctacccgttctggaactgggttgccaaccacttgggcttcattccactgttcgagggcccggccgccaacccgtcgcgcaccgtcgccaccgtggctgtggtgctcgccgttatgattttgccgattatcacctccatgtcccgcgatatcttcatgcagaccccgcgcctgcacgaagaggccgcgctggcgctcggcgccaccaagtgggagatgattcgtctggccgtgctgcctttcggcaagtccggtattgtgtccgcctccatgctggctctcggccgcgcgcttggtgagacgatggccgtgttgatgatcctgtccccgggcctcaactactccatcaagctgctgcaggcctcgcagaaccagaccatcgccgcgaatattgccgcacagtaccctgaagccaacgatctgggcgtctccacgctgattggaaccggtctgattctgttcctgatcacgttcgtggtcaacttcatcgcccgtaagcttaccgagaaagcgactgcgtgatgactgctgctgagaacactgaaaagactccgatggacggcacgcccgaaatcgacttcgatcgtttccgcccgacccgttccgccatccagcgccgtaatatcatggaccgcttcatgtgggccctgatcgcggtggcgtttgtgatcgcctgcatcccgctgatctccctgctgtggaccactatcgtcaacggcatcaagcgcctgaacctgaacttcctgagctacaacatgaccggtgtggtcggtggtaaccagaccccgtccggtggttacggcggtgtgctgcacgccatcatcggtactctcgaaatcaccgctggcgctatggttatctccattccgatcggtttgatgtgcgccgtgtacctggtcgaatactcgaaccgcggcaagctcgccaccacgatctccctgctcgtcgacgtgatgagcggcatcccgtccatcgtggccggcctgttcgccttctcgatgttcacgattctgctgggccccggtaccatcaacggtttcgaaggctccgtggctctctccctgctgatgctgcccaccgtggtcaagtccagcgaggaaatgctgaagatcgtgccgaacgatttgcgtgaggcttccttggctctgggcgttaccaagcagcgcacgattaccaagatcgtgctgcgcaccgctctgccgggcatcgtctccggtgccattctggccatcgcccgcgtgattggtgagaccgcaccgttgctgatgaccgccggctacatctccagcaccaacgtgaacctgttctccggccagatgaccaccctgccggtgttcgtctaccaggagtactcgaagctcagcgcgaactgcccgcccaacgccgacgccacctgcgtgaccacgattccgatggaacgtgcgtgggctgcggctctcgtgctgatcgtcatcgtgctgctgctgaacctcattggccgaatcgtggcgaaggtcttcgccgtcaagaccgagcgctaagccagtcgctaagcctaagccttaagaacacaaggaaatataaggaaacatcatgggacaacgtattgacgtcaaccacgagaacatctattacggcgactttctggccgtggaagatgtgaacatcaacatcgagccgaacaaggtcaccgccttcatcggcccgtccggctgcggcaagtccaccgtgctgcgcaccttggaccgtatgcacgagatcatccccggcgctcacgtcgagggcgaggtgctgctcgaaggcaagaacctgtacgacaaggacgtggatccggtggccgtgcgccgcgacgtcggcatggtcttccagcgcccgaacccgttcccgaccatgtccatccgtgagaacgtgctggccggtgtgcgcctgaacaaccaccacctggccaagtccgacgccgacgatctggtcgagtgggctctgcgcggtgccaacctctgggaagaggtcaaggaccgtcttgacaaccctggcatcggcttgtccggtggccagcagcagcgtctgtgcatcgcccgcgccgtggccgtccacccgcaggtgctgctcatggatgagccctgctccgccttggacccgatttcgaccttggctgtcgaggatctgatcaacgagctcaagagcgactacaccatcgtgatcgtgacccacaacatgcagcaggccgcccgtatcgccgactacaccgccttcttcaacctgaaggcagtgggccagcccggtcacctcgagtacttcgcggacaccatcacgatgttcaacaacccgcaaaacgaagaagccgagcgctacatctccggtcgcttcggctgatcgtttcctgcgcgcagcgtaatgatttgtgcgtaggagaaacggcaaagcccgccgcaaggcgggctttcgcatattcaacgcgagtattgccgagtattatcgttctcgcaacggagcgagctggaatactttgtcggactgggcggcgacttcccgcttcggtcgatcgacgggagaacggcgggtaaagcggtacaagacaagtccgcacgatgaatactctgtgatgaatcttctgtttacggtgcgagtgtggaagaatggtcacagcaaggtccagcaaaggagcataggtgagtactggtctgatcgtcggcattgtcgttgtcgttattatcgttgtcttgattggttggggcgtcagcgcctataacaacctggtgacgctgaagaaccgtgtgaagaacggttgggcgcaaatcgacgtgcagttgaagcagcgtgccgacctcatcccgaacctggtgaataccgtcaaggggtacgcatcccacgagtctgaagtcttcactcaggtgaccgccgcccgcgccggcgtagtggctgtggccagcaacccgagcacgaccactgctcagcgcgccgccgccgaaaatcagctgtcccgcgccctgttcaacctgcaagccacggctgaggcatatccgcagctgcaagccaaccagaacttcatggatctgcagaaccagctcaaggaactggagaacaagatcgcctacgcccgtcagttctacaacgacgtggtcctgaagctcaacaccgccatcgaaaccgtgccgacgaacatcatcgccggtctgttccactttgagcaggcgcaatacttcgaggccgatgacgcttcccgtcaggtgccacaggtccagttctgacccgcttcaggcccgtccggtaagccgccggccgggcccgtattgtcttaagagagggaagatatgcggatacgattcattcgcgccggaatcatcagcattgttgccacggtggtgttggcagttatcaccttggcgataatcgggacttccgcgttcggcgattcggccggcctcagctaccgcacgctggactatgacgtgaccgccaccgcgaacggtgatttgaaggtcacgcagcatatcgacgtcaagatgcgtgagcgtaccgacagtgacgacaacaccaagccgtggaagcagctgttccagcaatacacgctgaactccggcaccttgactgatatcagcgatatcagcgtgcgcaacgtcaccgacggcatcgactacgcacaacagagcgagcccaagctgcccagtgacgtctcttccgacaaggaatggaacagcgactacgccaaccattggtatgtcgccgatgtgagcgatggcagcgaccatccaaaggcatacacgcccggtaccgatggcctcaagcccagcgcctccgccaccgaagatgacacaaccgtggagatcggctggaatattccggtcaccaccgaggccgacagcatgaagttcgatgtaagcttcaccatgcacgatgtggccaccaaatggaaagacgtggcctccttccaatgggagccgttcggcaagaagaaccaagtgcctatcggcacggtcaccggcaccgtccatttccccaacggcatcaccggcaaaacctcatggacatggctgcacaccgagcgcacctcggaaaccaagcgcaacagcgacggcagctacacgttcacggcctacaacatccacaatggcgactacctcgatgtggtcgcggcgttcgatgccgccaaagccaagggcatcgcccgcaagggaaccggcaatcatctcacggacctgaaacaggacgaatataagcaacagcagcgctggctcgacaagcaacgattcgctgccagagctcgtctcgtgttctggattgtcagcatcgtgctcggcatcgcgttgtgcgcgtggggtatctgggctgtgatctccagcaaccggcgtgcgcaatacagtggcagcgtcgaatactggcgcgaccagcccggcatcagtccggcttccgcagcccgtctgattcgcgtggtcgatccgtcgacgcgccaatccgatgaagaccgccagctgacagccaccatgctgtcgctcgccgtcaagaaggccattgccgtctatccggggccgtcggacatgtatcgcggcatcgacatgagccaggccacgccggtgggcttgagccaaatgattgccgccgaccaaggcaagcagtatgcggcaggcatcaccagcaccatcgtgattctgccgctcgccattgatgaggcacccaacgcgcaacagttgggattgagcgaatcggaagatgcgctgctgaacctgctcatcgtcatttctcagcgcgtgggcagcccggtattcgacctgaaccagatgaaggcgacctgccagaactggcaagacggctatattgagctcggcaaattcaccggtgcatgcagcatggaataccagcggctgggtgccacgcgctctgtgggctggcaatggatcctacccggcgtattggccgccgtgctgggatttggttcgctgctggtcaacagctttatcggatacccggtggctggtcttatcgggctgccgatattcctggtcggactgttctgctcgatggccggcgcgatgaccgtgctcactgatcaagggcaggatatcgccggccggactctgggccttaagcgttatatggaagacttctccaacttcaccgaccggggtaccgccgatttggccttgtgggattggtatatggtctacgccgccgcgtttggcatttccgatcgcgtgatgcgtgaactggccaaagcatatcctcaggtcaacgacccggcttggctggatgccaacgcctccaactcgttgttctactggaactaccgcccgtatggctggtacagccaccgtcataatggtccattcgaccacgatgctgccgggcagacggacctaggcgttggcggcccagctccggcttacggaggcacgtcgtttgccggcggattctccgacctcggctcgcagctgaactccggtctggcggacatcagctcgaccatcagcgcggcagcaccatccgccgattccggtggcgatttctccagcttcggttcgggcggcggctccggtttcggcggctcgttcggtggctcaggtggcggctcgttcggcgggcggtagcgcatgcctatgtcgaaacgcattgttcgtgccctgggcttaagccttgtcggtgcgctgattcttgccgcactctgtgccggtgccttgattctcggcacagatggtgccgacctgagctaccgcacgcttgattacgatgtgaccgccaccgccgacggcgatcttaaagcacggagcatatcgatatcaagttgcgcaaacgcaaggatgacgatggcaagaccaaaccgtggagatcggctggaatattcccaccaccgtaaaaaccaacagcatcaagttcacggtgagcttcaccatgcatgacgtggccaccaagtggaaggacgtggcgaccttccaatgggagccattcggtgagaacaatcaggtgccgattggtacggtcaccggcacggtgcatttccccaaaggtgtgaccgcgagcaactcgtggacttggctgcacactgaacaaacctcggaaaccggccgaaccaaggatggcagcttcaccttcaccgtaaatgatgtgaaaagcggcgagtacctagacgtggtggccgctttcgacgcggccaaggcgggagatatggctcgtgtcgagaccgacgatcatctgcaggagttgaaggaagacgaagccgacgacgaacggttctggcgcaatctggaacgccaacgcgccacaaggcgcctgaacaactggatgaccaccatatcggccggcctgatattcgggattattggtgttgttgcagccttacgctcctccggacgttcacgttaccgtggctccatcgaatattggcgcgatcgccccgagctgagccccgcatcggcggccaaactcatcgatatcgtgacttccggcgacaaacccgacattcccgagcgccaactcgtcgcgaccttgctttctctggccgtgaagaaagtcattgctgtgttccccggttcggcggacctgtatatcggcgtggatctgaaacaagtttctccggtggagctcagtcagcgaatcgggtccgatccatacaagcgcaataatgcgcgtaccaatagcacgattgtgatgctgtggcagtacgattacggcgtatctgagggatttgatgaatcagtattcgtcgaatccgtatttgatggatctggatctggcggatctggatctgccgcatctagcgtgtccgatgcacaccagcccgatctcagtgcttctgagcgggcattgctctatctgctcaccgtgatttccgagcgcgtaggtcgtacggcatttgacatggatgacatcaaagacgcctgcaaggattggaaagatggctacaaggaactcgaaaagttcaccaatgcgtgcaagaccgaattcgcggcggcggatatcgcgccgaaaaccgagaacggatggctcattcccggggcaatcaccgtgctgatcggtggcgccagcatattcatcaacggtttggccggatatctggtggccggggccctcatcggcattcccctgatgacggtcggcatattctgcttcctgatggggaattcctacgtgctgaccgatcatggtcagcagatggccgggcaatgcttgggtctcaaacgatatatgcaaggcttctcgaacttcaagtaccgtggagtcgcggatttgacgctgtgggattggtatatggtctacgctgccgcatttggcatatccgaccgggtgatgcgggagctggccatggcctatccgcaagtatccgatccggaatggcttgatgccaatgcctccgacacggtgttctattggaattatcgtccgtacgactggtatgggttgcgtttctacaatggctcggcgttcgcggattccgtggctgacagcggattggccggagcggtgccagcgttcgggggcacgtcgttcgcggctgggttctctgacctcggcacgcaattgtcgtacggatttgcggatatcaccgcgacaatcaatgcggcctcgccatccggtggctcaggcggctttggcggtagcagcggcggttccggcggcggttcgttcggcgggcggtaagcgatgtgcttctgaaagtccctatagctttgaaagtaaaaggcccggtgtcataagacatcgggcctttctctcaaaatcgaggtgaggagacctcaacagtcaggtccaacggggcgaaagtctgtggcgccgccgagaagattgcctcgaagctagcgtgacctttctgctacaacacagcataccagcctccaccgaagctcaccagtacactggactgaccaaaccaaggtctactagcgtgccactttggcgcggtgtcgttgtgtcaaccggcataatgacgtctcaaaattcaagaggaggttctcacggtaggcaacaaccatgacaaccgtccgagacaagaccggcaataccgggaaggtctgatgaccggcctgttgatcgccctggccaatcaagttggacagtggcggtcgacggccatcatcattgccgcactggtattgctgggaatgagtctcagacgaggccactgatctatcagcggaacagccggaatccatggggttccggctcctcgttttcgctgaactgggtatgagtaagttgcgttttctattccgtgaagttgcggaaatttcatagattgattgtgcgggcaggccgagagtgtgaaatccaacgggatgcttaggcttgattgtggatatcgagtttccataagtttcacgaagggaatcaccatggcattgttccgtaacctcggaccgttctccaccaccgccatcggccacggcgaaatgccgctgaccatcgaaaacaaccgcggccatgaggtcggcatcgaaaccctgcatgcctcgctggacgccggctgccgccacatcgacaccgcttgggcctactactgctccggcggcgaggagcagaccggtgaaaagctggtgcgcgaggcccttgagacctggaaggggccgaaggacgaggtgctggtggccaccaaggtgggccacttccgcaacttcaccgacggccgccccacgtgggatgtggacggtcgcccggagaacctgattcggcgcggcaaggagagcgcactggcgctcggcgtggacaccatcgacctgctgtacttccaccgcccggacccgaaggtgccgtacaacgagtccgtcgaagccatcaagcagctggtggacgcgggcgtggcgcaggaggccggtatctccaacgcctccatcgagcaaatcgacattgcgcgcggcattctgggcgacaagctcgtggccgtgcagaaccagtactcgccgattcacctggagacccaggacacgctcgactactgcgccaaggtcggtctggccttcgtgtgctggagcccgctcggcggctaccgtcacccctatgatgagaccaagttcgacccgttccgcgaggtcgcggcggcccacggcgtgagctaccagcaggtcgtgctggcatgggagctcgccaagggcgaccacatgttcgtgattcccggcgcccaccaccccgagaccatcctcgactccctcaaggccgaccagctcgaactcacccccgaagagctcgccaagctcggctgattgcccattccccatcctcccgaatttgtgccgctgacgttggcttaacgtcacaaattcgggaggattgattcgtcttgaaggaaccgccatgcgcaaaaaactcatcctcgacctcgataccggcatcgatgacgcgctcgccatcgcatatgccctaggcagtgccgacgagatcgatctgatcggtatcacggccacctacggcaatgtcgcggtgccgctggccgcgcgcaacgcgctggcggtggtgcacttgttcggccgtgacgacgttccggtctatcccggagtcgaccatcccatcgccccggcaacattgccgaaaatgcgtggcaccacaccagacgagcggacccaggcctacgcgcgctggcagaacggcggcgcggacggctggcaaacggacgcttcgtgggcaccaactcccggctcggtggcggtccaccatcccaacggcatcggcggcgcaatcatccccgactccccgcgcgctccggaagcaccaggctcggcggtcgatttcatcatcgccgccgcgcgcgaatacggcccggacctgaccatcgtacctacgggcgcgatgaccaccatggccaccgtattccgcaacgctccggacctgaaggattccggcgtgaacgtgacgttgatgggcggtgcgttgacgctgcccggcaatgtaagcccggccgccgaagcgaacatctcccaagacccagagtcagcagactatctgttcaagtgtggcgcacgcaccaccatgatcggcctcgacgtgacccaccagaccgcgctcacccgtgagaaagcccatgaatgggcgtctctggggacgccggccggcgacttcctcgtcaccatgaccgactactacatcgacttctacctgaagaaccagccggagattcgcggatgtggactgcacgacccgctggccgtggccgccgcgcttgacccatcattggtcaccacgttcggcttcaacctacaggtcgatttggagggcccgttccgtggccgcaccattggtgaccgctcgcggctgcaagatttcgacaagcacactcaggttgcgctcggcgtcgacgtgtcggaattcctcgaccgctttatggctcgcgtcaccgccgcggctcgtgggtaaatgcttatgctttggcggtcgtgtcggttgctgaagcgtcggttagtagtgcggacaatgcggttctagcttccggggtgatccacatggtgtgtggataaccctgtggataactagcggtacgattcgtcatcgtgtatatgcgggatggcatcggtcggtgtgcatatggatgagaataccgatttggccgagcttcgcccgttcctggtggtaatcatggaggaggcgagaaagcgggggtctagtgtgatgctcgttccggccgacgaggggattgagggactgtgccgtatggtgcgtcaaggcttctctgcgctctgagcccagcggcgctctattcggggcacgccattgcagcggtggcgtgcccttttggggatgctcgaatagggaagtaggcaaggatttttcatttggtgccgtccgagctaattggctataaacgtatcgaacgtgcctgtaaccgatggagaaaacgtaaggaaagaattctcggaactttgtcatctgcctgaattgacctttagcagtcggatgccaatcagctgccgtatgacgtgtcggccacgcagtcatcgcaatcgctgctctccggtgtgaggaccgccgcgactttttaagcgataccagagacataccgaggccggagccacgagacgagtaacagtttgcggtagatccccatcgctctactgcagagcatgaaccgccttatcaaaacgttcggccatcagattgatggaatgcatgtcaatgcggctcatcgcggctcgagataatgcctgagataaggctgatcgcaatgtcggcaaccaatgatccgcatatttacggcttacaccgaacaaagacagactctcatcggacatcaatttatctatatcgacttcggtgtcacctaataatgacatctggtgtgagtcgggtagtgacggatcgaatggttcaggattcatgtcaaaagcgggtgccaattgccaggaattattcttacgcaaatacccgtggtttcgtagatggtcatcagtgttgccgatggccgcgccaaacattgctctccgccacagctctatggtgtctcctcctgccctacgcgtaaattctgctagatccaaccagtctccgccgtccccatctcttgcttccagcgcggtcattgcggatatataaggtaatcgctccattcgctcaactgatggtgcagacacgcgatcaaaacggtgagtcaatagcacggtccggcttctctcctccgaatcctttattgcaatgacgcgatgttcgggcactttgatgccggccatgttcgcgatttccaaggtgacggcttcccagccgataacatcccaatcatcgccgttcggtttcggaaatttggccagccacagcgcattacgatccgacaccgaagctttaggtcgtgcgcctccgagtgagccggttgcccgatacaacctgcgtaaggagacatcacttacctcgcggttctgttccaccgcatccgcagtgtccaataactccggcagctttgacagtacgggtactccttcatctcctgccgctggcttgccatcaaccatgaatcgaatggcaccctgtcttgtcagatcgttgacgccgaacagatattccgactcgctgacacgcgtccgtttaagactgcggggaaacacctttctgcccccaacagtctggggcggaatccgaaaatgaaccaagtccagagaagaagaatgggaccaacgagcggggcatagatgggaagaggtcgaaggaatcgctgctgattgtgtacgtcgaatcatagcggaacgataggtcgtcgccagtcgcatacaatgtgccggcaggagcttccattccaggccctagcgtaatcagtacagttgattcgatagtttttgccatcagggattcacctccgaacgcgcttcgggagttgttggccagcgcggagacgcccaagatcggtggaataggggtcgcatgcggctacgagtgtgtcagcaagttgcaacacgcgcgcgatggttaacagcgaatctgaccggacagccttgccttgctccagatttgacactgtggtcgggctgacaccagagcggtgtgctacatccgcaaccgtcaacatcagtagtttgcgctgttgcgagaactgttcgcctaggatgcgtaaatcgcgtttggtggtggtgggcacatacttcattgcgatactccgagtgttataacatatagttttccatgaataaaatcatttattcactagtatgctattgattatctgctatgcgataccggaatgaggaaggtttagcgtctcgatgtttctgctcatacgcaaaaggactttctgccaacaaatagccagaaagtcctttggtctcacgtgtatatgaggtttacaatcccggaatcaaaccaccgggtgggtcaagcgtgaggtattgctcctccagatcgatgtcgggcaccagttcctccacgaacggcaccaacgcggtcttttcgaccacatcctcgcccttggaattctggccggttaccaccggctcggtcaaacaaatcttgagcagggactgagcgggggagtcgaccacatccaccactttgccgaccacttggccggcgggcagtcccagaccgttgccctcgactagacgggcctcaaggccaataagatccttgggataccattcgtcggcttcgagcatatcttccgcgtcgtcggcctcgccgtagagttcgacaccgtttagggcctcggcggcattgcggtcgtcgacgccctcaagcttgagaatccaacgatccttgaacgtgcgtgagccctcgacgatgtactcggtctcgccatcctggctgtagagcacggagtccggctcgaagcgccactcgggatcatcggtgtacaggcgcacggtgacttcgcccttcaggccctgtgcgcggccaatacgagcgaccctcagcaactcgagctgctgagggtcgtcgtgcatgtcttgctgtgccatgctgtgaatcgttccttatcggttatcgacggacgtccatgatgtcaacgcggaccttgtggtcagacagtgcctggatcacggtgcgaatcgcgttggcggtgcggccgccacggccgatcacacggccgatgtcttccgggttcacgcgtacgcgaagcagttcgccgcgcgcgttctcatgggacttgacggaaacatcgtcgggaaaatcaacgatgttcttgatgaggtgttccacagcctgtgcgagcatagctagcctttcgtttccgctcaggcctcggccggagcttcttcggcggcctcttcagccggggcttcctcagcggcggcagcggcttcggcttcagccttggccttggcggcagcttcggccttggcggccttcagcttctgggcctggttctcaacggccgcgatgcgggcctcggcgtccgggccggcctcaacggtcttcagggtgccttcggcaccttcaaggcccttgtgcttctgccagtcgccggtgatgttcagcagcttgaagacgggttcggacggctgagcgccgacgccgagccagtactgagcgcggtcagacttgatctggatggtcgagggctgggtgttggggttgtaggtaccgatctcctcgatgaccttgccgtcacgcttcttgcgggaatcgacgaccaccacacggtagaaggcgtagaacttcttgccctgtcgcttcagacgaatcttggttgccaaaatggctctccttgtaatgctaggtgtgcgggttctcggtttgccatgtggggcatgaccggccggaatccacgtgtcctcgcggctcggggtgtagagggcgccacgcgcgcgcgaataaccgtactagtgtaacgcggaagccggatattgcgcatcggtccggtcgtgacgcacggaatcgccggacggacggcgtgtcggcggcgcacctaccgtcttcatgactgatagcctgattgatggcagtgcgagacgggaaagggggcgctgatcgatgggtgagtgcgtgatcggccccggtgcccgggcgcgtgtggatgcggatgacggattcttcttcggcatgggggccttcgagaccatcgcggtatccggcggcgcgcccttgttgttggacgaccatctgacgcgtttgggtgagacgttgcgatacctcggcatcgaggcgcgtcgcgccgatctggagacgatggtgctccgcgcatgcgccggactcggcgcatcggacgattcggccctcaagctcacggtcaccgagcgcaaccgcgtcgtctcgttgagacgcaacccgtatgccgcgccgggggcgaagcgcgtcttccgctgcgacttcgccgatgtgcgcaggaacgaatcctcccccctcgcgcgcatgaagacgctggcgtatgccgaaaacatcatggagaagcgtcgcgcccgtgaccgcgccatcgacgagccgttgttcctcaatacgcggggcgaggtcgccgaaggggccgtctccaatatcttcgccgtcatcgggggagacgtcgtgacgcctcccgtctcctgcggtctgctgcccggggtcatgcgccatgccgtgatcgggttcacgggggccgtcgaacgcccgatcatgcccgacgagctgcttcgggccgacgaggtgttcctcaccaactccctgatgggtgccatgcccgtggccggtatcggcggcgtggaattcgaaccggggagcgtgtcgcgcgacgtgaacgacgcctatgcccgcatggtggcgcggacgcgggtccgggcgcagacgaaggagttccggtgagcgcgcaggtgttcaagctcaggacgttccgaccgcttgccgacatcgtggagtgcgtgcgcggcgaggaacgcttcgcgttcctggactcctcgatgccgggggcgcaggggcgctactcgatcctgggactcttcccctatcttgtgatcgaacatgggcggggcggatgcctcgtcgacggcgttgccgtggagggtgatttcctcgatgtcgtgaagaagcggcttggaccctgcgatggcgcgcgcgatccgcgtctgcccctcacgggaggcgcgatcgggtatctgggatacgatttcggccgcgaatcgtgcggcgtgccgaccaggcacgatcccgtcgcggccacaccggaggcgagcatggtcttctacgacctgctactcatcgaggacgtccggtcgcgggcgttgttctgttgctgccaggggcggacgatgacggccgcccacgccctgacatgggcgcaggacctggtggattca

SEQ ID NO: 178 - DNA, 47267 bp, Unknown
  R101_18m  MAG No. k141_6199
accggcttgcctttgagcccggggttgcgcgccacctccaatgaggcatagaaggcatccatgtcgatatgcagcacggtgcatccggtctcgtcgtggccccaatcgcgtttggcggcctcaagtctcggtgcggtgctcatgccaccattgtaggaatgccgaacgaggtcatgctcactatgtggcgcgcatggcgcggcgctcattgtcgtaatgccaaatatcgccggaattccaagggtttgcgcactgtgcggctgtttcgcatggtgggtgcgattccacggaatcgtccacattgcgtcactgtccgtaacgccttccaagtcgctgcgcgctgtcccgactctccgagtagcgtaaacctcgtgaagaaggcagtggtcggtatcctcaaccgtgttcccgtggtgcttatcgtgattggtgaggcactggtgatttatttggctacggccgtcgccaaacttgcgttcacccagctcgacccgctgtattcggtgtggtaccgcgtgggattcatggcggtgctgttgctgctgtggtgcaggccctggagcaaggctaagcgagcgcagctgtttcaccgcgacgcccgcggctgggggctggtcgtactgctcggctgctcgctggtgctgatgaataccctgttttatgtggccatcagcaatatggatatgggcattgccgtgtctatcgaatttttgggaccgctttcggtggcggtgattaccggcaaaagctggcgtgagcgggtcggtatcggcatcgcggcggtcggtgtggtgctgttggccggcatatcattggccaatccgtccggcaagggcacgtttttgtatggtctgattgcgattttgatcggcgggtcgatgtggggcatgtacatcatcaccggccggcgcgtggcggctggcggcaattcgctggataatctgtgcatcgccgtgaccatcggctggctggtccagtccctgttccttggcgtgccggctgtggctcatgtggttcaccccaaggccgatgccacgtgggcgcttgagcccggcggctcgctgaagctgctggctctgctgtttgtgatttccctgatggcctcgttcattccctatgtggtggagcagatcacgctgcgacgcaccacatccggcgcattttcggtaatgcaatccatcaatcccgccatggcggtggccgtgggactggcgtttggcgagattcccagcgttggtgaaatcatcggtgtggcgttggtgatttgcgcggttatcgttacgttctccggcgatgccgcgcccgcggacggtcaataatgtgtcgttcggcacgccgtatccgcaggacgtggtacagtaatttgctgttgcgcattattgcgtaacgtggagtcatgcctgagtggccgataggggcaccctgctaaggtgttagtcgtgtaaacggctcgagggttcgaatccctctgactccgccgattaaggttccgggtgaaagcttggaatcttttttgttttccggaaactcctgatgatgggcctgttcgcacttcgcggagtcagagggattcgaaccccgggaatacggttctggtgggttgtccggatatctgttctgcgacgcattcctgggaatgtgtttctagtgggttgcttgggggtctgttttgtgaaactttcctgggaatgtgtcgctagaaataaccgaaataaccgaggacggtcggtctccgcttgtggtaagcggagtcggaggtacgccattgtccgtccgcctccaaaccgccattttagcgggtgaacgagtgtggcacctcggggaaaaggctaacaaacgaaagaagaatgtccactaagtgagacttttgcgtggtgttcgtgaatggtgattgaagattaaccggtttatgtcgcttgtccaatcgcttgcccatcgccttcctccccgcagtgtttgactgagatgggcggtaccctagagagagaagaaaagttccgaagggcgggcaaagatgagccatatcgctgggcaggggcaacatcgctccaactcgacacgaaccaaccgtgcggcgctgattatcgtgttcgtgatcgcgctcgccgttacgctgggcatcggcgcatggttcgcaacccatcgcacggacggcaatggccccgtacgcgccggagtgtcggacgtcgcgttgaataaagcgaagaacacgcccaaaccggtgaccgaacatcacggcaattcaccggattgcccggatacggactgcatcgccatgctggtcaacggcgatttgttgttccatgagggattgtggagccatttccaaggcccgaaccccaacgccacggatggcaccgccttcaacttcgacccgctgttcgcgccgatgaagcagtacattcaggcttcggacatcgccgtgtgcgaattcgaaaccccgatcgcccagcgcggcggcccatatgccgcgtacccgatcttcaacattccgccggaagtggcggatgccgcccgcaacgtgggatacaacgcctgcacacacgccaccaaccattcctgggatcagggggcggatggcatcgcccgtctgtgggacacgcttgaggccgatggcatcgcccagaccggctcgtacaaaaccgaagccgactccaccaaaccgttagtcatcgattccccgaccggcggcggcaagctaggtctggtcactggcacggtctccctcaacggcatgaccgccgacgaggactggcaggtggatcgtctgcgcgaagacggcgacccgaatcacggcagcgacatccagcgcgcggtagacaaggccaacaaggcccgcgagcaaggtgccgatgtggtggccatcgccatgcactcggtgcaggaataccttgattacgccgattcctggcagatttcggaagcccatgagcttgccgacactggtgccttcgacgttatctacggtgccggctgccattgtgcgcagcccatcgagaactataacggcacgtggattgtctacggtctgggcaacaccgtcaccgagtcggcgaacacgccggaaaccttggtcaacaaccagggtgtgaccgcacgcatccagttcgccggcaagaagggcgtcaaggggtcgtggcgcgtcaaccgcatcgactgggtgcccaccgccaacgtgcatcaaggcaactaccaatggtgcccgatatccagcgaccatcccataggcacatgttgggacgaagcctacgacgctcagatacgccaacgcatctgggatgtcatctattcgatgggcgcggaccagaacgtcgtcaaggaatggaacatcacgcaggagcaggcggcaaagcaatagttgctcggcttggtctcaaggaggggaagccgcaaggtgacgcttttcccgtcggcctcctaatgtggagcccatgaccgagatttacgaaacccaaagcgaacgcaccgatctgcccctcgtcgtgatgccgtccgtgctcgacgcgatgatcgagcccatcaaggcccagttccccgcgctccacgacgttgcccgcgtgcgtatgttcgaggaattcacgtccgacgaggcgaccatagccgagcgtctgaaggatgccgacgccctgctggtgggcggctaccacatttcggatgatctgctgcgcaccatcagcgagcaggggcacgtcaagtgcatcgtgttctgcggtaccggcgtcgccagctacatcaatctcgataaggcgcgcgagctgaagatccgcgtctgcaacgccgaacattatggcgatcacgccgtggccgagcacaccttcgccctcctgttcgagctcatccgccgcgttggccaactcgataaggatgtcaaggccggcaactgggcgtgggccggcggcgatggactgcaactcgccggccgtcgcatgggcatcatcggactgggcggcatcggcgccaccgtggccggcatcgcccgcgccttcggcatggaggtcgccgcatggaattcgcatgtgccgcccgagcatttcgaacgctccggcgccactccggtcgacgatctcaacgagctcatcgaaaccagcgacgtcatctccgtccatctgccgctcaacaacgccacgcgcggcatcgtcaccgccgagaaccttgcgcatgtgaagcccggcaccctgttcatcaacaccgcccgctccgaagtcatcgaatccggtgcgctgcttgcccgactgcaaaagggcgatgttcccgccgcactcgacgtgttcgaccacgagccgctgcccgccgacgacgccatctgccatgtgcccggcatcgtcctgaccccgcacgtcggctggcgtaccgacggcgcgttcaaggagctcacccgccagatgatcgcctgcctgaccgcctacttcgccggcgaggactataacgtcgtcgtctccgaacactgatagtcctgtctagcctcgcgctcaatcgaacacccagtcagccgaccaccggaacacgcttatgcagacgattctcaacacgtccgacgatcccgcccacgattcgctcgtcgaaaaaaagtccgaattcatcggcgacgctgcccatgtcgatacgctcgacgaggcgctcgcgttcgtggccgcgatccgcgagcagcatccgaaagcccgacacgtggcgtatgccgccgtgtgcggaggcgcggatgggcgactgtccgaacgcatgagcgatgacggcgagccgtccggtaccgccggcaagccgattctcgacgtactcaagcagtccggcaccaccgattgcgtggttgccgtcaccagatatttcggtggtattctgctgggctccggtggtctggtccgcgcgtactcatccgccgcatcattggcgatgaaagccgcccgcgccgcccgcatcatgaccgccaagcgataccgggtccgtctcgaatacccgcagctggcccgattccagcagatcctggcgcagctcggtggcagtcaggaggatgaatcgtatgcggtgaacgtcgaactgaccgcggtggtgccgcaggatgattgcgcgcgattcgaggagcgtgtgcgggaagcgttcaatgccgcggtggtgccggatccgattgacgtggtcaacattccggttccgctcgcgtgacgcctgtatgactaagctgggcatcatgaccgacgagaacatcaccagccagcagacccagcccaccgaggccgcaactgaggctgcaaccgacacggaagcccagcagcgggaccaaggcgcgcaggacgcagccgagtccgccgctccggtggatttcgaaccgctgaccgctacatacgagcgtctgcgtcattccaccgacccggccgaactgtccgaattcgcccgtcggccgttgcctgaccgtgccgatcaggcggcgttctcccgcgccaccgcacttttggaggctgtggccggcaacccgcacaccccggtggccgatcgcgtgttcctcgccgacaccatgccgttcccgaacgtattggtcaaactctccgaagaccccgaaccgtccgtgcgccaagccgtggccgccaacggggatgacaagaattggctggtcggccgcctgaccaaggatccggtacctgcggtccgggatacggcgttgaaaaacaagcgcaccagctggaagatgcggcttgagggtgcgcaggaccccactgcggatgcggagacattggatttcttgggcgtacttggcaccgaatccgaagagggagcaccggcagtgctttcctcgatggtccgccgtgccgtggcgctgaaccccaatacgtccgaagcgatgcttgccaaattggccaacgacccctcggccgaggtgcggcacgccgtggaaagccgccgctaagcacactattgctgtgttttgccgtgcaaatttggccggcaatcaccctctattcaccattgtgagcgctcacatctcactatgtgagggtaaaaagtacataatttggcggaatcacggcattttgcttacggtgtggcgcaatcaaacggcgttagactggggctatgagtgagattaccgagagtgaagagcgtctggcccgtccgttgattcgactggccaagttggtcggtgtcggcacgagttatgtgggcatgagccatgactaccacgagatagacgatgacgtcctgatcgaggtgctggcagcgctgggcatcgacgcctccagcgagaacgcccaactcatcgccatccgacgcattctgaacgagcgttactcccgattggtggcacccaccgtgctgcatatcgccggtagcgaggaccgggtgctggtgaacaccggcattctggacgtgccttcggcgagcatcacgctggagaacggcgagccatatcagggcaccgttgaagttggtcctggagatggatcccaggcctacgacttggatggcacgttcatttcgaatgcggctgtggtcattcccgccgatctgccgattggctaccatacgctgcacgtcaaggtcgccgaccgtgtgcaagacgccactttgatcagtgcacctgatcgcgtcgatctgcttgacccgatgaagggcggcagtctgtggggctggatggcccagctgtactcgattcgctcctccaactcctggggcgtgggcgattacgaggatctgaagaccatgctggtggacgccaggcagaagaccggtgccgacttcgtgctcatcaatccggtacatgccgccgagccggtgtccccgctcaccccgtcgccgtatctgccggtaagccgtcgcctgatcaacttcacgtacatccgccccgaggcgatcgccgaatatgccacgctcagcgcgggcgacaagaacgccgtcgacggactgcatgccgacaccgaaccgctgaacggtgattcccagctcatcgaccgtgacgccatgtggcgcagcaagatgcacgccctgtggattatcttcaaggccggccgtaccgccgaacgccaaagcgcgttcgaccaattcaaggcggactgcggttccgacttggaggcgtatgccacgtggtgcctgtgctacgacaagtggggagcgcccaacggcgaggagagcaactgggagcgcaagttcaaccgcaactccccggaaatcgccaatctgcgcaagcagtacccggacactttggacttctaccgctggctggaatggattgccgccgagcagctgtcctccgcccagcaggcagccaaggacgccggcatgcatatcggcatcatgtccgatatggccgtcggcgtgcacccctccggcgctgacgtgtggtggaatcccgagcgcttcgccaagggagccacggtcggtgcaccgccggacatgttcaaccagcaaggccagaactggagccagccgccgctgagcccgatcaatctggaggccaccggctacgagacctaccgcaatatggtgcatggcatgttcgcccgtgccggtgcggtgcgcatcgaccacattctcggcctgttccgcctgtggtggattcccgagaaccggtcggctatggatggcgcttatgtgtactacgactcagacatcatgctgggcgttctggccatcgaggcctctcgcgccggcggcgtggtcgtaggtgaggacctcggcgtggtgccggaccatgtggccgattccctgtcgagccacggtattctcggttgcgccgttgaatggttcgagcagtgcgacggcgtgttccgcgccccctcccagtggcgtccgtacgcattggcctccgtgaatacgcacgatttgccgccgaccgccggttacctggaatacgagcacgtcaagattcgtgagcgtctgggcttgctgaccggcccggctgaggaattcgaagcctccgcaaaggccgagcaggatgcgatgctggccatgctggtcgagcagggctatcttgatgccgacttcgccgaacatcgtgaggatcacgaggcggatatcatcgacgcgctgtaccgcgcactgaagggttcgccgtgcaagctgctcgccgcctcgatcaccgacgcggtgggggagaggcgcgcgcagaaccagccgggcaccaacaacgaatacccgaactggcgcatcccgctggccgacgccaagggcaacgtggtaccgctcgaaaccctcttcgacacccccggcgtccaacgcttcgcccaaatcttcaattcctgacccactttacctccctctgacgagccgagtcgttaagcggacagtccggtggactgtccgtagacgaggcctgaacgaagcgatagctgagagaaggcagggaattgcctcaccgtaggcgagtcggttagccgaagtgggtgggagagaaaccataaataggggaagagaagccataaacccaatggagtgtccccagttgccctatgtcaagcccggcgatatactagtggattgttgtgtttccctaaggggtccttcaaagcgctatcccactcgccatcgaggactttcagggagcccacggataatgaggttcgatgcctcttggatgcggctctgaccaagccacgccaagcagctgagacccggaacacaatatagaaaaggtaatccattgaaaactttcactccgaagccagctgatctgactcatgactggtatgtcatcgacgccaccgacgtggtgctcggccgtctcgccacccaggctgcaatcctgctgcgcggcaagaacaagccgacctacgctccgcacgccgattccggcaaccacgtgatcatcatcaatgccgacaagattgctctgactggcaacaagatgggcaaggaactctactcgcactccggtcgtcccggtggtctgcgtcgtgactcctacgccgagctgctcgagaagaaccccgagcgcatcatcaagaacgctgtcaagggcatgctgccgaagaaccgtctggccaaggtgcagctcgaccgtctgcgtgtcttccgcggcgccgagcacccgcacaccccgcagaagccccaggtcttcgagatcgcccaggtctcgcagcaggccaagtgaaacctgagaggagataagaatcatggctgaaaacaccaacgactcccaggttgtcgagaccgaagaggagctcaccaactacaccaccgagaccaacgctggcgctggcaccggcacctccgcgatcgagccgggctacggcaccggtcgccgcaaggaggctgtcgcccgtgtccgtctggttccgggtgacggcaagtggaccatcaacggccgcaccctggaggagtacttcccctccaagctgctgcagcgtgaggtcaactctccgattgttctgctcaagctcgaaggcaagttcgacgctatcgtcctcgttgacggcggcggcaccaccggccaggccggcgctatccgcctcggcgttgcccgcgctctgaacgccatcgatcgtgatgccaaccgcgccgccctgaagaaggctggcttcctgacccgcgacgctcgcgtcgtggagcgcaagaaggctggtctgcacaaggcacgtcgcgccccgcagttctccaagcgttaatttcgcttgtcctgtaccgagcatacaaaggctctccgtggaattccgcggagagcctttgtgtttgtgtcgtgctgttttgagtgtgactcacacctgtttcatcagcgtgatgctcagcgccggcatggtccagacattgtcgtcgacgggagtgtccggcgtatcatccacaggggcatcaggcatatcatctgatacctcatcccgaggcgcggacgaggtgccgtttgcggcgtgatccgttgctggcatcgcgaattcgatggtatccgcttcatcctcagtcgaggattccgtgcgttgcatggccacttcttcgaccagcgtgcgtaccgtctcgctggcgtccggtacatgctgcgtccaaacggtggtgtcatcgttcaaatcgcattcctcgacctgaatgccatgcccggctcggcggccgttgatttcggccgagcaccatttaggcgtccagtgagtgtctggcggcaggtggaatgtgcggtcgtcagcggtgccgttgaccacaatgcacacgtccacctcactgttggacagcaatcgcatggtgaagctacgtacgcccagatcgaaccagtcacgctccatcggcgtggtgccgtcgggcaggaaccactgcacgcggcttgagggcttgagtaggccgagttgggtcagtcgggtgaagaagtcctcgtggtgatacaggtccagtgatttacgtagcgccaccagtcgagacacggttttcaggcgacgcatttcgcgtgtcttgttggtggaatacatccaatcccacttcagccacgtgatgtcgttgtcttggcagtaggcgttgttgttgccgtcctgtgtgttgcggaattcgtcgccggcgagcatcatcggcgtacccagcgagagcagcagcatgccgatcatgttcatggccgcctgttcgcgtgccgtgatgacgtctggatcatcggtgacgccttcgacgccgaaattggcggaatggttcaccgacgagccatcattattgttctcgccgttggcttcattgtgcttggagcggtatctggtgaggtccgtcagcgtgaaaccgtcgtggcaggacacgaaattgatggaggccggagcgccgcgcccgggttcggtggcgaacagatcggccgagccgcagagtcgcgtggccatctcctgcaaactgatacgaccgaaatcggagccgccgtccacatcctcaagccagaaggtgcgggccgtgtcgcggaagcggtcattccattcggcgaacggcacggagaattggccggtgcgccagccgaggttgcctagatcccacggctccataatgagcttcaggttgcccagcagcagatcggaacgcagggcgtagaggaacgggtgatgatgggtgaattcgccttccaggcgggccagcgtgacgccaaggtcgaaacggaaaccgtctatgccgatacgcttggcccagtatcgtaatgagtcgatggcaaaggtgaccacatgcgtgttggtgaagtccagcgtattgccgcaaccggtggtgtcttcgagtcgaccggtattggatttttgatggcgatagtaggccaggtcgtcgaggccgcgccagcagaccgtcgggccttcgacgccgccttcgcatgtgtggttgtagaccacgtccatgatgacttcgaagccggcctcgtgcagcgcgcgcaccatgtctatgacttcttggcgcacggcggccgcgcccttctcttgggctgctttggtggcataggagggttcgggggcgaagtagctgagggtggagtagccccagtagttcttgcggccgtgttcttgcaggaagagctcgtcctgcttggccataatcggcagcagttcgatggaggtgatgcccaatccctgcagataggcgagcgttgtggggtgggcgagtccggcgtaggtgccacgcaacgcttcgggcagccacggcgcgttggcggtgaagcctttgacatgcatctcgtagatgacggttttgcgccacggcacatgcgggtgctgcgggtcgccctcatgcttatggatatcgcgatcgtcgatggccacggacaccggcacatggccgagcgagtctacggtgctcatggcaccgtatgccgagccggttaccttgcgatccacgacatcgcattcataggagaaggcggcgggggtgagctccatggagccgtcgatgcccttgccatacgggtcaagcaggaatttgtatggattgaagcgcacgccgtgtttcgggtcccatgcgccgtccacgcggtagccataacgcatgccgtcccatgctttgggcaggtgcacgtaccacaggccgtagttcggtccggtcatgcggaacagggtctcgcgcagatacaaatgttcgataatgcgcgtgcacaccggaaactcatggatctgctggatgaacgaggcgttcgggtcttcgaacaggcggatggcgtcttggaagaaggcgccgggctcgtcaatgggctccagcacacacagccaaacctgatcggcagtttcggaacgaacaacgacgtcagccccaccgtcgtcagtgaagtacagccctgggcgagtggcgtaacgatgcaacggtgggtttttcatacctccattgtagacgtgttgtcacttctggtggaagcccttgatttcctgccgcgttccgcagcaccacagatatcgtcgagataattctcggcgaatcgcaatgcggcaccgatgatgttctggtcttcggcgcagtagctcttgcgcagattgaaatggtcggtgccgaacggactgcgtgcgatgacgcgcgccttcagatcctcgatgtcactgtcttcaagatgctgggctgcttcaccgccgacaatcacgtcgcccgcgatgatggatcgcgcgttgacgatggcctgcgccacataatccagccattcgtccatgcgctcgcgatgatgccgttcaccctgctcaagcacgctgaagaagccgggaatactttcgtaatcctcgggcaaggtctccggcgagcagtaggtgtccatgcaaccgcgctggccgcagtagcattcgcggccgcccggcaccagcgtcatgtgttcgatggcgccattgcacatattcggaccctgatacagcttgccgcccacgatcaccgcgccgcccgggcgtcgctccagatagacgcacaccgcatcggtgagcatggagtcgaaccatagctcgaccatggcggaggcatcggaatcgtggatcatcatgcacgggtaatggaccgactggctgatggtttcgagcgtaagccccgtgttgcccataatggtgccgaaggtgatggtggtggcgtcgggggagaggatgccttggatggcgaacgagacgccgagcactttgccgtgcttcttttcgacgtcggaggcgaagttgttgatgatgccgccgatacgctggtagtaaacgttggtgttgcggtaaggcagggcatcgttgcgtttttcgatgacgttgccgtacaggttaatcgcgcacaggcgcagttcgttggaccgcatcactacgccgatggcagtgcgatgatcgggattgaactcataattttgcgccttgcgcccgccggtggaatcctgcagttcgcctttgcggatgagtccgtcatcttctagggcgcgcagattttgggtgatggtgggcaggctgaggccgagttcgcgttccagttcctgcttggtgacatggctatggccatacagatactgggtcatggcactgcggttgtgcgctttcactgcggtcgatggcattgccctcatatttacccctttgtacgatgagatatatgtaagtatactttatgaaagtggctttcatgtgcctcgacgcggagattatgaggcaacaatcgtatatttgtaggcgattttgggcacttttttaaaccaattttctagaaatgtggggaaaatgagtacttttggaaacttgatttaagaaagttgtcggattgcgttgtctgcaagcatgtgattttcggtaaaaagtgaacaaaaagtaccaaatcgccgaataaagtgaggatttgttcgatatttcgcacaactcttaacaaaaactgttcaatatcgcacgtgaaacgccgtcgattttgtgcgtatgcatcacgccggaccgttcggtatattgtgactcaagtcacatatgcaatgtgacaacgcatcaccggccattttcggttactgaggcggtatcccgctggtgcaactgaggtgacgaggcgatggcccagaactttgccatataccccaagaagatcgaggaggaccccaagtggcagaagcaaagaagaaagtcgaagctgccaatccgaccccagaagagaagcaggccgcagctgaggccgaagttgacgcgctggttgcccgcgccaagaaggctctcgacgaattcgagaacctcgaccagaagcaagttgatcgtatcgtcgccaaggcctccatcgccgctctgaacaagcacctcgttctcgccaagatggccgtcgacgagaccggccgtggtctcgtggaagacaaggccaccaagaacatcttcgcctgtgagcacgtcaccaactacctggccggccagaagaccgtcggcatcatccgcgaagacgacgtgatgggcatcgatgaggtcgccgagcccgtcggcgtggtcgccggtgtcactccggttaccaacccgacctccaccgccatcttcaagtccctcatcgccctgaagacacgctgcccgatcgtcttcggcttccaccccggcgcgcagaagtgctccgtcgaggccgccaagatcgtgcgcgacgccgccatcgaggccggtgctcccgagaactgtatccagtggatcgagcacccgtccatccaggccaccggcgcgctgatgcagcacccgggcgtggccacgatcctcgccaccggtggtccgggcatggtcaaggccgcttactcctccggcaagcccgccctcggcgtgggtgccggcaacgccccggcctatgttgattccgatgtggacatcgtccgtgccgccaacgatctggtgctctccaagcacttcgattacggcatgatctgcgccaccgagcaggccatcatcgcccacaaggacgtctacgaccagctcatcaaggagctcaaggtccgtaaggcctacttcgtcaacgccgaagagaaggccaagctggagcagtacatgttcggctgcaccgccggttccggcgtcaagcccgtgctgaactccgtggtgccgggcaagtccccgcagttcatcgccaaggctgctggcttcgagattccggccgacgccaccattctggccgccgagtgcaaggaaatctccgacgacgagccgctgacccacgagaagctcgctccggtgcaggccgtgctcaaggccgacaacaaggagcaggccttcgagatgtgcgagaagatgctcaagctgggtgccggccacaccgccgccatccacaccaacaaccaggagctcgtgcgcgagtacggtgttcgtatgcacgcctgccgcatcatctggaaccagccttcctcccttggcggcatcggcgacatctacaatgccatcgccccgtcgctgaccctgggctgcggctcctacggcggcaactcggtgtccggcaacgtgcaggccgtgaatctcgtcaacatcaagcgcattgctcggaggaacaacaacatgcagtggttcaagatcccggccaagacctacttcgagccgaacgccatcaagtacctgcgcgacatgtacggcatcgagaaggccgtcatcgtgtgcgataaggtcatggagcagctcggcattgtcgacaaggtcatcgaccagctgcgcgcccgctccaaccgtgtgaccttccgcatcatcgactacgtcgagccggagccctccgtcgagaccgtcgaaaagggcgcggagatgatgcgcgaggagttcgagccggacacgatcatcgcggttggcggcggctccccgatggatgcctccaagatcatgtggctgctctacgagcacccggaaatcgccttctccgacgtgcgcgagaagttcttcgatatccgtaagcgcgccttcaagatcccgccgctgggcaagaaggccaagctcgtgtgcatcccgacctcctccggcaccggttccgaggtcaccccgttcgccgtgatcaccgatcacaagaccggctacaagtacccgatcaccgactacgcgctgaccccgtccgtggccatcgtggatccggtgctggcccgcacccagccgcgcaagctggcctccgacgccggcttcgacgccctgacccactcgatggaagcatacgtgtccgtgtacgcgaacgacttcaccgacggcatggccctgcacgcggccaagctcatctgggacaacctggctgagtccgtcaacggcgagcccggcctggccaagaccgacgctcaggagaagatgcacaacgccgccaccatggccggcatggcattcggctccgcgttcctcggcatgtgccacggcatggcccacaccatcggtgccctgtgccacatcgcccacggccgtaccaactccatcctgctgccgtacgtgattcgctacaacggccagattcctgaggagcccacctcttggccgaagtacaacaagtacatcgccccggagcgctaccaggacatcgcccgcaacctcggcatcgacaccggcaagaccccggccgaagccgtggagaacctggcgaaggctgtcgaggactaccgcgataacaagctcggtatgaacaagagcttccaggattgcggcgtggacgaggattacttctggtccgtgctcgatcagatcggcatgcgcgcctacgaggaccagtgcaccccggccaacccgcgcatcccgctgatcaacgacatgaaggacatcgccgtcggtgcttactacggcgtctcccaggcggaaggccacaagctacgcatcgagcgcgagggtgaggccgccactgaggaagcctccgagcgctgattgcaggcggttggcggctgctggcaccagcagtagccaccaaccgcggtgttgcagcttagtggctgcatagcggacacaaggagcccgaccccattacaggggccgggctcctttgcatatgtggcgctccctcagccggcaggtgcctccatggggcggtaacctactcatggggcggtaacttgcccatggggcggtgaaaaccccatggggcggtgtacgaaaacggctctattctgcggaaggtaaaattttaccgtccgccccatgggctaattaccgccccatgagggaattaccgccccatggaatcgctgagcgtcgctaaatcaccgcaataatgcagccaaaagcaataaagctggcaaacgcctcggtaatgccggtcaccacgggcttcaaggttgtgcgccgtgtaaccaccggcaacgcaacggcgcgggccaacagcagcacagtcatcgcaatcagatacgggctgcgtccagccggcacggcggctagcagcaatagcgccacatgccatacccacgaagccgccacgtacgaacgcttcccgcgttcccggatcatggttttgaccaccaaaaccgacccatactgcgtcagcgcaaacagcacggtggcaatcagcccgttcacgggcaatgaacccgcaggccaccaggcgtgaaggtcgaatatctggctcaaatccggcatattccgaatcgcggcgcgtgcggcggtgacatcagcggctgcgcacgaggcatgtgctgcgttgatgggaataacacatgccgtctcaacagcgttgccaaacgacgcgatcaccgtggccatggccgatgcggcaatcaccgacacggcattgccccacagcgagcgctccttcctcagccacgaggacagcatcgacagcgcaaccagtactatatataaaggagcccaacgcagtatgccggtatgcgtaatcaggaatggcaagccgatgacgatgagcgctacggcataagtgagcatcggcggcagataacggcgtgaaaagtgtgctttgaaccagtgcgcggcgctgaactgcacgcaatagcacacggcccacgtcgccaacagccaaagcgtatcaagattaggcccgccgataaagaagccagccacagcgggcagcataaccattacccatgcgccaggttggttgtcgaaccaatcgcgtttaagagtcttgcggcgggaagccatatctgtcatgatatcgcagcgaatggttctcaataagaaagatgtgagacctgcattgcgacaatcgaacataggaagtgcgagaagccagtgcttccgccattatgcaacatgtgcgattgttcggaaatgttcatttggctcacattgtgtttatgtgagactaatctcgttgagtatcgccctcggcgctggaaatggcctcggctatcggatcttggctgaagtcgtggttgcgataatcagggtcgtccaccggcagatgctgcaccaaggtatcgaacacctgactgtagattttgccgcgctcgagcaccgcatcgagcacatggccgccgaacgtcttgtcgtcggacaggaagtgctcgtggaatccggccacagccgcgccgtgaaacatcacgggggagaagtacccgagcatggtgcccttgacgtcgtggcgcaggaacacggcctgccggtcggccacctctaccagcgtggggtagggtgcctgctgcttgatgaccgcgcgtgtcttgatgaagctgaacgtgccgcgcacaattaccgaaaagaacgtgttcgcgcggccgttcgccttgacgatcttttcgttgagctcttctaggccgatatcatgacgctcgcactggtactggaaggccgcgcgatggctattagcgaatggcatggtgaagtcgtccggcacgcgttcggccacaccggattggcctatcttgtatgccacgccatccaggatgatgagctcgccgtccaagccctcgccggtgccgatgccggtgtcgccatgcttgagcaattcgccgatggtggtggtgccttccagcagccccggcacgagtaaggccaaagtgccgtgctgatataacacgttggcaccgtgctcacgaataggtttgatgttctttgccagtgattgtgtcacgagccttaagagtaattcgcgttaccgtccaactcaattaatcaatccatattcgccaacgtgagctgtgccactatatataggtaagtctcagaaggatgttggtaggcgacgccgagcggctatgccgcgaggtaatacgaacggcatgagcgcgacacgcgcgaattcctccgcgctgtcccacctcaatgcttgaataaacaagttgcctgatttgggctcgcaaattggaattaaaaaagcgagcgcgggccgggagacacttcaagtgaagtgacagccggaaaccgcgcactgatgtcggatgaccgccagaggacgtatgtccaagggaggccatgcgcgccggtgccctagaagcaggttggtaaacagtacaacgaacatcgctagaaagggcggacggcaatggcgggacagaaaatccgcatcaggcttaagtcctatgaccacgaggtcatcgaccaatcggcgaagaagatcgtcgaaacggtgacgaacgcgggcgcaactgttgttggccccgttccgctgccgaccgagaagaacgtcttctgtgttatccgttctcctcacaagtacaaggattctcgcgagcacttcgagatgcgcactcacaagcgcctcatcgacatcgtggacccgacccccaaggccgtggactccctgatgcacatcgatttgcctgcggatgtcaacattgaaatcaagctgtaagggaggaggaagcattatgtctaatcgcaaggctctgctgggcaagaagctcggcatgtcccaggtgtgggacgagaacggcttcttcgtgcccgtcactcttgtcgacgtgtccaccaacgtggtgaccgccgtgaagaccgaggaatctgacggctacaaggctgtccagctcggctacggcgccatcgaccccaccaaggtgaccaagccgctggctggccactttgccaaggccggtgtcaccccgcgtcgccacctcgtcgaggtgcgcaccgacgacgtcgatcagttcgaggctggccaggaactggccgctgacctgttcgaagagggtgctgaggtcgacgtgaccggcaccaccaagggtaagggcttcgccggtaccatcaagcgttggggcttcaagtcctaccgccgtactcacggttctcacaagaacgagcgccgtcccggttctgtgggcgcatgcgccactccgagccgtattctcaagggcaagcgtatggccggccgcatgggtcatgtgaccgccactacccagaacctgaccgtcgtctccgctgatgtcgagaacggcatcctcgccatcaagggcgccattcctggccccaagggcggcatcgttctcgtccgctcggctgtgaagggagcctgataaaccatggcaaacgttactctgaacgtcaccgacgccaagggccaggccaccggcaccgttgaagctcctgaggctctcttcggcgtttccgccgaggatgtccaggctcacatcccgctgatccaccaggttgtcaccgctcagctcgctgctgctcgtcagggcacccacgccaccaagactcgtggcatggtttccggcggcggcaagaagccgtggaagcagaagggcaccggtcgtgctcgtcagggctccatccgtgcaccgcagtggtaccacggcggcaccgtgttcggcccgcagccgcgtgactactctcagcgcacccccaagaagatgaaggccgcagctctgcgctacgccctgtccgatcgcgccaacgccggtcgcgttgccgtggtggagttcggtatcaccgagccgtccaccaaggccgctgtcgccgccctggccccgatcaccgcggacaagttcaccacggtcgtcttcactcgcgacaacatcaacgagtggctctccgtgcgcaacatcccgaccgttcacccgattttcgtcgatcagctcaacacgtacgacgtgattacctcgcagtacgtggtcttcaccaaggaagccttcgaggctttcgtggctgccaagaccgagccgaaggaggcctgatttagatggtcgctattcacaagcccgctcacgacgtgattcttaagcccgtcgtctccgagaagagctacgccgcttccgaccgtggccagtacaccttcgtggtggctccggatgcgaacaaggtgcagatcaagcaggcaatcgaagagatcttcaaggtcaaggtgacgaacgtcaacaccctcaaccgcgctggcaagaagcagcgcactcgcaccggtttcggccagcgcgcttcccagaagcgtgcgatcgtgaccgtcgccgagggccagacgatcgacatctttggtaactgaaggctagccgagaaaagttaaaggaagaactacattatggctatccgcgtttataagccgacgaccgcaggccgccgcaacgcgtccgtctcggatttctccgagctgactcgttctacgcctgagaagtcgctggttcgcaagaagtccaagaccggcggtcgtaactcttacggccgtatcacctcccgtcatcgcggcggcggccacaagcgccagtaccgtctcatcgatttcaagcgttgggacaaggacggcgtgcccgccaaggttgccgagatcgagtacgatccgaaccgctccgcccgtatcgccctcctgcacttcgcagatggcgagaagcgctacatcatcgcgccgaagggcatcaagcagggcgacgtcatcgagaccggtgctcaggctgatatcaagccgggcaacaacctgccgctgaagaacatcccgaccggtaccgtggttcacgccatcgagctccgcccgctgggtggcgccaagatcgctcgttccgctggtgctgccgttcagctcgtcgccaaggatggcgcctacgctcagctgcgtatgccgtccggcgaaatccgcaacgtcgacgcgcgctgccgcgctaccgtcggcgaggtcggcaacgaggaccacgccaacattcagctcggcaaggctggccgcgcccgctggatcggccgccgtccgatcacccgtggtgagtccatgaacccggtcgaccacccgcacggcggtcgtacccgcggtggtaagccgccggtctccccgtggggcaagggcgaggttcgtactcgtcgtccgaagaaggcttcgaacaagatgattgttcgtcgccgtccgtccggcaagaaccgcaagtaagggagtatcgagaagatgactcggagcatcaagaagggccccttcgtcgacgcccacttgcagaagaaagtcgacgagcagaacgagaagggcaccaagaacgtcatcaagacgtggtcccgtcgttcgatgatcacccctgatttcatcggacacaccttcgccgttcatgatggtcgcaagcatgtcccggtgttcgtcaccgaggccatggttggtcacaagctgggtgagttcgcccccacgaagaccttcaagggtcacgtgaaggacgacaagaaggcccgtcgctaaggataaggaatagaacatggaagctaaagcaatcgctcgtcacgtccgcgtgacgccgcgcaaggctcgccgcatggtcgacctcatccgcggcaagaaggcgaccgaagccgtcaccattttgaagttcgcccctcaggctgcggccctgccggtccgcaagaccctggagagcgccatcgccaacgctcgcgtgaaggccgacaaggccggcgagccgttccgcgagaacgacctgtacatcaaggagacctacgttgacgaaggtgtgaccctcaagcgcttccgcgctcgtgcccagggccgcgccgctcgtatcaacaagcgcacctcccacatcacggtcgtcgtggctaacaaggaaggagcccgctaaagatgggtcagaagatcaatccgtttggctaccgtctgggcatcactgagaaccaccgctccaagtggttctccgactccaacaaggccggcgaacgctaccgcgacttcgtgcttgaggatgatcagatccgcaaggagatgagcaaggacctcgagcgcgctggcgtgtcccgcatcgtcatcgagcgcacccgcgaccgcgtccgcgtcgacattcacaccgcccgtccgggcatcgtgatcggtcgtcgtggcgccgaggccgagcgcgtccgcgccaagctcgagaagctgaccggcaagcaggtccagctcaacatcttcgaggtcaagaacgccgcgctggacgcccagctcgtcgctcagggcatcgctgagcagctgaccaaccgcgtcaccttccgtcgtgccatgcgcaaggcccagcaggacgccatgcgcgccggtgccaagggtatccgcatcaagctctccggccgcctcggcggtgcggaaatgagccgttccgagttctaccgtgagggccgcgttccgctgcagaccctccgcgccctcatcgattacggcttcttcgaggccaagaccacgtacggccgtatcggcgtcaaggtctggatctacaagggcgacatgaccgaatccgagttcgaagagcagcaggctcagcagaacaaccgtccgggccgtcgtggtggcgatcgccgcccgcgccgtggcaaccgttccgccgccccgcaggccgtcgaagcccccaaggctgaggctcccgccgaggccgctccggctgcagaaacgaaggagtgagcaagaatgcttatccccaagaggactaagtaccgcaagcagcaccgccctgtgcgttctggcatgtccaagggcggcaacgagatcaacttcggtgatttcggcatccagtccctcgccccggcctacgtgaccaaccgtcagatcgaagccgcgcgtatcgccatgacccgctacatcaagcgtggtggccgcgtgtggatcacgatcttcccggatcgtccgctgaccaagcacccgctcggtgcccgaatgggttccggtaagggtgccccggagttctggattgcgaacgtgcgccctggtcgcgtgatgttcgaaatcggtggtgtgtccgaggacgtcgctaaggaagccctccgccgcgctatcgacaagctcccgatgaagtgccgcattatcgcacgtgaaggtggtgatatctgatggcagtcggtaccgctgattactccatcaagaatctcaacgagaagaccaacgcggaaatcgaaggcttcctgaagaagtccaaggaagagctgttcaacctgcgcttccagcacgccaccggtcagctcgagaacaccgcccgtctcaaggctgtcaagagcgacatcgcccgcatgtacaccgtgcttcgcgagcgtgagcttggcatcagccaggagccggccgctaccgaatccaaggagaagtgattatggctgaagagcgtaacttccgtaaggttcgccgcggctacgtcgtgtccgacaagatggacaagacgattaccgtcgagctcgagcagcgttcgacccacccgctgtacggcaaggtcgttcgttccaccagcaaggtcaaggcccatgatgaacacaacgacgcccacattggcgacctcgtgagtattatggaaactcggcctctgagcaagaccaagcgctggcgtctcgaatccatcatcgagcgcgccaagtaagtaaagttcggcaaggctcgccatttaccggggcattatgggcaaccacgatgccccggtaaatggggagaaccagctcggctaaggagaatcaatgattcagcaggaaacgcggcttcatgtcgccgacaacacgggtgcgaaggaactcctcgccatccgcgtgctcggcggatcgaagcgacgctatgccggcatcggcgacgtgatcgtcgcctccgtcaaggacgccattcctggcgggtcggtcaagaagggcgacgtggttaaggccgttgtcgtccgtaccgtcaaggaatcccgccgtgcggatggttcctacatcaagttcgacgagaacgccgccgtcattctcggctccggccgtgaaccgaagggcactcgtatcttcggaccggtcggtcgtgaactgcgcgagcacaagttcatgaagatcgtgtccctcgccccggaggtgatctgacatggcagccaagatcaagagcggcgacctggtcaaggtcatccgcggcaaggaccgcggcaaggaaggcaccgtcaagcaggtgctctccaacgatcgactgatcgtcgaaggcgtgcagatcgtcaagaagcacgtgcgtgcaacgcagcagggccagcaggctggcatcgtctccactgaggctccgatccatcgctccaacgtgatggtcatcgacccggagaccaagcagccgacccgcgttggcatcaccgttaaggaagaggcgcgtgacggcaaggtgaagaccgtgcgcgtgcgcgtcgccaagaagtccggaaaggagctggcatgaccgatactactgtcgaagcgccggccaccccgcgcttgaaggtcaagtacaacgagcagatcattcctgagctcgagaaggagttcaagtactccaacccgatgcaggttgcccgtgtccagaaggtcgtcgtctccatgggtgttggtgccgctgcccgcgactccaagctcatcgaaggtgccgtcaaggacctcaccctgatcaccggccagaagccgaagatcaccaaggccaagaagtccgtcgcgcagttccacctgcgtgaaggccaggccatcggtgcgtacgtcaccctgcgtggcgaccgcatgtgggagttcctggaccgtctgctgaccctcgcgctgccccgtatccgcgacttccgcggcatcaacggccaccagttcgatggtcagggcaactacaactttggtctcaccgagcagtccatgttccacgagatcgatcctgattcgatcgatcacgtgcgcggtatggacatcactgtggtgacctccaccaaggacgacaaggaagcttacgcgctgctgaagcacctcggcttccccttcaaggagaactgatatggcaaaaaccgctcttaagaacaaggcggccggcaagccgaagttcaaggtccgcgcttacacgcgctgccaggtctgcggtcgtccccactccgtctaccgcaagttcggcctgtgccgcatctgccttcgtgagaaggctcaccgcggtgaactgcccggcgttacgaagtccagttggtaaacatcgacgctgaaggtccgcggcccgaacgcttctagaagaagcgtgagggcggcggaaaccatagcgagaaagggcaacaagcccaaatgacaatgacagatccgatcgcagacatgcttacgcgtctgcgtaatgcgagcgcggccaagcacgaaaccgtggatatgccgtactccaagttcaaggcgaacatcgccgagatcctgaagcgcgaaggctacatcaaggacttcaccgctaaggaagccaaggtcggccagactcttgaggtcaccctcaagtacggtccgaacggtgagcgttccattcagggcatcaagcgcatctccaagccgggccttcgtcgttacgcgaagtccgactccctgccgatgccgctcggtggcctgggtatcgccatcatctcgacttcttcgggactgctgactcagaaggaatgcctcgaccgaggcattggcggcgaaattgtcgccttcgtgtggtgagaaaggagagctgaaacatggcatcgcatattggtaagctccccatcgccatccctgctggcgttgaagtcaagattgaaggccagaacttctccgccaagggcgctaagggttctgactcctacgtggttccggaaggcatcaccgctgccgttgaaggcaacgagatcgtcctgaccgccgctgatgacctgcgtccgacccgtgccaagcacggtctggcccgctccatcatggccggcatggtcaagggtgttcacgatggctactccaagactcttgagatcgtcggcaccggttaccgcgccgtcgccaagggcaagggcatcgagttcttcctcggctactcccacaccatcaccgtcaacccgcccgaaggtatcaccttcaaggtgaccgacgccaaccacgtggttgtcgagggcattgacaagcaggctgtgggccaggtcgccgccaacatccgcaagctgcgcgctccggaaccctacaagggcaagggcatcaagtactccgatgaacgcatcctgcgcaaggctggaaaggctggtaagtgatatgagcgttgctattctcggaaaaggcaagaaggtagctctcaagcgccgtcacgcgcgtatccgcaagcgcatctccggtacccccgagcgtccgcgcctggtggtcacccgctccaaccgtcacatggttgctcaggtggtcgacgataccaagggtattaccttggtgtccgcctccactcttcaggccgacttcgccggtttcgaaggcaccaagactgaggccgccaagaaggtcggcgagctgatcgccgagaaggccaaggctgccggcatcaccgcagtcgtgttcgaccgcggtggcaacaagtacaccggtcgcgtcgcagccgttgctgatggcgcccgcgagggaggtcttgcactgtgagcgacaacgaaacgaaggaaacccaagtggctgaagaaactcagaacactgtggcgaccgaatccaacaacgaggaccgcaagggtcgtcgtggccagcgcggtgaaggccgtcgcggcgagcgtcgtaaccgtcgtgaagaaaaccacggcgacgagctgctcgatcgcgtggtgaccatcaaccgtgtgtccaagacccacaagggtggccgtaccttcagcttcgctgcactggttgtggtcggcgacggcaacggcaccgtgggtgtcggctacggcaagtcccgtgaagtcccggccgccatcgccaagggccagctggacgccaagaagcacatgttctctgtgcctcgcgtccgtggcaccatcacccacccggttcagggtcacgacgctgctggcaccgtcctgctgcgtccggccgccccgggtaccggtgtaatcgccggtggctccgtgcgcgccgtcatggaatgcgcaggcatcaccgacgtcctgaccaagtcgatgggctccgccaccgccgttaatgtggtgcgcgctaccgtcgacgccctcaagcagctcgaagagcccgaggagatcgccgcccgtcgtggcctggcgctcgacgaggttgctcccgatgctctgctgcgcgcccgtgccgccggcattgccgaggctcgcaaggctcgcgaagaggctgctgccgctaaggccgccgaagagaaggatggtgagtgatactcatggctaagaacctgaagattaccctgcaccacggcatcgtgaaccgtaccccggctcagcgcgccaccgtcaagaccctcggcctcaacaagatcggtaagaccgttgtccgcgaggacaccccggccaaccgtggtctggtgaacgccgtgcgtcacctggtcaccgttgaggaggttgactgattatggcagataacgaaatcctgcagatgcacgacctgaagcccgccccgggcgccaagaaggaccgcacccgtgtgggccgcggtgaaggctccaagggtaagacctccggtcgtggcgccaagggccagacgaagcgtaaccacgtgcgtccgggctttgaaggcggccagctgccgctgtacatgcgcctgccgaagcttcgtggcttcaagaacccgttcaaggtcgagttccaggtcatcaacatcgctcgtctcgtggagctcttccccgagggtggcgaggttgctgtggccgacctgatcgccaagggcgctgttcgtgacaacgctccggtgaaggttctgggcgacggcgagaccaccgtggctttcaccctcaagggtgttaaggcttcggcttccgccaagtccaagatcgaggccgccggcggttccgtttccgaggactgattagtcctacggggagcgcaataggctgtacaacccccgtccgccaataggtggacgggggttcccttttctcaaaaattgttgttctgagcgcagagaagcagtctcaacacaatgatcgttttgagtatgcttcccccgttcagtacgacggagcataattcaggtaacattcgcgagacatgaagtggccgaagtaggcactgtagactatgctcattcgttagtttgtgtatttcgcgtgattggcgcgctattgggaggaaatctaggtgaggacactaatccaggccctgaagaccaaagagttgaggaagaagattctcttcgtcctgttcatcatcatcgtctaccgcatcggttcgttcattccgacccctggcgtggactacaacgtggtgaacaagtgcatggccactgtcggcagcgcctcccaggagaacttcatcggactggtgaacctcttctccggtggcgctatgctccagctgtccatctttgcgctgggcgtcatgccgtacatcaccgcgtccatcgtggtgcagctgctgcgcgtggtcatcccgcgcttcgaggccctgcataaggagggccagtccggagaggccaagctcacccagtacacgcgttacctgaccatcggcctggccgtgctgcagtccaccaccatcctggtcaccgcccgctccggtgccctgttcaactaccgctgcgaccaggtcatcccggacggctccgtgtggaacctcgtggtcatggtcctcatcatgaccggcggcaccggcctgatcatgtggatggccgagctcgtgaccgacaagggcatcggccagggcatgtccatcttgatcttcatgtccatctgctccggcttcctgccgcagctgtgggagatcggctacggcaccaacggcaagaacggcgactggaccaagttcggcatcgtcgtgggcgtgctcgtggtcatcctcatcttcgtcgacttcgtcgaactgtgccagcgccgcgtcccggtgcagtacacgcgccgcatgatcggccgtaagatgtacggcggctcctccacctacctgccgctgaagatcaacatgtccggcgtcatcccgccgatcttcgcctcctcgatcctcgccatcccgaccctgatcgcccagttcggcaagtccgaccagtcctgggtcaagtggatcaacgccaacttggcgaacaccacatccgtgtggtacatcgccctgtacgcgctgatgatcgtgttcttctgcttcttctacacctcgatcacgttcaacccggacgagaccgcggacaacatgaagcagtacggcggcttcattcccggcatccgcgccggcaacgccaccagccgttacctgacctacgtgatgaaccgactcaacaccgtgggtgccgtctacctgctgttcgtggccctgatcccgaccgtgctgatcatggctctcggactcaacgccaagctgccgttcggtggcaccacgatcctgattatcgcgggcgtgggcctcgacaccctgcgtcaggccaaggcccagaccgaacagttccagtacaccggcttcctgttcgaaaacgtggaccacaaagaaggctgacgcccgcttggcagcggtcgcccgcaatgggcaggcggccgcgcgaggagcggaacagtccagtggactgttccacgacggagcaatctttcttccacatataactcaatggctcccctaaccaagggagccaaaaccgtattaataaccgacacaaaaggagaccaccatgcgtctgctcatcatgggcccccagggcgtgggcaagggcacccaggctgctctgctcgccgagcacttcaacatccccaccatctccaccggcgacatcttccgctacaacatcaagaacaagaccgaactcggtcttgaggcgatgagctacaccgacaagggcgagctggttcctgactccctgaccaacaagatcgtcaaggatcgtctggccaaggaagactgcaataacggctggatcctcgatggctacccgcgtaacgccgcccaggtcaccgctctcgacgagatgctcgccgacctcgacactccgctcgaccacgtggtggccctcgaagccgcccgtgacgtgctgctggagcgtatgaagaagcgcgccgccgagcagggccgcgctgacgacactccggaggccatcgccaagcgcctggagacctacgagaaggaaaccgctccgctgctcgacatctacgaatcccgtggcctgctcgtcgtggtcaacggcgtcggcgacatcgacgagatcagcggccgtatcatcagccacctcgagtagtaggttcggcagcccggccaacaagccggagtgatgccgaaataccacatcaacgtttccatacccctgtgcgacacgccgagtgttcgtacaggggtatgtgcgtatatagttgacagttggtgtgtcttcggatatgccatagtaatcatccaacggaataggactagaggcacatggcaaaagacggtgtgattgaagtcgaaggacaggtagtggaagcactgcctaacgcgatgttccgcgttgaactcgagaacaagcacatcgtgctcgccacgatttccggcaaaatgcgtaagaactacattcgtattctgccgcaggatcgtgtcgtgctcgaaatgagcccttacgacctgaaccgcggacgcattacgtaccgttacaagtaaaggtacacaagaaaaggataaccatgaaggtcagccctagcgtgaagaggatctgcgaaaactgccgcgtgatccgccgtcacggccgcgtcatggtgatctgcgtcaacccgcgccacaagcagcgtcagggctgagagcagattctccagcggcactaagtaaataaggcactctctcacagtgcttcccgcaagggaacgacactgaaccacgggtacgtaggcccgtgccgggtaaccgggcgagcgggtgcaagacctacggcaacaagaaggaatcgcaatggcacgtcttgccggagtcgacatccccaatgagaagcgcatcgagatcgccctcacctacattttcggtgtgggtcgcactcgtgccaaggaaacgcttgccgcgaccggtatcagcccggacatccgcgtcaaggatctcaccgacgagcagctgattacgctgcgtgactacctcgaagccaactacaagatcgagggtgacctgcgtcgtgaagtcgatgcagatattcgtcgcaagattcagatcaactgctaccaaggccagcgtcaccgtaagggacttcctgtgcgcggccagcgcaccaagaccaatgctcgtacccgcaagggcccgaagcgcacggtcgccggaaagaagaaggccaccaagtagtcggtggcatgattcgggccacgggatgatttcatcccatcgcccgaacgtcaacaacaaagttcgttactaggaaacgagggtcaatggcagcgcctaagcaagccgctcgtaagccccgtcgtcgcgaccgcaagtcggtcccggtcggccaggctcacatcaagtccactttcaacaacacgatcatttcgatcaccgatccgtccggcgccgtggtgtcctgggcgtccggtggtgatgtcggcttcaagggctcccgtaagtccacgccgtacgccgctggtatggctgccgagtccgccgcccgcaaggcgatggagcacggtgtcaagaaggtcgacgtgttcgtcaagggcccgggttccggtcgtgagaccgccatccgttccctgcagtctgcgggcctcgaggttggttccatcaccgacgtcaccccgcaagcccacaacggcgttcgtcctccgaagcgtcgtcgcgtctgagcactcagcaataccaaatccatccaaaaccgcctgaccggtgagtgcaccaccgagttcaagctgaaaggataaccacagtgcttattgcacagcgtccgactcttaccgaggaatctctgaatccgcagcgctcccgcttcaccatcgagccgctcgagcctggcttcggctacacgctcggcaactcgctgcgtcgcacgctgctgagctccatcccgggtgctgccgtgacctccgtgcgtatttccggtgccctgcatgagttcaccactctgccgggcgtccaggaagacgtcaccgagatcctgctgaacatcaagggcatcgtgctcaccagcgaatatgacgagcctgtggtcatgtatctgcgcaagagcggcaagggcgaagccgtggctggggacatcaccccgcctgccggcgtcactattgccaacccggagcagcacatcgctaccctcgccgacgatggcgaactcgagatcgagttcactgtcgagcgtggccgtggctatgttcctgcccagatgaacaagcaggacaacgatgagatcggccgtattccggttgattccatctactccccggtactcaaggtgagctacaaggtcgaggccacccgtgtggaacagcgcacggacttcgacaagctcattctggacgtggagaccaagcccgccatctccccgcgtgacgcggtggcttccgccggttccaccttggtggagctcttcggcctgtgccgtgagctcaacgcccaggctgaaggcgtcgaggtcggtccggccccggtggccgaggagaccaaccccgagatggccgttccgatcgaggacctcaacctgacgcagcgttcttacaactgcctcaagcgcgagggcatccacaccatcggtgagcttgtctcccacaccgagcaggacctgctcgacatccgcaatttcggtatgaagtcaatcgatgaggtcaaggagaagctgcagaccctgggcctgagcctcaagtcctcgccgatggccttcgataccaataatctcgaaggtggtacgttcttctcgccggaagacgagtgatctgcctctttgaccaatcgttcgttcactaggcaagcggatgttcgggcatatgcccacctgcttgcctgaagaacggacatataaggagtaaacccaatgcctacacctaagaagggcccgcgtctggcttccagccccgcacacgagcgcctcatgctggcaaacatggcgaccagcctgttccagaacggccgcatcaccaccacgctgccgaaggccaagcgccttcgtccgctggccgagcgtctgatcaccttcgccaagcgcggtgatctgcactcccgtcgtcgcgtgatgcgcgtcatccgcaacaagtccgtggtgcacattctgttcacccagattgccgagcagatggagcagcgtgaaggtggctacacccgtatcgtcaagatcgccccgcgcgttggcgatgccgctccggccgctgtgatcgagctcgtcaccgagccggttgccaagaaggctgttgtgaaggaagctgaagccgccgccaaggttgccgaagaagaggctgaggccgctgaggctccggtcgaggagaccgccgccgctgaggctgaggctcccgctgaggaagccgctgacgccgagaaggccgagtgagctgaatagcgtttcgccaagctagctgaaagggctggaatccgtttgggttccagcccttttgcgttgtttcatagaaactacaacgtacgtacggctcgaatggcctcggctcttgcggccagctgatcatcgacggggtatgcgatatgctccaaagtcaggccctgcggcgcaatcggcccgcttgagccttcacgcactggctcggccattttgccggcaaaccattccagagatttgcgtcccgaaccaactttgatgcatgagccgaccaaggagcgcaccatattgcgggcaaaggcgtccgccacaatcgtgaacaccgccagtccggactccagcgacggagtccgatatgcttcatgcgatgccatcgcatccggcaccaggggagtgatcggcacccgccgccaataggcggtcttgacttcgcggatcgtagtgcctcccggattcggagtggcgaaggaaccaaaatcgtgcaggccgatggtcaatgaggctgcgcggttcataagctccagatccagcgattcatccacggtaagcacgcatccacgcaggcgcgggtcgatctcggacgaacgatcggcgacccgatacacataagtgcgctccaatgcggagaacctggcatcgaaaccggccggtgccacggcaatgccatgaatgacgatgtccgaaggcagcacagccttgagtctgcgagtcagcgcctcggtgaccggaatggtcatgtgacctacgcagcgattcagtacctcatcggatacatccaaatgcgccacttggtgggaggcgtgcacaccggtgtcggtgcgcccagccaccgtcagacgcaacggttcggccgcatcatcggccggcacccgcagcaccttgtgcagcgcatcttcaatggtgccttgcaccgtacgcagattgggctgtttggcccagccatagaatccgccgccgtcgtaggccaagtcaatgcgcagtcgtgtcatagccattcattgtaacgagtgcggtcggcgagatgcgcgcggtcggcgagatgcgcgcggtcggcgagacgagtgcggtcggcgaagtgacctgcctgtaacattctcgcgcgtttgctgaaacggggccgccttaggttgtaaccatcaaacccggttacggcttgcggcgtcagcgtgcgctcgaaacgcctaaccgcttgaggccacagaagccgccacagcaaggagcaggcacgatgatcgaatccgcagcacgcagactggcccatgaactggtaaaccgtcgcgaggcgatcaaccgcgagctgtcccgcaacggcgtacgcttcggcatctacaagaacggcgaataccatgaccggctcttcccgtacgatcccgtgccgcgcattatcgaatccgacgaatacgacgaattggagaagggcctgaagcagcgcgtcaacgccctgaacgcctatctgaaggacatctactccgacaaggccatcatccatgacggcgtcgtgccggaggaatacgtatacacctcggccggctacttcccgcaggtcaacggcgtgacccctcccggcggcatcttcgcgcacatcgccggcgaagacctggtccagggtgaagatggccgctggtgggtgctggaagacaacctgcgcatcccctcgggcgccagctacccgctgttcgtgcgcgacatcgagcgccgcatctccccgcgcctgttccgcgacgtgcacatccgcgacaatcgcgaatacccgcgcctactgcgcaaggccatggactttgtgtccactgagggcatcgccgtggtactgacccccggccgctacaattccgcgttcttcgagcacgcctatctggcggagaaaaccggcgccgcactggccttccccgaagacctcgaagtggtggacaacaaggtctacttcctcgactacgccggcaaacgccaccgtgtgggcgtggtctaccgccgtctgtccgacgaattcctcgatccgtttgccttcaatcctgattcggtgatcggtgtgcccggtattctgtccgcctaccgcgcgggcaacgtggccatcgtcaacgcgccgggcaacggcgcggccgatgacaaggccatctactacttcgtgccgcagatgatcaagtactatctcggcgaggaaccgattctcaacaacgcgcccacgtatatgccgatgttcgaggccgaccgtaaggaagtcctgaatcgtatgggcgagctggtcatcaaggatgtggccgaagccggtggttacggcgtggtgttcggttcgtcgctggatgctgccgcacgtgaggagcttgccaaccggatcaaggaggagcctcgtcgattcatcgcccaagaggtgattcagttccgcgatatcgatgtggtggacccgaagaccggtgagatgtcgccgcgcaaatgcgatttgcgtgcctttgtggtcaccggcaaaaacacgcacgtgtggtattcgggcttgactcgatactcgtcggtgcccggccagatgatcgtcaactcgtcgcagggtggcggattcaaggatacgtgggtgttggcacccgaatccggcgtggagcatgaatacggtgctgaagtgcaggtggcgaacctgctgagccagtcccgccgccactcgttgtctctggtcaccgcctccaaggcagacaacctgtattggctgggtcggtacaccgagcgcgccttcaccacgctgaaccagttcttcccgttctacgatcgtgtgatggacaccgatgtggacgccttccgtccgttcgctcacgcactcgacctgcccgaagatttcgaggacttcgacgggttcgtgaacagcttcctgtacgacgggtccaaccctgattcggtgcggtcggccgtaacctccgcattcaacaacgccgtgattctgcgcccggaattgagctcgcgtctgttgcagtacgtggagttggcgatgaccaatatcaccgatgccgccaaatacgcggccgacgccgaggacatctacaagcagcgcgatattaccgatgacatgctcgccttctggggcggcatcgagaattcgccggtcgaccccacgctgaaggcgttcatcttcatcggcaagtatcttgagcgcatcgacctgtacacgcgcttcggcctgacgatggaggagatggaagccccgcttaggaagctcgcctcctactcgatgatcctcgacggcatgccgttgcctagttgcttcgccgatgggctgagctggctggtcggtcagctgccgtctcgcgggtatcaggaagtcgccgacctgctgaagaagtaccttgacgattattccggccgtgtcagtgccctggccatcaaagacatgggctcactgagctccatgaacatggatgccaagcgcccctaacccgacgttcgccctgacgggttcaaatgctatggtggtatggcgaaaaaccgtgcgcccgagtgccggccgatgcgtatcggcgaattgccggaatatatgcgtggactgtgagcgcgcggaccatacctcagccatggctgtagtgtcgttatcccgagaatgtgccggttgccggctcgtgtgtaagtgcaggagacgttgtgaaaaaactcgtgttcgactatgagatgaagctgtccttcagcgcaccggtcaccgatcacaggttccagcttcgctgtattcccgccactggccctcgccaacaggtgattgacgtggaagtgaagattcagcccgaaaccgaactcgaaaccaccatcgactcctttggctccgtggtgatgaccggattcatccccgagccgcacgacatattcagctattcggtgaccggcatcgccttcgtggacaatgcgcatatccataaggaagcctataaaccgctgtaccgattcaattcagcgctcaccattcccggcccgaacgtggaggcgatgatcgacgtatgccgcgaacgcttggctgcgttgcctgccgacgccactccggtgcagcaggccgccgaagtgatggatgaggtctacaaggcgtttgtgtatacgcccggttccaccacgattcgcaccaccgccgaacaggccttggcccagcgcaagggcgtatgccaggattatgcccatgtaatgctgtccgtgtgccggcatgtgggattgaccgcgcgctacattgccggtttgcttgggggagagggcgcgacccacgcttgggtcgaggtgtatcaggatggccgatgggtcggactggatcccacgcataaccgattggtggacgacagctacatcaccatcgcccacggccgcgattaccgcgactgcatgctcgacatcggcatcttctccggctacaacgtccagcagacccaatgggtcaatgcctccgtccacgaacaggtggcgtaaacaaaattccaagccccctctggtgagctgagccgtgaagaaaacgccggaggcggtggctctgcctgtatctgacgcacagattctgattcgggaatacatgcgactcacgctgactgagagtgtgcccaggcaaggcaaggatcctgatgtggctcgtcgtctgctggattcgcttgcgcgcaatatcagtcaagctgtgacattcaaaaccttacgtaaggatatgtacggtactgaagaaaaccttgacgatttcatttcggagagaacggtatccgggtatacggccatgttcgagaacatgttcgtcatcgatccgataaagggctgggtcccgccggcacgggatccaaagcgactccagaccaaggcgcgtcggtattttgccgatccttccattgcggccgcaatgttgggcatgagccctgccgctcttatcggcgattggcagacttttgggtttctgtttgagaatctatgcatccgtgatctgttggtgtatgcgagatctctcctcgatattgggatagaaccggttcggtattatcgtgacgattccggtctggagtgcgatgccattattgaattgtccgatggacggtggggcggcatcgaaattaagtccagtgaggataaagtccctgaggcatcggcaaatctatgcagactgaaagataagctgctgagaaatccgagtgcgcgaacccgtgaaccggagttcttggcggtgttggtgggggtcggcgagttcgcgtatcaacgcgatgatggagtgtatgtaattcctgtcggagtgcttggcgcgtaaacgcaatgccagcgcttcgggcgaattccgggattgtgatctgacatgtctcaagcggcatacactcgagacttgctcagcgaaactccgatttgccaggtcggcagaatgtggcataatgaacaagttgccattttggcagcatggataagtgtccgagcggtctaaggagcacgcctcgaaagcgtgtgaggtgaaagcctccgcgagttcgaatctcgccttatccgcctttagggttccggggtttgtcccggaccctttttgtttttgatgcgaacgtccgtattcggggttataggccaaaatgtatgtccggcggtctagtcgttcgactgccattcgaccctggtgtggaactcgttccagtcgatgccggtgccgtgtctcatgggaatgccgaacgtctcgtgcatgctctgcgggcttctctcccatgcccgccggtagaggcgctcgagtcgttcgtcggtcatcgcgttggccgcgagccacgcgtcgctttcgggccgttccgtgtgctggtggcaccaccagcagatcgccttcagccgtctgaccagccgcagtccgcggtggcggcgcggcatgtcgcgcaggcgcgcgttccatgattcgacgaggttgttcgtggacggcactgggccggctgccgcgagcccctcgtcgaggaacatgaacggttggccctcccggatgcgcctgcggatcatgcgccgcgccttgacgagcctttggtgcatgtcgttcacgccatgaccgacgtgcaacgaatgtccggcacgttcgacccgcctacggacgacggcgaatacgccgtcatcgcaggcggggcaccggtgagcgagatgcgcgactacgcgatggacgtgaacgcgtatacgcacggccgtgggcgcttctccgcctcgttcggcggctaccggccctgccacgacgaacggcgcgtgatcgaggaggccgcgtacgatccggaagccaatctggagaacacgtccgattctgtgttctgcgcctacggcgccggctacccggtcaagtggtacaaagtccccgaattcgcgcacgtggagtacgtgacggcgtgaggggccatctgactgtcgcggatatgcgtccggcatatcgggaccgtgccggtggatgtcgattgtaatcgacacctcatcccgatgggatacgaagtgtccgggtatgcctgatacctcgtgcctcatcggaatgagacagaatgaggcaagtgacggattcgggatatccgtccgagttcattgtgaaccattggaataaactcgttttgagtccgtctgcatgtcctgtgttgacaacgtcttgggtcgtgtgtattatgaatacatcagaacataaacgtttaggacttcaatgatgaaacgacacgacgttactatcaccgatatcgcaaagcggatgggactgtccgtttatacggtttctcgcgctcttaacggtctcagcggtgtatccgagagcacccgtgcatcggtgcgcgaaacagccaacgaggtgggctacatccccaacgtcaatgcgcgtgacctgcgcacgggcacgcaccggttcatcaccctgctcaccgcgggaatgtcgaactcctattatctcgatctgatcgacggcatcgagagcgtcctgcaggacaagaaggagagcctgttcattgccgatatggccgtcaacggccggtacagcaaggagaacgaggcgtatctgttgcgtcaggtcgtggagaaccgtcctggcggcatcatctccaccttgggactcagcgaatacagcaggaaccagctgaagaactggaacattcccgtcgtattcgtcgattccactcccggatacggtgatgatgaggaaataaaagatggtttctcgtatgtagccaccgacaacgtggatgccgccgccaagcttgggcgtcatctgaaactccatcatttccatcgttggctgcttgccatctatccggacacctggaacagcaggttcgctcgcgagagcggcctgagggccgccgccgaggagtgtggggcggagattcgcgtgctggaatgcggtaacaacgatgtggaagcgtgcaccgaagtcatccgttttcttgaccagaacgattattatccggatgtgatcatcgccggcaacaatcccatcctgttgggcgtcatgtcggctcttaatcggaaatccgtcgacattcccggggatatggcgctggtcgcgttcgatgacttcgcctggtcggacctggtatcgccgaagataacacttgtcgccgaagacagccgattcatcggtgccaaggcggcgaactacctgcttggacagatggaaggaaaggaggaggtgaataaaaacccggatggggcgacgatgaggccgaatcccatccacgacatgatcgagacatccctgaagatcagggagtcatgcggatgcggtgggcaataggccgcatccgaacgcaagacagctatttccaatggagaaaacaaccatgaacatcaagaagatcgcttccgccgcttccaccctgctcgcagcgtcgctgctgctgtccggctgcagcgcggtgagtaatggcgacaacgatgccgccgaggtctccaagcccacggaaatcaagagcatcggcctgatggtgcaggatatgtccaacccgttcttcaccgccatggacaaagaagccaaggctcaagccaagaagatcggtgcaacgctcaatgtccaggacgcccagctcgatttggccacccaggacaaccagatctcctcgttcattcagcagaaggtcgatctgatcatcgtctccgccgtcgatgagagtggtttgaagcccgcaatcgagcgtgccaaggccgccggcatcatcgtggtcgccgtggacactcctgcgaagggcgctgatgcggtcgtaacgaccgatggcgtgcaggcgggtgaactgtcgtgctcttacctggccgagcagctcggcggcaagggcaacatccttatcgtggacggaaccccgatccagaccatcaccgaccgtatcaagggttgcaaggcggccctggagaaggactatcctgacatcaaggtcgtcggacagcaatcctccaagaacgatcgtgccaccggcctgtccgtgaccaccgacatgctcaccgccaataaggacgtgcagggcatcttcggtatgaacgatccgtccgctctgggcgccgcgctcgccgtcgagcaggccggcaggaccgatgaaatcatcgtgaccggcatcgacggaagtcccgaaggcgtcgacgagctgaagcgcgccggctccccgttcgtggggacctccacgcagaaccccggcgagatggtcaagcaggccgtcgcctacgcccagaaggtcgccaagggcgatacccccaagaagtccacgattctcattccgagtgtcatggtcactcgtgagaacgtcaacgattacaagggatggtgagcatgcctcagttgctgcccctattgcagctcgagaacattgtcaagagcttttccggagtggtcgtactcgacaacattaacctaaacctttatgaacatgaggtgcttgccctcatgggtgagaacggtgccggaaaatcgacgatgatgaacatcctttcgggcaatctgaaaagggactccggacgcattctcattgatggcaaagaggtagacgtctccacgccgaagcaggccgacgacctcggcatcgccatcatccatcaggaactcaatgtggtgcccaccatgacggtggcgcagaacctcgcactcggcaacgaaccgttgcagaagtcggggctgctggacaagaagcgcatgcgggaggacgccgtacgtaaactcgatgtcatcaaggcggacatcgacccggacacattcctcggtgatctgggcaccggtgagcagcagatggtcgaaatcgccaaggccatcgcgcaggacgcgaggatcctcatcctcgacgaacccacggcatcgctgtcccgagccgaatcggagcacctcttcacgctggtgaacatgctgcgggagaagggcacgggcctgatttacatctcccaccgcatggaggaggtgtggcggctcgccgacagaatcaccgtgctcagggacgggcatacggtgatgaccaccgacatcgagcatgccgaccagaatgacatcgtcgccaagatggtgggacgcaaagtcgagaaactttacgaccatggcaagcgtcatccgggggagggcgtgctcgagatcaagaatctcaggctttcgccggactctccgccggtatccttcaccgtgcatgcgggcgaggtgctgggcatgtccgggctggtgggcgccggcagaaccgaaatcgccagagcgatcatcggagcagacaagcatgattccggtgagatccggctccgtggcaaggcggtgtcgttcaaatccccgaaggccgccatcggtcatggggtcgcgtatcttcccgaaagcaggaaaacgcagagcatcttccctgtcagaagcgtcgaagacaacatctccgtctcttcgctgggcgaatacgagaggctgggtctgcttcagaagcaccgcatccgcaaggatgtgcaggaatcgatgaaactggtcaacatcgcgcaacgtctgttgaccacttccatcatcaacctgtccggcggcaaccaacagaaggccgtgttcgcccgatggatgatgaagaactccgacgtgctgattcttgacgagccgacccgtggcgtcgacgttggcgcgaagcaggagatctacgagctgatcagttcccaggcagcgcaaggcaaggcgattctcgtaatctcctccgatctgcccgaggtgctgggcatcagcgacagaatcctcgttgtcaggcaggggggcatcgctgcctgtatccccgaggatgaagctaccgaggagaaagtcatggggtacgcaacgggcgtgctgaaggcgcaatccgaggattccgaaacgcgcgacggagcgcaacgataaagaggagcttccaatgaaagaaaagaaaaagatgaacctggcggcgacctgggagaaggtcggcatgccgttcgtattgctggtgctggtcgtattcatgctgatcaaggccccgaacttcggcacggtgagcaacctgttcaacgtggcgaggtccatctccatcagcgcgattcttgccgcgggcatgacattcgtcatcattaccaccggcatcgatctgtccgttggttcgaccatcgccgtcagcggttgcatcgccgttctggccgcccagcaggggctcaaccccctgctcgccatccttctcggcatggtgatcggtgcgctcatcggcttgatcaacggattcctgatcgcctactgcaatctcgccgcgttcatcgtcaccctcggcaccatgaccttcatgcgaggattggcatacaccatcaccggcggtctgccgatcgtagacaacggtttgaacttccgcgccctcggcaacggatacctgttccatgtgccgattccgttcatcgtgatgataatcgtttatgtagtcatgtggatcgttctcgacaaaaccaagtatggctcgcatgtctacgccgtgggcggcaatgccgaagccgcaaggcttgccggcatcaatgtcaagggcgtactgctatccgtctatgtgattgcaggactgtgcgccggtctcgccggctgcatcttcgcggcgcgtgtggtctccgcgcagccgactgccggcgacggttatgagatggatgccatcgcagcggccgtcctgggcggtacctccctgatgggcggcaagggcaagatcccgggcactctgatcggtgccatcatcttcggcgtgctcaccaccggcctcgtgctcatgaatgtcccgttcttcacccagcagcttgtcaagggcatcgtcatcatcatcgccgtgctcatcgatggtctcaaggagaactcgttctcgttcgggttcctcaaaggcataggtgccacacaagccaaggctgcgaactgaaacaggagaacgacaatgacgcacgaatatccacgattcaccatcaccaatagccaccaccatcctacaaagccacagccggtcacggtgaccgtgccggaaaaagttgaggccgatctgattctcggtaccaccgatttgggacagtcttcgccgttccagaaggtgctgggggattccgacggttcctcgacgacgttcatcggcattctggtgccgcatgacggagaggtcctgtccctacatgacccggacccgggggagacgtttgaaggaggcatcgtcgccgacgacaacacgctcgaaagcgatgcggtctgccaccttgatacgggatatttcgacattgaactatgtcgtggcaccggcaagggcgagggcgcctccaaatggggcatccgccatttcctcaccaaggacgagggattcgatctgctcaagagcgggaacaacgccattggcgggttctacggccctttcttcactccggaaaacggtctgatcaacccgcccgaacatgccatcgccgatgtccgtcttatcgagttcggccccgtcatgcgccgttacctgcttgaggggcgcatccctgatggtcttcgacctgaactgcagggcaagaccttctccatcgagttcacgttctactggaacgtcgatttcttcgatcgtgtctaccatgtggattcgtttgtgacggaggtcgatggcagaagcgtcgtgaaccgtatcacggtcggtgacgagttcgaaagcggcgaaggaaaccttgtcttcaaccgattcgacacctaccagcctgttcctttccgcggaggggacccctacgccggcttcctcaaggatgaagtgcggaacgtgctatcggagcggacggaaacgacatcaaggttcgcctatttctccactctgcttgacagggatctggagaacgctcactgggatctctactggcgtttgttctcgcgatgggaaaatgcccttacccccaaggggctcgatgagaggctcgggcatgtgcgggcgcttgcccaccgcgcagctgatgagacctcccgtccttggcagttccccgagggggcggtcgatgtgtcggcacaggaggaggagaccatcttccccgggccgtctgcctgcagcgccgaatacgacaccaataccaaccggtgcatgatctggatcacctcggaggcgtcctcggcgttccagatcgtgcagaggcctcaatccggctgggtcaactggggtacgaacggcgaaaacgaatgcccggcattgcctgttggagtcaacatcaggacgatttatggtccgtatgggaacgggtggcgtgatcgcgccgatgagtcccgattcggtgtcgtgaacgttgaacgataggctctgagcacccgtatgccggtggttccgacggttttcctcctctttcccgtcggggccaccggcatcgtcattattcggctcctgattcccgctcctcatcgaactgcaagatatccaatgtaccgacgacgattatgccaagcatgccgttgacatgcttatcgaccgcatcgaaggatactcaggcccggcccgtacgtacaccaccgatttcacattggtggaacgtgcctcaactcgacttgcccactagcatccaacaagttcgcat

SEQ ID NO: 179 - DNA, 4938 bp, Unknown
  R101_18m  MAG No. k141_6598
tcggcgtcgagcatcgcgttcaatagctcggcgaccttttcggcgaccaagcggtcgagcctggtctcgagcaggttctggtcgatctgtatgatgttcaagggtcttggttccgtctcctggcttccaatcgcggtttttgttttggcgaatgaaaatcgtacacaggacgcgggccatgccttcttacgtcagacccggaatccgaaagtgcgcaaaaaatcgggcgttatcaccacaaacgacgcacaaagtcatgagccattcgaattgcgctggcccaatcgctacgaatcatatttgccgtagcccttaagtgaatcccactgcatcgagatatcgcgcccgctatcccttccgataacgccgaccacgcgtgttgccttcagcaatcagctttccttgcgcaactaaaccgtttaggaatttgcggactgttctgttatcgagctctgttatcttggcgagttcaggtacagtcacatagtcaacctctgtcaagcgtcgattcatcgccgacagcatcgctgcccgcgaatcaatttcacccgatgcggttgcatctgctttcttaccatccacacgttccccgccaatgagcctcgcaccctcttcggcatctttctcaactacagatctcacgctagcaaaaccagaaccatccacggtcttcagcgcaggaacaataggaatcgtcgcctcgaatatgtcaccatcgcggaactcaggctctcgctcagtatattgccgggacgctcttatcagattccgcagtccgctacccagctgctcggctatgccggtctgcacaaacacattagcgataatcggattctttggcattggcgtgaactcgcccagcttcattcgaccttcaaagaatgagcgcgaagcattaaccgtccggatggattcattatcaatggtgacacgcgccaccaccggactggaatactcccgatgcatgaggctgtttgccaccaattcacgggcgatcatcgtgcgcgggctcactcgcttatcgccctttaacacaaagcggtcaggcagattccgctcagtaaattcacggagttgctcgtacgaatcgaacaagttggtccgcaccataagtcggtcatcgtatcggtcaatattgtctcgccgaaccacggcatcagtaatatacgctgggcaaaccgaggaaatgacttcatccttgcccaagagcagcactgcagcaagattaaagccctcttcgccggtcgtgtaatcacgatcgtatagcttggcgctgcggaacagttcttcgtcagacatagttccccaagggtgcccagctcgctgagcgaccgccagctgccgcattcgcgcaatcagctcaggacgcaaatcaaacggagtcacgtaacggaaaattcgccgttcggaatagtagttctgcttgcgaatatacatttgactaatctggatatcgctttcgatgtgtgtatccacatcagcaatgcgatcaaacactgcgcccttgaaccgcacaaccgaagaactcggagctacccaaatacgaacaataatccgttcgtcgtactcgatatgttccgtttccaccattggagccggttcgaacatcttacgattagacactacgttgacaacgttgcgctctatctcactaacgcgcttagaatcgacgccgagcacttgaccgtcatcgtcaacgccaagataaatgctgccaccagaacgattggcgaatgagcatacagtctcaaaagtatccgtatgaggcaattcgctgcagcgcttgaactcgaccatagatgattcaccgtcctgcagcacttgcataagttcatcctgcgtcatcgcattccgcccttcatagcgataattcatacattaggacatggcacttatcgtattttagcatctaattagtacattaggacattgttttatgtcctaatgtactaattaggcggctaattgtactaataattgcacactgatgtactaatccgatgatcgaatgcactaattgtccgcgcaaatgcactaatcggatgaccgaatgtatcaatgagacctataggcagccgattggctgacgatcagcccagtcattggctatcggccgctagccagtcagccgccaacagccaacagccacccaactaatagccgccagccaatcagcccgtccaatcactccttgtgttccagtgcggccttcaaatcgcggctacggtagcgttcgcgcagcatagagaatccaccgaagcccacaagccacaccagaccggcaatcgcggaattgcgcgtatcatccgcaaggaacaacgtcaggtagatgaacacgaagaacacgattgccaccgtattgagcaccttccacgcgggcatgacgaacccgtccgcgatgaaatcggcggaacggcgatacctgcgatgcgccagcagcgtcaggatgtagatgaacaggaacaccgcggagctggcggacgagaacagcacgaacgcccccgagatgccggggatggcgttgacgatcggcgacagcaggatcagcgccgcggacaccaggatggcgcgggccggcaccttgcggtcggacaccttgccgagcttgttcagcatcgggttcggcgacacctcggacagctggtacaggtggcggccggcggaatacaacagcgaattgagcgacgaggacgcggcggtgatcaccacgaagaacaccagggcggacgcccagttcaaaccggcatactggaacaccatgatgaacggggaggcgaaggagccgtcctcgttcggcttgaacgaggtccacggcacgatgcacatgatggccacgagcgcgcccacgtagaagatgagcacgcgcacgatgatctcgttgacggctttgggcagcacctcacgaggattcttggtctcggagacggtgacgcccacgaactcgagcagctcataggcgaagaacaccatctggaagctcatgaggaaggccatccagccgttcggggcgaacgagaagccggagaacaggttgtcgagtccggcgtggcccgccgggctcacatgatccacgccatgaatccgcgcggccgggtaatggtagccgatcacgatcatgaccacggcggtgacgatcatcgcgccgatcagcgtgatcttgatcatcgagaaccagaattccacctcgccgaacaccttgacggcgatcaggttgacggacaccagcgacaccaggaagcacagttcgatcagccatttccaatgggtcaggtcgatgccgaacgtgtcgaagaaggtgatgaagtacgtggagacggccgtgatctcggtcatgcccagcagcacgagcgcggcccaatacgtccagccggcgaaatgcccccacccgttgccaaggtaacgggtgatgaaattgatgaaggtgtgctggctggggtcgcggtacatcatctcgccgatggcgcgcatcaggaagaacatgatgacgccgaccaggatatacacgaagacgatcgaggggccggtcagcgccagcgacttgcccgaacccaggaacaagccggtgccgatggtgccgccaatggcgatgaactgcacgtggcgattgctcaggccacgctccatctcgttggtctggtccaggctttcgacagacttgagtttgcccgtagcctgctgtgtaccaccattcacattcgtatcggccatactgatttcatttctcttctccgccgcccgattgttacgcaccggacgcgatactcgttcaaaacaagttcggactgtatcaccgaaatatgtcacgaaaacgctcagctcaagaatacatgcgatgatgctgtaaatattccgccaaaaaagttcaattcaccaacaccaaattgaacttctacctctattccacggacttgagcgagctgaccgggtctacgcgatcgagcactgggttggtgaacagctgcaccagcagcgcgaacgccagcgtcgccaccacggcaatcgcatagctgtaccagtgcacttccacttcgaaatacagcgacggcatattcaacgcagcagtcagtaatccgcctatccacctgccaagcggcagaccaaccaccacacccataccggtcaatatcatcatctcgcggttcacgtagttgtgcacctcgcggtcatagaagcccagcaccttcagtgtggccatctcgcggatgcgttcggacacgttcgtattggccaacgtaaacagcaccaccagcgccaggccgccggcgagccccacaatcagcgccaccacggcacccatcaaatcgaacttaaacgtggcggccagatgcgcacagctcacggccttgagcaccgacgattcctcgcccaaccgatccgcatattcggcctgttcggtctcggaacctttcagcttggcgagcatcgcgttccacgtcaaggtcgaggcagtgccatctcccgaagccgaagacgtcacaccgtcggccgcaaacttctggtcgtacagtcgctcactgatgtacacatcagagccaacaagattgcgcgtcacggccgcgacctgcaccttggcccggctgctgccgccattgcccagcgtgacggtgtcgccggcatgaatattcagcgagttggcggcggactgcgacacaatcacgccactatcgtccagcgctacagtgccgccgcccgctttgccgaagatattgggcagcccaaaccatccatcatcgccggcctgttccagcgtgaccatatcgttcaagatattcagcgaatcgttgggcacggtcatcagctgcacggtttcgctttcctgcgccgcattgctcatctcgccactatccacgcgcagattcagcgtttcggtggtttggccatcttgtgccacctgcttgcgcatcgcggcggcgtcatcgtcattggccacgaccatca

SEQ ID NO: 180 - DNA, 10993 bp, Unknown
  R101_18m  MAG No. k141_7932
ctcgaaggcacgctcgtccccggaggcgacccgcgcgagcagatccccgtcacgcgtcgccgccccaccgggcgaggtcatgtcatcctgcgtatgcggctccttccacagcacatcgtaaacaaacgttcattgatgtatgtagctagaaacgaaccgacggttcacgacacgagcaacgacacgcccggaaggcatatcggattaagttgtgtagaagaacagaaactcacagaagaaatcgttgcgcgcgtgcattaccgagtcccaagcctggctagttcttggcaggaatgctgacatccagctgccagtgggcttgttcggtgtgggtttggaaggtgccgccgtgtgtttcgatgatggtccggtagcggtcgaggccgctgcccaggccgagtcccatgtcggcgggtgtggtggtgtcgctggcggagacgtggatggcgtccgtgtcgaaggtgacgcagatggcgtaccattcgccccggtcggcgtgttcggcgatgttcgcgtacagttccgccggcaagcccgacagcagtcgcatggtctccggcgtgagcggccggtgtggttcggcgagcaggttgtcgccggtgaatcccggggcttcgagtctggactcctcctcgtcgatcagcgattgcagaccggcacgctgcgaggcgatgccggcttctgcgggcacgggccggctgccgcactcaaatcgccgtcggctggttcaaagcaggatgtaaacccgctatttgcccaacagttcgtcatggctgccggttcgcatgaacatggcggtaccatcatcgcgaatccatagaagcagccagtcgccggcattgccgatgtggcattccaatacgccgtttaaatcaccggtaagtgtgtgggcgcgatgcctacgcctcaatacttccttggagtccgccgtgtcctcaagaaccagacgaatgacttctttcagcgggcgtaaatcagtgtgcttgcgtttgagtttcttgatatctcgctggaatgccgctgtgtaatccggtttgagcattgatcagattcccaacgaatcgaacatctcatcggcactgttgaaacgaggtttgccgtcggcgagcctgttcttcgcctcgtcaagggcctccatggtttcaggcggcacggtcgtataggaaaggtttaggggaatgcgcctctcccggacaatctgcttgtagaaggcgcgggtgaccgaagacaagtccagaccgagatcctcggcaatgtttgcggctttctgcttggtgtccgcatccacgcggactgtgacggatgccatgctcacattaacctccaacatcattacgtaagacaatagtatgtatttgtatgctaatagtcaacattctgcggttgcggcatctcgaccatggtacacatcccgcaagcggattgtttaccggatgcaatcgatgatcggaatgccgaccatccagctgtcggcgggcttgtccagaatggcttctggttcatcgcaacgccagtgcgggttgcagccgtatggctttgatggccggggcaagagagccgacaagcgaggtgacgatggacgcacaggccgcaatcatcgccgccgtatatgggtatgcgggcggttccagcggcgagtcggcgggcatcatccacggaattgcccagaccagcaccgcggagatgagcaccgcggcgaaggcgatgatgaggccgagcagcacggacgagccgatgacctgtatggctatgctggctctggtcgcgcccagtgcgcggcggatgagcagctcgtgcgagcgttgctcgatgccggccaatccgatgtcgatcatgccgatggcggataccgacaacagtaatatcgcggtgacggtgacgccgagttggagaaaaccgatgacctgctcgtaatcatcggcgttgtcggaacggttccatgacgatatgctgccggtcccgacgtcggataacagtggattggcaacggtgtgttggactgtttctagagggtctttccttgtttggcgaactccacgggactcatgtaatcaagggtcgagtggagccgttggtggttgtaccaccagacgtaccggttgacgtccgagcgcagctgttccacgctcgtgttggattggctacaatgtataaggtattagacagtccgatgcctcgcagtgacaggcgggatctcgggccggatgttccagcaccattggatgcgtctgcggaacaggcgagggacggccaaaccacggccctttaatgcgacgccacattaaaagcaccccgacacgcctactgccacaaggccaaacccggaacataaacaccacgtttagttcctataacccgtatatcgtgatgagctcgtacgtcgcattactgtcgaggaatggccaattagataaggcttgcggccgttggccgagcagtagtagtgtggtttgctgtgccaacaggaggagtgtgaccaatgcggctgattgagacatggctggcggaccaggaacgcgcgtttgacttgttcgcgaaattcccggcggaggagacgggattcgagaacccagcggccggcatgaatcgtgaacggttcgccgcatatgtgcgagggttgcgtgatgagtcgcttggcgtcggcctgccggacggctgggtgccagccaccaaatacattctcgtcaacgatgagggcgactatgtgggcatcttcaacctgcgtcaccggctcaccgacttcctgcgcaacggtccgggccacatcggctacggtgtcgcccgcgaataccgcggccacggctacgcgaccgccgggctcaagctcacgcttgccaaggcccgcgagctcggcatcaaggaggcttacctgagtgtccacaaaaccaatccggcaagtcttgcggtgcagcagcattgcggcgcacgtatcgaccatgaggacaagacggaatactacacacgcatcgccacctgcacggagagcgatggcctctatgcgcgaggcgattgacggcgcctcttgcgtgtaaatggccgattatcaatcggttttaatcgatttcgcctcggtcgataaagtcgccgtcgaggaaccaataatcgtgcggatttccgcgtagcgccgtgaacggcgtcagttccacgccctgcgccgcggttttgctcagcagataggcgcggataatccacggatactccagcacgcccgacttgagggtgatgatttgctccactctgctgccgctgacgccaaaatccctgccgccgttcggcggtcagacccagccggctcatgttctcctgaaattcgcggatagtcgccgcgcgttgctcactgttcaaagacatggcttcatgaatgttgcattggcgccttaatcatccatagttaaggcaccacgcaacatacgattcgcttacgcagccatccgacgatggttgggatagattgttcggcgaagcggtctatggcgtcggcggtgacgtaggcgtgggcggtgaggcgcaggtacagttcgccgccgaccgcgctggccgcctcggatacccgacgctccgcgtaatcggcaagatcggacatgtaccggcgcacggcatcacagccccacagtcgctcgatctcgcgcagggactcgggcgcggcgatcggaccgtataaatcctgggtgccttgctcatcgaatcgctccgggaacgggtcagcgaaaccccacgagtcgatcagtggccacaaatcctgaccatcctgaccgccttcgggcggaatcaccagcaatgctgtgccacgcggcgcacacgggaacttatgaaaattgccgacccaccaatcggactgcagtccgccggccggatcggccagttgggcgggagcgtgcgcgccatcaaccaaaatgcggatgccgcggcgatgggcttcggcggcgatgcgctgggccgtaaacagcatagcggtggcggaagtaatctggtccaacacgatgaacgacgtacgctcgctcatctgcgcggtcacggcgccgaccacgccatcctcgtcggcgtcaatggtaactggtgcatcttcctcatccatgcgaatgatacgaatcgcctttcatcccaatgatttcgctctcatggccgatacccgcgtgccgtcatgttccgtaccttggaatcagaagtcgagagatatggtccgaaaccgaatggagcggaccgaagcagggagcattgaagatgggatttctcaagaacttttccgaaccgtttgcgttcgcgctggcattgtggccgtttgtgtccatgctgctgacggtgccggtgctggcgttgctgtatcaccgcgacaatcgcatccgactgtcatcggccatagtggcgtatggcacggtgctgtacctgctcggcctgctgtgcttcacactgtatccgatgccggccgatgcggcagcctattgcgccgcgcaccatctgacgccacagctcaatccattgcagttcatcggtgacatccgtaccgatggtctcaccgccgtactgcaaatcgcgtttaatatcgtgttcttcctgccgttgggcttcatcatgggccgcatatggcgttggccgctgccggttaccgcagtactgtcgttcgccacgtcgctatttctggagacgatgcagctgaccggcctcatgggcgtgttcccgtgcgcctaccgtctgttcgacgtggacgatctcctgtggaacacgaccggcgcgctgatcggattcgcactggccatgctttcgctgcgcctgattccggcgcgggtcgccgatatgacgccgaccaccacacctggcttcatgaggcggctgatcacgttcatcatcgacatgacgctgatcgggttcgccgtgatgccgacgcatctgttcgtcatgatcgtccgctcaaacctgccctcgggctccaacggctcatggcagtcgatggaaccgttcgactggaccggctcgatcctcttcctggcggcgctcatcctcttcgagggcgtggtgccatggttgcgcggcggctgcacgttcggcggcagtttcacgcacatgacagtggaaacccggccgcgagaaggctggcggcgtgcggcgttctatgtggcgcgcatggcgacgctgatcgccgtggtgtggtggcatagtggcggattcaatctgctggtgttcatcggcctcggcatcttctggctggtcaagcgtcagatgccgtacgacctgatataaaccggcgctccgctgcttggcgttacaggaaaacctccgaccactggtcgggattcggaatgctgcgcagcgggccggccaacgatacggccaatcccgctacggaacagaccacggctacggccatcaccgccgtgaaaccgagatctggctgttgcaacagccagccgaccatcgccgggcatgctgcgcccagtatgccgaccgtggtttcaaatacggcagaagcccgcccctgcatgttgtcggatgtcttgccgtagagaaagcccagcagaccagcgttcaacgcggggaacggcaggccggccagaatctggcagatcagaatggccgcgtagctgtgcaggaatagcagtggcatctggctaaccacgaacaacgccagcgcgcccgcaatcagtttccctgtgggaaccatatcgactagcttgttggccaacagcgagccgaccaaagtactcacgcccattgccgtgccgagcagtccgatcatgaccgcgttggcgccacgggtggccaacatgatctgcgcgccggtgatactggctacgcaggcgatgttcaccattgcaccgagtatgatcgcgtataggaagacgcgcttggtcagggcccatcgccagccttcgaccaagtgcgtgggaaatggcacaacagaagtgccgtgggcccaaacggtgaccacggcttagcgcgacgagtcaacgcgcattagctgtctgcgaacgacaccaacaccttgtacataacaatgccctttgcaaaaaccaaactccaattgttgtaccagttcgagcacgggaccaggcacgtcactgggctcaacataatcggccatcaatggtttctcggcttcgaggggctgatttcgtccggtggggacatctacttggctttcgaggggctgctcaaacgccaaaccacgagtataaacggctttgcggcaacgccattacgccattgtggagccttgtctactcgggcatcagccccttgaaacggagatagatctccggcaagtgccaaatcagcccctcgaaatcgagttaggcgttgttttcgcgtttgcgctgccgttcgagtgcgtaataggccgcgtagcagcaggcgacgaacgggatcatgcaatacagggtcgaacgctgcgtatcatcgagcaccacgagcaccagcgcgccgatgcacatcacgatggccagccacggcagcaccgggaaaccgggcgcacgatagccgagctcatcggcgctgtgcccaccccgcgcccattcgcgccggaaacggatatggcacacgcatacggagaaccacaccaccagcgtcgccaaacctgacacggcgaccaacaccagatatacggtcgaggcggcgatcacggaagacagcaacgccagcagtgagcccgccatgctgaacagcacggcccacaccggcacaccacggaaattcgtcctagcaaaacgttcgggaatcagccgctccttggccagcgaccacaccatgcgcgaacacacgtacaggccggagttcgcggcggaaagcacagccgtcaacaccacgaagttcatgatgtcgccggcgaacggcataccgattgactggaacaccagcacgaacgggctcgtatccacgccggcctgatgccaggggatcaaggccgccatcaccagaatcgagccgatgaagaaaatcgccaggcgcagcaccgtggtgtgcacggccttgggaatcgcacgcgagggatccttggtttcgccggccgccacgcccaccacttcggtgccggagaacgcgaacaccacggtcagcagagtcgagaaaatcggcgcgataccgcttgggaaccagccgtcggccacgaagttgcccagcaacggcgcggaatcatgaccggcaatcggtatggcgccgaagatcgccagcaggccgatcacaatgaacgcgatgatggcgaacactttgattgacgcgaaccagaactccgcctcaccatatagccgcacggacatgatgttgagcgcgaacaccaccacaatgaacacggccgaccacacccaggacggcgaatgcgggaaccatcgctgcatcaacagccctgcggccgtgaattcggaggcgagcgccaccgcccagttcagccaatacaggatggcgatggtgaacgcggtgccggggccgatgaaccgcttcgcatacatgtggaagctgccggcgtacggcatagccacggacagctcgcccaacgacaccatcacgcagtagacgagcagggagccggccgcgtaagcgaggatcgcgcccaacggtcccgcctgatgaatcgcgtagccggagctgacgaacagaccggtgccgatcacgccgcccagggagatcatcgtcaggtgacgcgactccatcttccgttcaaggccggtatcgtccttgggtgtgccggctgccgccatgctcgggtctcctttggtcgggtgaacagttgtgtctcgtgtcggttgtgcgggcggcgctcgatgccgcctaccatatgatagcggtaacacgaacagcgagtggaacacgaggagtttggaatgatggaactgtatatcggatcgcatctgtcgacggccggcggatggaatgcgctgctggaacgttcccatgaggagggcggtaccgcgttcgcgttcttcccgcgttccccgtacggcaagcgttcgaaggcgctcgacccggccggcgcggcggcgttcggtgcgcgtctgaaggctgagggctatgggccgttggtcgtccatgcgccgtacgtctacaatctagccggcaaggatgaggccaagcgcacattcgcgatcgaggcgttggccgaggacatcgagctgctgaccgccatccgcgaggccggacaggaggtgtatatcaatattcatcccggcgcgcatgtgggccaaggctccgagaccggctgccggctgatcagcgagggactgaatcaggtgttcgagcgcgcggccggcgtcatggtgcttctggagaccatggccggcaaaggcacggaatgtggccgcaatttcgatgagctcgccacgatcatggatggcgtggagaataaggcgaacgtcggcgtcacgttcgacacctgccatgtgttggatgccggctacgatttggtgcacgactacgacggtgtgatgcgccagttggatgaggcgatcggcttggccgaggtcaaggcgattcacgtgaacgattcgcagtttggcctcgactcgcataaggatcgtcacgccaacatcggggagggccagctcggcatcccgtttttcacgcgactggtcaacgacccgatcatggccaagctcccgatgattctcgaaaccaaggagcagacgcccgccacgcatcgcgacgagatcgagttgttgcgcggattggtgcaaaagtagtcgtagtcgaccaatgtcgagcagaagagacctgtttttgactgatggccatacgaggttagctatcagcggggcgttgattgacccgtcttcatatacagctgcatagccggttccagctgcaagagctcaaaacagacgcatgggttcggcggaatccaatggctgaataagacgtttgccgtcgctgttcagtggcgcgacttcgtgaaattgcagatgccgggaaagcatggtacccgcttcccgcatggaatctaacagtgcggctccgtcaacggagcggtccagccatgaggcaaccatattccgaggaaccagcaggggcatgcgatcatgcaccttgacgaactcgtccgcggcagggcaggtgatgatggttgcggtcagctgccatggcgatgcgggagacggcctccaccatgagtacaggccggccaaagacaatagttcatcatgtggtgcgtgaaaatagaacggcctgcgacctttccattcgtagtagccggaagcggggatgatggctcgcatggattttgtggattcggcgaacgccggcttgacatgcgcagactccacacgcgcattatatgtggggtagctcagcactttgttggcgctccatcgcggcaccagcgaccaataggcaccggtcagatgacggcggccatccttgccctgtgccaccacgccaatgttctgcatgggtacgatgttgtaggaaggctgtggcagagtgtcaacgcgcacgtcatcctcgtctaccgcgaactgtgaggccacggcatcccaatccaaatcaagcgcgaatctcctgcacatgcgcccagtctatgccatcaatggaatcaatcccaggccgtatgaccgatattcatggcgattttcctttttgttggccgctctggttccgtagcgatacgaaccaacgaggaatagcccagaatgtaggacgggttcggcaatcgggacggggcgtgacctagagtggcgcatgaccgaacaccaacaaagggaggaccatgtcggttttggacgaactggtggcgggagcgctggaggatcagcgcgcccgtgagctcaccgtatcgcttgagggcgtgaagaaggccgcgctggcggccccggctccgattgacgcgacacgatggcttaagcgcgccgacggcatccccgtgatcgccgagatcaagcgcgcgtctccgtccaagggccacctctccgacatcccggacccggccgcgctggcccgcgagtacgagaagggcggcgcaagcgccatctccgtgctcaccgaaggccgcagattcctcggcggccttgacgatttcgacaaggtccgcgccgccgtgcacattccggtgctgcgcaaggacttcatcgtcaccgactaccagatcttcgaggcccgcgcccacggcgccgacctggtgctgctcatcgtcgccgcattggacgacgcccagctcaagcacctgctcgacctggcgcacgagttgaacatgaccgtgctggtggagacgcatacccgcgaggagatcgaacgcgcccgcaaggccggtgccaaggtgatcggcatcaatgcgcgcaacctgaagaacctcaaggtggacgtgaacaaatacaacgaactcgcggccgatctgcccgatgacgtcatcaaggtggcggaatccggcgtattcggcgcggtcgaggtcgaagactacgcccgcgcgggagcggatgcggtactggtcggtgaaggcgtggccaccgctgatgatcatgaacttgcagtggaacgactagtaaaggcaggagcacaagtgaaagcatccgaaaccaccccgctcagcgaacatcagggaccgtactggggacagttcggcggccgctatgtgcccgaggccctcatcaccgccctcgacgagctggagcgcgtgtacacgcaagccaaggccgaccccgaattccacaaggaattcatgacgctccagcagcgttacgtgggccgtccgagtccgctgaccgaagccccgcgcttctccgcacttgtcaagcagaagaccggtctcgacgcccgtatcttcctcaagcgcgaggacttgaaccacaccggcgcgcacaagatcaacaacgcgctcggccaggccctgctcgtcaagcgcatgggcaagacccgcgtgatcgccgagaccggtgccggtcagcacggcgtggccaccgccaccgtgtgcgccatgctcggcctcaagtgccgcatctacatgggccagatcgacgcccgccgtcaggccctgaacgtggcccgcatgcgtatgctcggcgccgaagtggtcgaggtgacc

SEQ ID NO: 181 - DNA, 13294 bp, Unknown
  R101_18m  MAG No. k141_8298
aagtgcttccacaacgaccacgtcatcggcatctacttcgccaccgatgcgaacatgctgctggccatcgccgagaagtgctacaagtccaccaacaagatcaacgccatcatcgccggcaagcagcctgctgccacctggctgaccctggacgaggctcgtgccgagctcgagaagggtgccgccgcttgggattgggcttccaccgccaagaacaacgatgaggccgaggtcgtgcttgccgccgccggcgatgtcccgactcaggagatcatggctgcttccgacaagctgaaggaactgggcgtcaagttcaaggttgtgaacgttgccgacctgctctccctgcagtccgccaaggagaacgacgaggctctgaccgacgaggagttcgccgacatcttcaccgccgacaagccggtgctgttcgcgtaccactcctacgctcacgacgtgcgcggcctgatctacgaccgtccgaaccacgacaacttcaacgtccacggctacgaggaggagggctccaccaccaccccgtacgacatggttcgtgtcaaccgcatcgaccgctacgagctgaccgctgaggccctgcgcatgatcgacgccgacaagtacgccgacaagatcgacgagctcgagaagttccgtgatgaggccttccagttcgccgtcgacaagggctacgaccacccggactacaccgactgggtgtactccggcgtgaacaccgacaagaagggtgccgtcaccgctaccgccgctaccgctggcgacaacgagtgataacacctccacggtgttgttagttcgctaacgccaaagggctcgggattcgtcccgagccctttgcttattcataagccccctctgacgaggaggctgtcatgcgaagcatgactgggggagagaaaagcggaagcgaaggcgagagccaagactgaaaacagcccataaattccccaccccaactaatccttaaggatgacaactccccatcaattcaatcctgcgcatgatggaaaccacgccattcctccataggcttggaaccagtatccgggcacgaggctcggagccagccatgggggagagcacatgcagaaggatcagcagcagaccgcaatcatacaaccgttggacgctaccgacaccgtggaatcaagtgtcgacgcccttgcccaaggcgaggcggagaacgcggaagtcgccgaattcaaccgattaatgcgcgaacgtgagacgcgcaagaaaaagcgcgtggtgcatcgcatcatcgccgtcgccgtcgtggcggtactgattatcggctttatggtggtgcacgcgattatcaccccgtcagatgggggcgtgtctccggtatccacggcaacggtggaacgtggccatttcgtcgaccaagtcagctccaccggttccatagaacccatcaactccaccgtcgtcgccccgcagatcgacggcaccatcggcgaagtcaaggtgcaggaaggcgcaaccgtcaacgccggcgacgtactgtttaccatcaacaacgacaagctcgatagcgacgtgaatcaggccgatctggctctgcgagcagcgaactcaaaccttaatgccgcccagcagcaggtgaaccaaatcaatgcgaccataggtcaggcacgtaatcaggatggtgaggaaggccaagccgctgccgatgatgcggccggacagctgcccgctgcacaaagcggcgtggagagtgcgcaggtcgccgttcagcaagcacaagccacctatgacgaggcggtcgcccaagccaacaagcgtacggtcactgctccggtctcgggcacggtgctgaccatgagcgcggtgcccggtgccgccatcggagcttcctccgatggctcatccacttccgccggcgcagacggtaaaccattgtgtcagatcgccgacctgagtcagatgaaggtcaatgtcaacatcaatgagctggatatcactaaagtggccaaggaccagagcgccaaagtcacgttctccgcggtgccgggactgacgctcgatgccaaggtggataccatcgccagcaccacgtcgcagttggctgattcctcggcaggcgggcagagtggcaacggcggcgtgggatacgccgtgcgtctcatcattcccgcccctgatccgaaactgaagccgggcatgacggccagtgtgaaaatcaccatgcagagcattgacaacgctttgatggtgccgctcgccgccatcgtggatgagggtaaggagagcagcgcggtcatgctcgagaccaacgccgaaacccatgagttcaagcgggtgcgagtcacggtcaaagccaagaacaacaccaaagccgttgtggaaggcaatgtgagcaagggcgatgtcatcatgcttgatggcgcttcggctgccgacaatactggcgatgctgcttcttccacctcgcaaaccgcggcttcggacgaaagggcacgctgatatgttcccgtttcgttccgacgcgagccgggcaaatcgcggcaaacggcgtaatgagaccattgccgtgcccaccgccacagccaacgtcatcgaggttgaaaacatcaaccgcatcttcgagacaggcgacacctacacccatgtgctcaaaggcatcaccatgaacgtgcgccaaggcgagttcctcgccatcatgggaccatccggttccggcaaatccacgctgatgaacacgctgggcctgctcgaccgcccatcatccggcacctaccgcctgtgcggcatggacgtgcagaatctgagtgatgacgaacgctccgaactgcgcgggtggctcatcggcttcgtgttccaatccttcaatctgctgccgcgcaccagcgtgctgcgcaacgtgatgctgcccctggcctattccgactgcccggtgcgtgaacgggaaggtcgtgccatcaaagcactccaatcagtggcgttgagtccggaactgttcgaccgcaaaaccaatgaactctccggtggtcagatgcagcgcgtggccatcgccagagcgttggtacaggacccgccgctgattctcggcgacgagccgaccggcaacctggactccaaaaccggcgatgcggtgatgcacacgttcgaacagctcaagcagcaaggcaaaaccatcgtgctcatcacccacagccccgaagtggccgaacgcgccgaccgatgcctgcacatgcgtgacggcgtactgcgtgaagggatgtaccgatgagaacacgggatctgctggcggaaaccggctccgcactgagggcgaacaaaggcaaaagcgcactgaccattctcggcatcgtcatcggcattgccgcggtgattaccatgacctcactgatcggtggcattcgagactctctggtcggcgaactgggtatgaacgcggcgcgcacgatttcgatttacacggacgtcggcacccttgacgacgaacagatcactgcgatgcgcgaggaactgaccgactacgagtacttctcgccgacgaactatggtgccgcctcgtcaatcgccgcgcccggtaccaccgacaaggtgtcggcgagcatcaccggtgtcgacgagcatttcttcgatgtatccggagtgacgattggtcgtggacgggccttcacatcgagtgaagcaacgagtggtgcaatggtggtgattctcgacgggcagggcgtgcagaagctgttcggcagcgcggacattgacgccatcggcagaaccgtcacgcttgacggcaatgaagcaaccgttgtgggtgtggtcgagtcgtctggattgatgggcggcatgggcggcgacggcgtgaatatctatatgcctgccaccactgtggcgctgcggtttgcgtcctcgaacatgggatacatgcagatctacggactggccaaggacggggttgatatcgaccagctcacggaacagacgaagaccgttgtcgctcgcatcatgcgtatcccaaccgaacagatcgaccagaatctgtcggtcgtaagcgcccaatcctccatcgaccagctttccagcttcatgagcgcattccaggtgctggcgggttcggtggccggggtctcgttgctggtgggcggcatcggcattatgaacatgatgctcaccaacgttaccgaacgcatccgcgaaattggcctgcgccgggcattgggtgccactcggcgtgacgtgaccgcgcagttcctcgccgaatccattgcaatcacagtgcttggaggtcttatcggcacgttgatcggctacttgctgtcgttgggcgccgctggattggtgtccggcatcgccggtggcatgagtatcgcgccagcagtttccgtgcagtccatcggactggcagtgggcatctgcatcgctgtcggcgtgattttcggctactatccagctagacgcgcggcaaagctcgacccggtcgaggcgctacggcatcaataatcgcgtagcaccccgaaatgcagtagggcattgcgcacaccgtcgtggtccacgtcgtcggtgatgtaatcggcggcggcctttggctcggcggtcgcattgcccatcgcgaccccgatgccggcgtaggcgagcatatccgtgtcattgccgccatcgccgaaggccatggtctgcccgcgcgtgatgccgtaatgcgccatgaaccgctggatgccgcgcggcttgccgccatcggccggaatcagatccgtgaaatccggatgccaacgcaccccgcgcacattgctgcacagtcccaccagttcggcctccaactcgggtccgacaaagggactgatctggaaagtctcatgatccagcgcgcgggtgcgcgggtcctcaaaataccgggtcggtgcggttttgcccagtttgctccacgtggcgcgaagcagatcattggactggttgaagtacacgtaatccttctcgccgaaattgcacaccacatcggggtgacggtccagccagtcgagaatcacctcaatatcagcagtatccaaggcctgcgaggcaaagaagccggtgtcatcaaagcaatactgcccattgaacgccaccacgccatcgaacgtcaccggcatggtatccagcaccacgtgcatctgtgaaggcgcgcggcccgtgcaaatcagcaccttgacgcctgcggcctgcagccggtgaatcgcctcgattgtggaatccggcaccgtatgggtcgtgaaactggtgagcgtgccatcgatatcgaagaatacggctcggatatcggcattggcagtatcggtagtcatagcttccattgtcaaagcccctctcgacgtgctttccggcgtgttcggcacgcctatagcgggttatcaaacgcacgaatcccggccattgcatgcgcgccataaaagacacctatacggcaatcggccattttccgtcactttcgcggttcaagcgcgttatggtgttacccgacatcaattttggagagaggaaatccaatgacagcagcaacccagtcggcaactccggccgctcctaacaataacgagccggtgcgtgtgaaccacaccgtccgcaacgtcatcatcaccatcgtggtcgtggcgattatcgccgtggccgcgttcttcggctaccgcgcgtttgccggtgccaacgagtcgtccgccaagggcagcaagggcaacccggtcaagatcggcgtggtcggcgctaccaaccccgaatgggtcaagttcaagcaggacgccgagaaggccggcatctacgtcgacatcgtcgacttccaggactacacctccgaaaacccggcccttgactccggcgagctggacctcaacgaattccagcacctgctctacttggccaactacaacgtgagcaacaagaaggacctgcagcccatcggcggcaccgccatctacccgctcggcgtgtactccaccaaggtcaaggacatcaaggacctgaagcagggcgacaccgtcaccattccgaacgacgaaaccaaccaggcccgcgctatcggcgtgctcaaggccgccggtctcgtgacgctcaagggcgactggaccgccttctccactccggccgacatcgacgaagccaagagcaaggtcaaggtcaccccgctcaaggccgaacaggtggccaccaccctgaaggacccgaccatcgccgctggtgtgatcaacaacgactacgtggccgacgccggtctcaacccgaaggacgccatctaccaggatgacgccgaatccgaagaagctcgcccctacatcaacgtgtgggtggcccgcaaggcggacgtgaacaacgagacctacaagaagctcgtttccatctaccagcagaaggatgtgctcgacgccctgcaggagaactccggcggtaccgcggtgttcgccgacaagttcagcgccagcgagctgcaaggcttcctgtccgacattgagaaggacgccaaagcccagcagtgagccgtggctgatacgagtgcacgactaacctgtccatagccattaccaccaagcggagcgagtacccgagccaacaatcgggattcgctccgcttccgtgaccggacatcaacaaccagcatcagggagcactatgagcgaccccatcatcaccttcgaccatgtcgtgaaggaattcaaaacacgcggacgcggcgcgaacatcgcacgagccgtggatgacgtcagcctgaccatcgatcgcggcgacatcttcggcatcatcggctattccggtgcaggcaaatccacactggtccggcttatcaacgcgctcgaacgacccacctccggcaccgtgaccgtgctcggcaccgatatcacctctttgagtgagaccaagctgcggcccatccgccagaaaatcggcatgattttccagcagttcaacctgttctccaccaaaaccgtggcgcagaacatcgcctacccgctgcaactcgatcactggcgcaaggactatcaggatcgtcgcgtcaacgaacttctcgaattcgtgggccttagtgagcacgcaaacaaatacccctcgcagctgtccggcggccagaagcagcgcgtcggcatcgcccgcgcactggccactaatccggagattctgctcgccgacgaagccactagcgcgctcgacccggaaaccaccaccgaagtgctggccttgctcaagcgtgtgaacgaggaattcggcatcaccattgtgcttatcacccatcagatgaacgtggtccagcagattgccggccgcgtggccgtaatgagcgccggacgcgtggtcgaatccggcgacgtatacgacgtgttcgccgcgccccagcagccggtgaccaagcgattcatcgccaccgccctgtccggcctgcccgaggaagaccgggtcgagcgattgcaccacgaatggtcgggccgcatcgtcaccgtgctcatccgccaaaaggacgtttccggcagccatggccacgaactcaaggcatccggacagaacatctccgaactcatcgccaaatacggcgtcgaatccagcctgctctacggcggcatcgacacggtcaaggggaccgccatcggtgccatcacctacgaattcaacgggcccggctggcacgtggacgaattcctgcgcgagctcgccgccaatagcgacgtcattgacttcggcaccgccgcaaagcccgtggcttacgccgacgcagttgccggacatgcctcctacgccgaagaccgcgcccatgacccactggcggccgatactgccaccgcgcccgctgtatccgccgccgcacatgaaggagacaacgcatgatcatcctcgccaactcgcgtagcgactggaacgtgctgcgcccactattgttcgaatccatcggccagaccctgaccatggtgctcgtcacccttgtcatcggcggattcctcggcctgatcctcggcgtggtgctctatggcacccgccccggcaacctgttcgagaacgcggtcgtctaccgcatccttgacatcatcgtcaacatcgtgcgcccgattccgttcatcattttcctggcagccatgcagccgctcaccatcgtcgtggtcggcacgtccatcggcaccgtggccgccatcttcccgatggtggtcatgtgcaccttcgccacttctcgtctggtcgaacagaatctcgtgccggtcgacccgggagtaatcgaggccgcgcgttcgatgggtgccggcaagctcaccatcatccgcaccgtactcatccccgaagccctggcaccgctgatcctggcctacgccttcctgttcatcggcgtgcttgacatgtctgccatggccggctacatcggcggtggcggtctcggtaacttcgccatcgcctacggctaccagaagttcgaccagaccgtcacctggacggccgtgatcatcatgatcgtactggtccaggtggtgcagggcatcgccaacgccatcgccaaacgactgctcaaacgccagcaataacaaggcatactgaccccatagatcgcggccctcgccaatatgaagcgagggccgcaatatattcttcgcgctactagaatcgggaaccatgagtgaacatatcgacatcgaccacgaactcatcaccatccgccactacctgcacgcccatccggagcgtagtttccgtgaattcgacaccagcatctatctgaccgaccagctcaaggcgcacggcatcgagatcctgcacaacccgctggagactggtgttgtggggctcattcagggcgaggccggtcccgggccgcgtatcgggctgcgcgccgacatcgacggcctgcccatcgtggaagactccggactggagttcagctccgtcaatgaaggcgtgatgcacggctgcggccacgacctgcacatgaccggtctgctcggtgccgccttctggctcgccgagcaccgtgacaagttcgccggctcaatcaagattctgttccagccgagtgaggagaccggccaaggcgctcgcgccatgatcgacgccggactcgtggatgacgtcgaagccattatcggcacgcacaacaaccccaactatgcgcccggccagctggccatcggcgttgagccgatgatggccggctgcgtgaaattccgcgtgaccctccacgcccaaggcacccacgccggctacccgtacaagggcaccgggcccatcgaagcgctcgccagtattattctgagcctgcagaccatcgtgagccgcaacgtcacgcccttccacccgctggtgctgtccgttaccgaagtgcacggcggccatgtgtggaacgtggtgcccgccgaagccggattccaagggactgtgcgctatttccacaagtcggatggcaatctggtcggccgccgattcaaggaagtggtggaacacaccgccgaggcatacggtatcagcgccgatgtggtctgggatgatttccaagacccgctggtctccgatccaggtcttgccaaggccgtggcggcggatgtcaacgactacgcgcagctcgaaccgatacgtcagtcgatggcgggggaggacttctgcgaattcgccaaggtgacgttgccggtgttcgcgttcgtcgggtcaaacggccaggaaggttgcgccgactggcatagcccgcatttcgtgggtctcgacgaatccattcccaccttcgtcaacttctacgtcaacgccgccctgcgcgtgctcaacgagctgaggtaaatccttttttggctcccctctggaggctgaggcgttaggcagacagcccaatgggctgtctgcagccgaaagtgaggcgacagccgaaccagatatgcgcgggcctcgcccgtccataagtgcaggacgagctatcagcgaagctgactgaggggagtggcattcgttcattaggtcgattcatcgtccattaggtcggtgaacggcgatactggttgttggaatcgcgccattgcaacgactgatatcgcattgcagtgacctaatgaacgcaaaaacgacctaatgaatgacgccaagccggaagaacaggcaatccgacgccatacgcggctacactaagaagctatgacacagcttcgcttcgcactcgcccagatcgacacctgcgtcggcgcgctcgatgccaacgccgccaaagtgctcgactactcccgtaaagccgccgcagggaatgcccaagtggttgttttcccggaaatgaccctcaccggataccccatcgaagatctggccctgcgccgcaccttccgccaagccgcatgggacaaggccaacgaactcgccgcccagctcaacgacgacggcctcggcaatctgttcgtggtggttggcaccgtgggcactgatcgtaagacctccaagccgcgcaaccgactggtggtattgcatcagggcgtggtctgggccggctacgacaagcacttcctgcccaactacggcgtgttcgacgaattccgtatcttctccgccggcgaccgttccgtgaccctcgacgtggatggtgccaccatcggcgtggccatctgcgaggacatctggcaggatggtggcccggtggccgacctggccaccaagaacatcgacctgctgctcaccatcaacggctcgccgtatgaggaaggcaagaccaacacccgtttcgagctcgcccagcgtcgtgccgccgaagtcaacgccccggtcatctacctgaatcaggtcggcggtcaggacgacctggtcttcgacggtggcagcttcgtggtcgatgccgacggcacgcttatcgaacgcggcccgatgttcatggaaaacctgacgttctgggacttcgattccaccgccgaacatcaggtcaaggccgagatcgttccggaactcgacccggacgaagaggtatacactgcctgcgtgctcggcctcaaggactacatggccaagaaccacttcaccggcgtgacgctgggcctctcaggaggcatcgactccgcactggtagccgccatggcggccgacgcatgcggcggcgagaacgtctggggcatctccatgccctccatgtactcctccgatggttccaaagacgacgccgctgacctggcctccaacatcggtgcccattacgaggtccagcctattgagccattgttcaacacctaccaacagcaacttgaccttgatggcgtctccgccgagaacctgcaggcccgcatccgcggtgtgatcgtgatggccagttccaattctcgcggcctgctcgccgtggccaccggcaacaagtcagagctcgcctgcggctactcaaccatctacggcgatgcggtcggcggctacgcacccatcaaggacctgctcaagacccgtgtctgggagatcagccgttggcgtaacaaggccgcggccgcaggcgtcggtatcggcgggctcaagatcgtgggcaacgaggacggcaacgccggcatcccgttgaaggacggcgtgatgattccggtctcatccatcgagaaggctccctcggccgagttgcgccccgggcagaaggactccgactccctgcccgaatacgcgctgctcgacaaggtgctcgccgcatacatcgagcacgcgcacggccgcgccgacctgttagccgacggcttcgaccaggtcaccgtagacaccgtgatgcgattggtggaccgcgccgaatggaagcgccgccaatacccgctgggaccgaaggtcacggccctcgcgttcggccgcgaccgccgactgcccgtcaccaacgcgttcagggaataaacatatattgctcccgccagcgggagcaagtaataccgttgaggaggtaccaatgacagacgataacaagaagcagtggtatttcaacaccgtcaagaagcaggccgagctgggcatggtctcaccgattgaacagcgcatgggtccgtacaagaccaaggaagatgccgaacacgcctgggacatcgtggtggaccgcaacgccagatgggaggaggagaactggcgctggaagaactacggtgtgaaatccgcgcaagcgaacgatgaagactgacggccaaaacagacggatacggttctgctgtcaatctcaagaccgaaccgctcaccaagccgctcatacgaacatcacagtatgagcggtttcccatatctggagacgtgcaatagccccatcaatacctagaaaccattggaatggtagcgttcacaaaaaacaatgtgagatagctcactcccaatttcggcttttcccaagcaagtgccaactacactgttgaaccaagggttccgtgaagatgcgaaacctacaaccccatttaaggagtgacatgaccgcagtagaaaatgcagctgtctcccaagaggagcttgacgccaaggcgtgggccggcttcaccgagggcaactggcagaaggatattgacgtccgcgacttcatccagaagaactacaccccgtacgagggcgacgagacattcctggctcctgccaccgagaagaccaagcacctgtggaagtacctcgacgacaactacctggccgtggagcgcaagcagcgcgtctacgacgtggacacccacaccccggctggcatcgatgccttcccggccggctacatcgactccccggaagtcgacaacgtgatcgtcggcttgcagaccgacgtgccctgcaagcgcgccatgatgccgaacggcggctggcgtatggtcgagcaggccatcaaggaagccggcaaggagccggatccggagatcaagaagatcttcaccaagtaccgcaagacccacaatgacggcgtgttcggcgtctacaccaagaacatcaaggtcgcccgccacaacaagatcctcaccggtctgccggatgcctacggccgtggccgcatcatcggcgactaccgtcgtgttgccctgtacggtgtcaacaagctgatcgccttcaagaagcgcgacaaggactccatcccgtaccgcaacgacttcaccgagccggagatcgagcactggatccgcttccgcgaggagcacgacgagcagatcaaggctctgaagcagctcatcaacctcggcaacgagtacggcctggacctgtcccgccctgctcagaccgcccaggaagccgtgcagtggacctacatgggctacctggcctccatcaagtcccaggacggcgccgccatgtccttcggccgcaactccgccttcctcgactgctacatcgagcgcgacctccaggccggcaagatcaccgagaccgacgcccaggagctcatcgacaacatcgtcatgaa

SEQ ID NO: 182 - DNA, 13389 bp, Unknown
  R101_18m  MAG No. k141_8514
gattccgaaggcgtatttctcgctggcgatgcccgtggtgctcagcatgctggtcaccttggtgtacagcatggtgcgcatatcttcctttccgaattgtgtggctccctctgacgagggagccgtcagcgcagctgactgagggagagaagcagacgaatgactgtatcggctgaaagccgatgccattttttgcggctgcgccacaagtctccccctcagtcacggctttgccgcggcagctcgtcccgcaattatggagccttcggctggcttgactgtcgtcaagccctcgcctggaaacgcctccggcgtttccttcacggctcggcccatcagagggagcttgtgaagctgcttcagttgtagggttcgtacgacttgttcggtggtgcgggtcacgttggcggccgcgtcggccagcagttcgctgaggctggcggcaccgggggcgatgccgaataccgcgtcgatgccgacctcatgcagttcgtcgatgcccgtgccgatgtgtccggcgacggcgatcacgggcttgccgtggcgcttggcggtttcggccacgccggccggggttttgccgaacttggtctggaagtcgatggagccttcgccggtgaacaccacgtcagcccattgcgcggccgcatcaagtccggattgttcgatgacgatggcggtgcccggacggaattcggcgtcaaggaagcctttcagcgcggcgccgataccgccggcggcgcccgcgcccggcacgtcgttcacagcgacgccgagccggctttcgatgacctgcacgaagtgcgccaacgcggcgtccagtgtggcgacgtcggcctgggaggcacctttctgcggtccgaacacggcgctggcgccggtgggaccggtcagcgggttggtcacgtcgcaggcggcggtgatggagacgttcttgagagccgggtccatcgtgctgatgtcgatggtggccagatcagcgagggccgctcccccgtgcttaaggtcgttgccgttcccgtccagaagacgaacgccgagggcctgcagaagtccggcaccggcgtcgttggtggcgctgccgccgagcccgacgatgatgcgcttggctccggaacggacggcggcgagtatgagttcgccggtgccgtaggaggaggcaatcaacgggttgcgttttttggcttcaagcagtgcgaggccgctggcttcggctgtctcgaccacggcggtcgtgccgtcggcgagcaggccgaagtggccttcgacaggtcggccgagcgggtcgtggaccggcacggcgtgcatcgatccgccagtggcgtcgacaagcgcacgtgcggtgccttcaccgccgtcggccatggggaggcaacggacctcggcatcgtggtcggcattctcaatcccctgagccatcgcccgggccgcctccatggcggtcaggctctctttgaaggagtcaggggcacataagtatcgcgtcatgcttcgagcataccgcacgatacgcggaacggtaatcgctttccgtaattcgcgtgattatttttgttcaaaattcaggctttccaatccacaatgctactattgcaagcaaaactgcggtatcattgcggtaagcgtttagacatgttttccgtttcagggaagaaaaggaccgattcgatcgtggctgtacagaacgataaggcgcaatcgccagcgacattgatggacgtcgccaaagaagcccaggtctccatcgccaccgcatcccgtgtgctcaacggcagcacccgcaaggtacgcaaccaatcgtatgtcaaggtgatggaagcagccaccaagctcaactatcgtcccaacgcctatgctcaggcagtggccaaaggcactgcaccgaacatcgtgctgctggtctccgatatctccgatccctacttcgcatccgtgtcgcaaggcgtggtcaaggcggcggccgaacgcggcatctccgtgaccatcggcgtggcagccaccccgcacgaggagttggaggcggtgcgtaagtccgtatccaccaggccgcgcggcatcatcatctccgaaagcgaatacaccgacgcgccggaacgccaggcgttgcagacggaactcatccagtacgaatcgtccggcggacatgccgtgttcgtactcaaccgcaacctgcccttcccggccgtggacgtggcgaacgacgtcggcgcgcgtgccatcgcaaagcttatcgtcgattccgggtatacgcgccctgcgattctcaagggcgatgacgcacaccgctcctccaaagaacgactggccggtgtgatggaagtgttggacgaggcaggcatcaccgtggacccgaaagccgtggcaaacggtaagttcagccgcaccgacggctatgcggccgtcatgcagatggcccgatccggactgctgaagccgggcgaaggcgcactgtacgacggcaaaggcatcgattcaatcatcgcgctcaacgacgtgatggccatcggtgcgatgaccgcgttgcgcaccaacggcatcgagccgggtcaggaaatcggcgtcaccggtttcggcgacatcccctactccgccgacgtgttcccaccactgaccaccgtgcatctgccgctggccgaaatgggccaggccgccgtggacagcatcctgtccaaccgcgatgacgcggaggccaccggcggcactgccaaccgcctgatctacgtgcaaagcgccccggacgtagtcctacgcggttccctcccccgccggtaaaacaaaaaagctccctctgacggtgtaaccacaactagcgaacgggtaatggcgactgccgcgcaccataccaccgactcatacaccgacgtaatcgaagaactgttcgattaccgagtcattgagcaaccggccacgacgagtgggcaccactcgatgattatcggatacggtaatcaggccttcgctgaccattggggcgagttggtcaagggaaacattacggagagtctggggcgtgctgctcatacccgcatcgttgatggcgcggttgatgcggtcgaggccaaggccctcgtgcaggcgcagcccgagcatgatgagctcttcgaggttttcctcgggagtgatcgtctcgctatcggcccacggcacacggttctcgttgatggccgtgccccacaaacgcgggtgcgcgatgtcccagctgcgcagaccgtgtgagacagaaaccacccccagtccggcatccgccggacagcccccgccagcgggggcatgaatttcttgggagttgttcccatgcgcgttgatcatacctagttcggcgttggtttctccaagttcggcgttggcctgtccatcagctgaggcagaggcaatggcttcggacttgctcccgccagcgggggctgtcagcgaagccgactgggggtggtcagcctcggtcaccgcgttgtagtgggagtgggcacctggccctagaccggcccaatcgacgttgcgccaatagccgaggttgtgctggctctcgtatccggggcgggcccagttggagacctcataccattcgaggccggcggcggcgaacaggtcgtcggcgatttcgtatttggctgcttcgtcatcgtcattgggtttgggcagagtgccggccgcgatttgacgacccattttcgtggtgggttccacggtcagtgcgtaggcggagatgtggttcacgccgaggtcgatggcggtcgtgaccgaggtgcgccaatcgtcaaggctctcccccggtgcgccgtaaatcagatccacgctggagcgcaggccggccttattggcggcattaacgcctgcgaccacgttggccggcgtatgcgtgcggtcgagggttttgagcacgtgcggcacggcagattgcatgccgaaggaaacgcgggtgaagccgccggcagcgagctcattgatgtaatattcgttgaccgtgtccgggttggcttcggtggtgatttcggcgtcgggcgcgatgctccagatcttgcggatggcatcgagcatggcgaccagatcgcgggcggcgagaatcgtgggtgtaccacccccgaagaacacggtggagaccggtggctcctcgatgccgtggtcgagctgccactgcttggtcagggccatttcacgaatgaccatattggcatagttgccgcgcgaggcccccgcaccaagatccgtagccgtgtaggtgttgaagtcgcagtaaccgcagcgccgcaagcagaacgggacgtggatgtagacctcgaacactagccctcggtcttctgagcggcgcggatcttgtctttggtgtcgcggtcgttggagtcctcgccggtggacagggcggcgatgaacgcctcctgcggtacctccacatggccgagcatcttcatacgcttcttgccggccttctgcttttcgagcagcttacgcttacgggtgatgtcgccgccatagcacttggcgagcacgtccttgcgcaacgcacgaatgttctcacgcgcgatgatacgcgaaccgattgcggcctgaatcggaatctcaaactgttggcgaggaatcagactacgcaatttcttggtcatcatcacaccgtacgaatacgccttatcgcggtgaacgatggcactgaacgcatcgaccttctcgccctgaataaggatgtccaccttgaccaaatcggcggactgctcgccatcctcatggtaatcaagggaagcgtagcccttggtgcgggacttgagctggtcgaagaagtcgaacacgatttcggccagtggaatgcggtagtgcatctcgacacgatcggtggagatgtactccatcgtgcccataatgccgcggtggtcctggcacagatccatcaccgcaccgataaattccttgggtgtgatgatgtcggcggcaaccatcggctcgacgatcttcttgatcttgccgtccgggaattcgctcgggttggtcacatgatgctgactgccatcctcggcggtcacgtcgtaggtgacgttcggggcggtctggatcaggtcgaggccgaactcgcgggagagtcgctcgttgacgatctccatgtgcagcagacccaggaagccgcagcggaagccgaatcccaaggccacggaggtttccggcgtgtagatcagggcggcgtcgttgagcttgagcttgtcgagtgcatcacgcagttcggggaattgcgcgttgtcgatcgggaacaaaccggcgtagaccatcggcttggggtcgcggtagccgggcagcggctcggtggccgggcggacggccgaggtcagggtgtcgcccaccttggactgactcacatctttcgcaccggtgatgatgtagccgacctcaccggcaccgagtgccttggtacgggtcatatcggggctgatcacaccgatctcgatgggatcgtgggtcatgccaatgcccatcatgtggaccttttcgcggtcgtgcagttcgccgtcctccatacggatgtaggtgacgatgccgcggtagggatcgtagacggagtcgaagatcagcgcgcgggcaggggcctcggggtcgccgtgcggggcgggcacgtccatgacgatctggtcgagcaggtcggccacgccttcgccggttttgccggagacgcgcagcacgtcgctcggctcgcagccgatcagacctgcgatctcctcggcatgcttgtccggctcggcggacggcaggtcgatcttgttgagcacgggaatgatggccagatcatggtcgatggccatgtacaggttagacagggtctgcgcctcgatgccctgggtagcgtcgacgagcagcaccgcgccttcgcaggcggccagtgcgcgggacacctcataggtgaagtccacgtggccgggggtgtcgatcataccgagcgtgtattcggtgccgtcaaaggtccatggcacgcgcacggcctgggatttgatggtgatgccgcgctcctgctcgatatccatacggtcgaggaagcgatcgcgcatctcgcgctcgggcacaatgccgcttaactgcaggatgcggtcggccacggtcgacttgccgtggtcgatgtgcgcgatgatacagaagttgcgaatcaccgactgatccgtggaacccggctgattgtgttggacgaccaacgcattcctcctcttggcatatactcaaacttcacctagtgtagccgagggactgtattcggcgtggcattgcgcgggtttttccggggctcatgctatcctctaccttttgtatgtccttataacacacatcgtttggagtaaacgtggcaaacattaagtcgcagaagaagcgcgtgctcaccaatgagaaggcgcaccttcgcaacgtggctgtgaagtccggcctgaagaccgccatccgcgccacccgcgaagccatcgccgccggtgacaaggctgccgccgaggccgcctacaaggttgccgcccagaagctcgacaaggctgctggcgctggcgtgatccacaagaaccaggccgccaaccgcaagtccggcctcgctgttgcgatcaacgctctgtgagcataagcctcttaaggttttagcaagtcccgcaagtcatctggcttgcgggactttttatatctccattcaaagaggtacattggcggtcttgcgaaatgacatctccgttcagaaaggtaccgaatccgagaaagcccaagtataaacgccgtcattgcaacgcttgtactcgacgtttcgtgcttcaggtacctctttgaaagcagttgtcattttgcagaaggccaaatgtacctctttgaaggcagttagccctgaggcggtcttgaatcatcctgaggcttgtcttcttcgtccttggtggtatcgccgggatcgacggtatcggcgtgcggatggatgaccgggcgcttgagatatcggctttcgctgggcaggtagacgcgatgacgctcgacggctccgggcaaggtgacgttgaagccgaccgagagcaggcgcagcgccaccacgatgatgacgatcagcacgtcgagcagcatttccgagcacatgtcgaaccaaccgtagtgcacaccacgccatacaagcacggtcagaatgcaaccgatgaacgagggcacggcatagaggtgtttgtctcgaataatcattggcacatcgccgatgaagatgtcacgaatgaggccgccggccagtgctgtgaacatgccaaggaatacggctgtcatgcctgaggaaccgtaggccagagcttttgcggtgccgctgactgcgaatagtccgaggcccagagcatcgatgacagtcatcgtccatttgagtttggtgatctccgggtgggccaccaccacgataatgccggaaaacagcgtggtgagcacatagcctttgtcggtgatgccgaccggcggcagggcaccgagcatcacgtcgcgcacaagaccgccgccgagtgcggtaagccatccgcacagcatgatggtgaagatgtcgtagcccttgcgaatggcggcaagtccgcccgacaatccccaacacaggattgctaaatactcgatgaccacaaaaacgatgttgttctccaacaccacctgcatgagccgctcccctctggtaccgcttcggttcgtctcagtccgtcttcgttctgttcccgttcatccttattcggcgctacagcccgtcgtacccgagcctacaacaggccttgcctgacgcaattggactagagaacaaaccgaataaatgctattgccggttcgactccacactttttttcttacagcgtcgccagcgcgccaaactttgagcagccaccgacgttagtccttctcatttgtcggaggttggccaaagtttggcacggcaccgacgatcacgcgctccagtgtcgttgccgtgccaacttatgtacagctaacgacgctaagcccctttttaccgtcgtttgatcgccagaacctgacccgttaacgacgctaaggtgtctcagcgacgtcagcagtccaaaccttgaaccattactgacattgaacatcccccagcgtcgccagaagctcatgtcttgtctcaccaccgacgcaacgccgtcgctgcctctgccaccggcttcagtttcgagcaatgctcgaagcctgacggcaaacggtaggctgaagcatagtattccgtcatgtcactcatcttgctcatagggtttgctcctgttctcatctggatgaaccataaccaaccctcgcaacgtgcagaagacctaaatcatattatttgttgcgaaatgttgctaaatccatctgtacctctctagccaggaacatttccaatacgccaagaccccttggaattgttgacattctaaggggtcttagtcggaaacaaaaggtgctagttcagcacaccttccacatccagttgtgcgggtcttcgacctcaccaagctggatgccgagcagttcgtcacgcagggcaacggtcagctcgccggagccgccgtcggcgacggtgacatcgaacttctcggacttgaagcgaccgatcggggtgatgatggcggcggtaccgcaagcgaacacctcggtgacttcgccggacttgatgtcctcgagcagctggtcgagggcgatcatggtctcgaccacgtcgtggcccttgtcctgcagcagctgaatcagagagcgacgggtcacgcccggcagaatgttgccggtcagggacggggtctccacgtggccatccttgtgcacggccatcatgttcatgccaccgagctcttcaaggtaggtcttggtggcggcgtccacaaagcacacctgctcgcagccattctcaacacccttgtactcgccgagcagggaggcggcgtagttgccgccgcacttggcgaaaccagtgccgccagggccggtgcggaaccacttgtcttcaacccagatgctcaccggcttgacgccgcccgggaagtacgggccggacggagaggcgatcacgcagtagtcgacctcctgcggggcgcgcacgccgaggaacggctcggaagcgaacatgaacggacgcatgtacagcgtgtactcgcggcgggacggcacccagttggcgtcgcgcttgaccagcgcggccacggaaccgaggaagtcgtcaatcggcagctcaggcaggtacagacgcttggcggagttctggaaacgctcggcgttcgcatccgggcggaacagccaggtggagccgtcggcatgacggtaagccttgaggccctcgaagcactcctgtgcgtagtgcagcacggaagcacccgggtccatcttgagcggtgcgtacggttcgacgcggcggtcggaccagccttcgcccttggtccaagtcatgtgggtcatgttgtcggagaacacctggccgaaagccggcttgtcgatgagggactggcgcttctcatcggatgcggggttgtcgttcggcagtacggtgaacggttcggcaagcttgtcgagcgctgccggatcgtggtgcgtgttttcagtcattactagctacttcttcttgactttggcggcccgaaagccaccatatggggtgtgtgctgtgcgcttgtggcgcgaactctgttgcatacttttgcacacccatgtgttactcgtgtggcagagttcacatggtgaaaaacgaagaagcccacaccgttctcaacggctgcgggcttccacgtttcagttatgttctgaattgttcgctatcgaagcgaccgactcacttggcgtcggcagccggagcagcggcggcgtcagccggggcggcagcagcttccggagcggtggtggactcggtggcatcctccggcacctcgacggtgacgacggactcttccggatcctcgacgtccagctcgacgccctcaggcaggacgacatccttggcgaacaccttggtgccgtcggtcaggccttcgacgctgaccacgatcttctcgggcaggttggtgacgtcggcacggaccttgagctcctggatgtcgacgaacgccacggcagcacccttcggggtgccttccacgaacaccggcacctcgacgtcgatcttctcgccggccttgacctcgaggaagtcgatgtgctcgatgatgcgcttgaccgggttcttctgcacatccttgacgacggccatcttggtgttgccgtcgaaggcgatggtgaacagggcgttggtgtgacgcagggccagggtggtctcgcgcatcggcaaggtcacgaaggcgggctcttcgccgccggcgtagatggtggccggaatcttgctggcaacgcgcagacgacgagcaacgcccttgccgaactcggaacgggcctcgccctcaagcttaatggtggtagccataatggatactccttgtatcttcgtttcgtactgtctcgctcagacgccacgacgcgccgaaagacaccctacaaggagtgaaatacgccgagtcgataacggaatctgtgtcatgtgtcagcatgcacacttccctcgccaaagcaacaattgtcaagtatacgccaaccccggactttgcgtaatgatgcttcgatgacactgcatataggccgtcccagctacgtcaacgtacggtttccgcgaaataatccctaactttgtgaagaacgtacgcttacccgttctcatcatacggttttcacgaaatcgttcgccatttcgtgaaaaccgtacgctcagcgacactcagtgtacggtctttcacgaagttggggatgatttcgataataacgtacgatggtgagtaccgtatcgggaggttgatatgactcgttcggacgacgtcatcaatgaggatgaccatgacgtcatcgccgcacacactcgcgttgtcaggggtatggctgcggcacttgccgcgatagccgccaccggagccggcgtcacagccgcggccgccaacgtcatgttcatgttcgcgctggacaccaaggccaaacgttcgatgttcaacatgccgcacgaggagacgccgaaaggcatcgaattcgacatgtccgagcagcttgaggccggccggtggttcgaggaggccaagcaatcggtcacgctgcgcagccatgatggatggaaactccacggctggctgttggacccggattgttccgacccacagccgcatctatacgcgatctgctgccatggctataccggagagcccgcggaaatggccaaatgggcgcatcgctatgcgcaactcggttttacggtcctgctacccgcgcagcgcgcccatgaattgagcgaagggcgctacgtgggtatgggattgctggaaagcgacgatctgttgggctgggtttcgctgatcaccgcagctgatccggatgcacgcattctgctgcatggcaattcgatgggcgccgccacggtgatgatggcggccggcgatgcgcgactcccccgcaacgtcgtcgccgcgatttccgattgcggatacagttccgtggtctcgcagtttacggataatgccgaggcgatgttccatttgccgcactcgttggccgtgctgctggtcaaagtggccagtcatgtgtctaaacgcaaggctggataccggtttgaggacgcctcctgtgtgaaggcattacggcacgcgactattccgatgatgttcattcacggcggagcggatacttttgtcaatccgaagtatctggacatcaattacaacgcctgcgccagcatcgaccgcgagaagctgctgattcccggcgccgaccacacgatgagcgccagcaccgatccggaccgctattggcgtcgcgttaacggctttgttaagcgggtgtttgggctgtagtagatatagagcttggctcccctctgtgaggggagccaagaatggttacgcgagcagttccttgacggcggcgatgacggactgcagactcttcttcgcgtcaccgaacagcatctgggtgttgtcctcgaagtagagctcgttctggataccggcatagcccatgccgcggccacgcttcatgaccacgacgttctgggacttgtcgacgtcgagaatcggcataccggaaaccggggtgccaggacggcgagcagccgggttggtcacatcgttggcgccgacgaccagagccacgttggcctgcgggaactgcgggttgatctcatcgagatccacgagctcctcgtagggcacgttggcctcggccagcagcacgttcatgtgaccaggcatacggcctgcgaccgggtgaatggcgtaggagacttccacgccgtggcccttgagcagttcgccgaggtcggcgagctcgcgctgggcctgagcctgagccagaccgaagccgggcacgaagatgaccttctgcgcgtagacgagctgaacggccagatcgtccggcgtggtctccttcatggtgccttccagaccgtcgccagcagcggcggcgtcagcaccaccgccgaagccaccggccaagacggagagcagcggacggttcatggcctgagccatgaggatggacagggtcacacctgcggaaccgacgagtgcgccggccacgatcagggcaacgttgtcaatcgccaggccggacatagccacagccgtaccggtgcaggcgttgagcacggagatcaccaccggcatatcggcgccgccgatcggaatcacgaacaccaagccgtagcacagggcgaacacggtggtcagaatcgaccacagcagacgctgttcgggctggacgcacagcatgaccagcgaggcgacagacagcacggcgaacagaatgttccatacgcccttgcccggcaggttcagcttcttgacccacttgataccctgcagcttgccggcagcgatgagcgagccggtgaaggtcacagaaccgatgagaataccgagaccagcggtgatgagcaccacgatgtccggggtgccttccttggtcaggatgtcgttcagggccacgagtgcggcagcgccaccacccacggtgttgaacacggaaaccagctgcggcatgtcggtcatcttcaccttcttggcggagacgacaccggccacggcaccgatcaggatgccgacgaccagcaccaccacggcgacaatgttcacgaagcccttggcgaaaagcacgatgaacgccatgagcacggccacgaccatgccgaacgcggagatctggttacccttgcgggcggtcttcggcgaattcatgaaatgcagaccgaccacaaacaggacggcggagaacaggtagacgaaccatgcgacgatgtcgatggcgccaacggttgcggaggtcattacttcgactcccccttcttctcgttcttgctggacttgaacatctcaagcatgcggtcggtgaccacgtagccac

SEQ ID NO: 183 - DNA, 8993 bp, Unknown
  R101_18m  MAG No. k141_9272
gacgccaagaagaagcgttccgaccgtccgaacctgtacgactacaagtacaagcgttgcttcgcctaccgccgtttgaccgacaagaaggccactcgtggcgagatcggcattccgcgcgccctcaatatgtacgagaactacccgttctggttcacgctgctcaccacgctgggcttcaaggtgatgatctccggccgcagctcccacgagctattcgagaccggcatcgaatccatcgcctccgaaaacatctgctacccggccaagctggtccacggccatatcaagtggctgatcaacaagggcatcaagaccatcttctacccgtgcgtgagctacgaggagaacctcgtgcccaacacggacaatcattacaactgcccggttgtggccaactatccgctcgtcgtcggcgccaacgttcctgagctgcgtgaggacggcgtgcgctacatgcacccgtacttcaacctcgccaaccatgagctcatggttggccgcatcgtcgaagagtttgcgtgggccaacgtgacccgcgaagaggccgaaaccgcggtcaaggccgcctatgccgaagacaaggtcttcaagcacgacgtgcagcaggaaggtttgaccgcgctcgcctacatgaaggagcacaactgccgcggcatcgtgctcgccggccgcccctaccacatcgaccccgaaatcaaccacggcatccccgaaaccatctgctcgctcggcatggtggtgctctccgaggattccatctgcgaactgcagccgggggagaagctcaacctcaccgaattcctctcggaaggcgaagccgacccgcgctccaagaacgccgccggattccgccacgtgggagaccgcacagtcaccaagatgccgttgcgcgtcaccaaccagtgggcctaccactcccgtctgtacgcggccgcacacttcgtggcctcctacccgggcctcgaactcgtgcagctcaattccttcggctgtggccttgacgccatcaccaccgatcaggtggccgaaatcctggcagacaaggcggacgtgtacacgctgctgaagattgacgaggtctccaacctgggtgccgccaagattcgactgcgctcgctcaaggccgccgtcgaggaacgcgaagccaacaaggcccgcgaagccgccgcggccaaggccgtgcaaggccccaagtccaccggattccgcaagaccggctccaccgcgccaacccccggccgccagattctgcttgacagcaccatggccgccaacccgaagctcaccaaggccatgcgcgccgcctccaagcgtgccgccgaacgcgacctgcaggccgcagtcgccagcaagaacggcacttcggacggcaccaccggcgtgacgaacgccaagaacgccaagaagtccggccacaacaacgccaccatgtcccgatacgcgcatcgcgagaagttcgtcaaggacatgaagaagaactatacgattgttggccctcagatgagcccgatccacatgtccttggtcgaagcggtgattcgttccggtgggtacaagttcgacatcctgaagcacgcgagccgtggcgatgtggaaaccggcctcaaatacgtgaacaacgacgcctgctacccggccatcatggtcgtcggccagctcatcgacgcgattctggaaggcaaatacgatcccgaccatgtagcgctcgccatcacccagaccggcggcatgtgccgtgcgaccaactacttcggcctgatccgcaaggctttggtcgatgccggctatccgcagattccggtcatcgccatttctacccagggcctcgaagacaaccccggcttcaaggccaccccgcccctgctgcaccgtgccatcaaggcgctgattctgggcgacttgctcatgaagtgcctctaccgcgtacgcccgtatgaggtggagaaaggttcggccaacaagctgtacgagctgtgggacaccatcgtgcgtgagaccatcgagcatcacggctattccaagaccgcagccaaggcgccgagcatcaagaagggctatctgccgtataacgtgctggccaaggagatcgtgaaatcctttgatgcattgccgctgcgcgacatcccgcgcaaggtgcgtgtcggcgtggtcggcgagattcttgtcaagtaccagccggacgcgaacaaccacgtggtcgacgtcatcgaatcccaggattgcgaggccgtggtgcccggcatcatggaattcatgaccacccgcccctacatcaccgactggaacgagaagaacctcggcatgggcggcaacaagacggtttacgccctgatgcgcaagggcctcgacctgtacaacgcgccgatcaaggccgcgctggccacatcgaacggcaagttcaagcaggacgagccgatgcccgaactggtcaagaaggctgctgaagtcacctccatcggcgtgcaggccggtgaaggctggctgctgacggccgagattctggaactcatcgaacagggttgcccgaacgtgatctgcgcgcagccgttcgcctgcctgcccaaccatgtgaccggccgcggcatgttcggcaagatccgccgcctgcatccggaagccaacatcgtctccatcgattacgatccgggtgcctccgaggcgaaccagctcaatcgtatcaagctgatgatcgccgccgccaagaaggctcacaacgccaagttcgccgaggccggcgagccgcagggcttcacctccgcggactgatttatgctctggctcgtccgcaattaaggacgagcttcgctcgcgacatgctggttcgcctatcggctcaccctcgcctacggacagtccactgggctgtccgctttacggctcggcctctgtgaggggagctgtcgcgcagcgactgaggggagtctctagagcgagaaaccgggccggagcctgctatcggtttttcgtatagcgtattacgggctttcgggcacgcgcaccggccggctcgaatacgatacaaagcatggttactccccgaatcagttacgcgcacctgctcgccaagccgaaccccaagcacgtcgaaagcctgctcaagttctttgagaatggacgctcccagcggggcgccggcggcttcggcgtggagatcgagcacctgcccgtgcacaacagtgacgacactgccgtaagctactacgagccgaatggcatcgaggcattgctcaaacgcttggctccgtactacgacgaggagaaggaatactgggagaacggccatctggtggggctcgcgcgccccggcgtcgccgtctcgctcgaacccggcggccaggtggagacttcaatcggcattctgaagaagccgtccgacctgaatacgttgtattccaagttccgtcgcgagctcgccccgattcttgacgatctcgacttccgactggtcaactacggttaccagcccaaatccagctttgcggatgtgccggtcaaccccaaggaccgctatgacgcgatgaccgattacctcggccgcgtcggccagttcggcccctgcatgatgcgctgctccgcctccacccaggtcagcatcgactacgtggacgagcgcgattccatcgaaaaactgcggttgggcacggtcatcggcccgattctggcctacttcttccgtaacgccccgtatttcgagggcgagacgaacccatggccgctgctgcgccagcgtatgtgggattatctggacttccagcgcaccaatgtgctgcccggtctgttcgatgctcgctatggttgggaggattacgccatcgacgtgttgtccacgccgcttatgttcgctgacctgacccatacccctgaagctgtggcttctggagcaagccccaaggaactgcatcgcccggccttccgtgagaacgcgggggaggtgtacccggaccgcgaactcaacccgtacgagatcaaccacatcatctccacgcacttcaatgacgtacgtctgaagaacttcatcgagcttcgccactgggattccttgcctatcgagcgtgccgaacgtctgacggagattgtgtcctctctgttctacgtgcctgagcaccgtgaacgtctggaaagctacttcgagggcatcagcgaggaagaggtgttcgaagccaaggccaacatccaggcccacggccacgaagccacgccgtacggccagccgctcgacttctggaaggaattcctggggctggagggccttctgtccgacatccccggcgacctgaagcaccccgacgtgttccaggagtaagcgaagaagcatatacagaaaaatctattgcgcgatatcggtgtcgaaggcatgacagaatgttttgttttggcaccgttttgcatatccggccaaggatattggatgtggttgcgcatgggagtggggagaatgcggatagactggcggatatgacatctgggaattcattgcagcataagcgtgttcgcaagtcgccgggggaacgccggcaggaaattctcgatgccgccgtgcgactgatttccgagcgtggctacaacggtacttctgtgcaggatgtggccgatgcggtcggtgttaccaagcagggagttttgcgatattttcctagcaaagataacctgcttgccgcgatgtatcacgagaattacaacacgtttggcagtgtggaagacttcatggcctccggcctgcctggttcagtgcccgatgatttcagattacccgcgtatctgaggttcttggtacattgcaattccacgcgccccatgcttgttcagctgttctcgatattgcaggtcgaatcgttcaatcctgcgcatccgttacatgacgagtttgccaatcgtcgggattcaatatggcgatactattcgacatacaactggaacctgccttccgaattcacctcgtttgaggaggtccggcccacgttgcgccatgctctggagatcatggatggtgtgcaactgaggtggttacgggggccggccattgacttatgcgatgaatgggccgatctggagccggcgatatttccttcgccgatatgggacgggtatcgctgattcgctgtgtgccttgaactgaggcttgtgcttgatggcggcagtaagtatgcgggcgaacgaaggggtcgcatacatacggtcgttttggtgtatgtgatgcgcgcggcataagcgtgttgtatgctgtcaatagataaactaccaattggtaattaaaaagctgttcgatttcactgaggaaagcgacttcgtatgaccgacaacaccacgcctgccgcaactgctgaaaccttaccgtacaagaatcctgatttgcccgctggtgagcgaatcgccgacttgctctcccgtatgacacttgaggagaaggtcggccagatgatgcagcttgacgcccgcggcggcgatcttgaggatctcatcgtgaataagcatgtcggatccattctgcataccagccccgaggatttatctcgtgccgccaagaccgtcaatgagaagacgcgtctgggcatcccgttgattatcggagatgactgcatccacggcgattccttctggcccggcgccacgatcttcccctcccagctcggcatggccgtcagctgggacgccgccaaagtcgaagccgctggccgcgccaccgccgaagaggtctcctgcaccggcgtgcactggacgttctccccggtgctgtgcatcgcccgcgacacccgttgggggcgtgtggatgagactttcggcgaagacccgatgctgatcggcgaactcgcctccgccatggtcaagggctaccagggcggcgccaaggccggcgaggccctgccgaagaacgcgatcctggcctgcgccaagcatttcgccggttactccgagacccagggcggccgtgacgcctccgaagccgacctctcccaccgcaagctcgaatcctggttcctgccgccgttcgaacgcgtggccaaggaaggctgcggcacgttcatgctcggctacgagtccatcgaaggcgtgccggtcacgttcaacaaatggctgctgaccgacaagctgcgcggcgcatggcaatacaatggcacgctgatcaccgactgggacaacgtcggccgctcggtatgggaacagcatgtcaagcccgattacgtgcacgccgcagccgatgcggtcaaggccggcaacgacctggtcatgaccaccccacagttctatgagggagccatcgaagccgtaaaaaccggtctgctcgacgaatccctgattgacgatgcggtagcccgcatcctggccctgaaattccgcctcggcctgttcgaagacccgcgcctgccggatgccgaacgcatcaaggcggtcatcggctccgccgaacaccagcagaccaacctggaactcgcccgcgaatccgtcgccctgctgcgcaacgacggcgccctgccgttcgccgcagacaaggccaagcgcatcgctgtggtaggcccgcttgccgacgacgcccagaaccagctcggcgactggaccggcaactccggtcaggtctcttggatgccggatggccagcctcgaggcatgattaccaccgtgctcgacggcctgacccagctcacctccgacgattgcgaagtggtctactcgcgcggcgcgaacgtcatcgacctcgtgcctgaccctgccggcgagttctacccggacggccagcctcgcccgaaaatcggcgtttccgccgccgtcgatcgagcgatgatcgacgaagccgtggccaacgcccgccagtccgatctgatcgtggccgtggtcggcgacgtggtccagctggtcggcgaaacctgctccaccgccacgctcgaactgctcggtggccagaacgccctgctcgacgcgctcgccgccgtctcgcgcgaaaccggcaagccgatggtcaccgtgctcatcagctccaagccgcaggtgttgcccgcctccatcgtgggggagtacggcgtgttcgccaagcgcgtcagcgaccctgaaaccggcaccggctccatcctgtgggcgccgaacccgggcatgcgcggcggtcaggccatcgccgaaataatcctgggcctgaccagcccgtcgggccgactgccgatcaccttcccgcgccacgcgggccagctgccagtctactacaaccagattcgcggccagcacggcgaccggtacgccgacctcacccaggatccggcgttcgcgttcggcgaaggcctgagctacacgacgttcgcatacggcgaaccgaccattacgggcggcgcaagcaacgccgacggcacattcgccgaaaccgacaccgtacgtgccgaaatcaccctcaccaacaccggcgagcgcgccggcgtggagatcgtgcaggcctacatcggcgacatcgtgacctcctacagctggaccgaccgcgaattgaaggcgttccagcgcgtcgcactggaacccggcgagaccaagaccgtcaccttcgagatcccggtggcgaactgcacgatcgtggacccggacgccaaccgcatcgtcgagcccggcgaattcgaactgctcatcggccactcctcgcgccgtgaggacctgaagcgcaccacgttcaccgtggcgtgagtgagtctgacaatcgccggataataacaaagtgggatgaggctcgatgccccatcccacttgttggcttgttgtactgttgcgatgttgctggtcagcgtcagtcggacgtttcagtcggacgtggtgatgtgctccacatcccagcgcacgccgagcacttcgggcgcgcaactggcgttcgagccctatcagcgcgcccaatgccgtgccgagcacaatgcgtacggtgcagtcgagaatgatggccagagaaaacgtggtgaacatgaggattcacctcctgaaaagtagacgtcaggaacttcccgcacgccctacagcgccagcccgcctcccgcaactacgtcgccgcgttcgggtggttcgggctccgtgcggtgagtgggacgcggccgtatgatggaagcgcgggtggtccgggattggtccgggactgttggatgcggcgggaggtgtcatggttcctatcgagcacgtgtacgaccagattcgcgcgtttgccgctgatgccggcgctcgcaaggtcgtgctgttcggttctcgcgcaaagggcgtgaaccggcctaaaagcgatatcgatcttgccgtggccggttgtcccgatttcaatcgcttggagcagaaccttcaggacaatctgtggtcactgcttaaagttgatgtcatcaatctggatgagccgatttcttcatcgctgagggcggagattgagcgtagcggaaaggtgctgtatgaaaaagtattagcagtgactaatacccccccgttgcccccgttgagggggtgattttgtctgttaacggattacactggaataccgtaaggcaggaacaatggagggtttgtgggcagaactatgccataaccccgtttaagggagtattcactggggcggcagcatggaagtgcttttggtcggtaataccgatttcattaccaaacagtggattcagcatgcttttccccgagaccatgtggtgatagcggaacgagaaggcaccgtagacggcaatgaccgtctcagaatcgtcaacatgtctgacgccaacacccttgtcgacaccatcaccacatacgaatttgatcgcatcgtattcttttccgaaaatctgaccccacgcagcgatagagacggcgatctgggagcattgcgaagacttctgcatgccattcgcaacaggcaaacgcaaatactgatggtcagcggccccgaatccgaatttacctatccggaaaacgtcgacgtacgcgataccagcaaaagcctggtgtctcgagcgtcggaagaactctgcctgtactacgcgcgcacctaccgtctggaagtgaaaatc

SEQ ID NO: 184 - DNA, 12974 bp, Unknown
  R101_18m  MAG No. k141_10278
ccggcgacaggatggcgttggagtcaggagtccgatcggaggcaggccgcgatggggaatcttccgcagactccgcatccgacgatgtcgcgccaatccctctcaccgcatcctgcgagcgtacgttctcgcccgccgagaccatctgcgcctccgtggcgcgcggcggcgtacggtacccgaacagcaccgtcagcaccatcgccattacaaacgcaacggcgatggacagcgcgtacacccacattctgtcaaacaccggaatcgtcagcaacgaggagaaggcgaacgccgtggtcgtgacgccccggaccatctgaccggatggcagcacggacgggaacagccagccaagcaccgcgctggtcacgccgccggccgcgcagccggcgagcagccagcggtagacgcggcggtgatgcagatggatgccgtacaggctcagttccgaaacgccacccagcaatcccgcgagcaacgcccccaccgcggtctgccgcatggccgaatccttgccgcgtacggccagcacgagcacgccagcggtggcaccgaagcaggcaaagttccatacacccatcggaccttggacgaaatcgtagccgagcgcctgaatgttcatcagcatcagggcattcaacggccagtgcagaccgagcggcacgagaaacgggtagagcatcgggatgatgagcgcgaataggaacggcacgtgcgcgttaagccatgctgtggccgctcccagcccaccgccgagccatattcccagaggcccgatgaccagtatggtgagcgcaaaaacgacgaccagtgagaggaatggcacgaacaccagctgtacgctgtcgggaatgacgcgcttcaacccgtggtagaccacggcgagcacggcagccatgagcaacggcacgaagacgttgccgccgtagtcgttgagttgaatcggtatgccgaacgccgacacggtgcaggtttcggcgccgaatacggcgtcggccgagcattgaatcgccccggagagggcgctggatacggacgtcccggatattccggacattccggacatcacgccagtaaactgcggggtcatcagcgcggccataatcgcgccgccgagccaggggtcgacgtccagtttcttggccgcattgtaggcgatcataatcggcagaacggtgaacacaccctcccaaatcgccttgagtagtatccagccggcggaggtctcgccgtcaggcacgatgccgagtgcaacgatcacgttgacgatggcgatgaccagcgaggcaccgagcagtacacccagaatcgggcggaacgagtcagacaggtagtcgaaaaacgcggcagcccaagcgcggacggcactgccccactcgcggacggtacgaggcgtgaagtgacgggatgtattggatgggccgcaactttgttcggcgtcggtggcagtatcgcgcgatggtgcggcatcgtcggaaaggtacggcgcggactgcgcgggttgcgtgggctgtgtggattgcgctgactgcgcgggctgcgctggctgagtgggctgcattggctgagtgggttgcgttgactgagtgggttgcgttgactgcgacgctgactgcatcactgccgatggcaattgcgctgccggcatcaatcgcgccgtccgcagccgaacgatctgctcgtacaccgaggcgaccgctccgccgatgatgacctgataacgattgccggctcgcgggaatgcaccgaggactccggggacggattcaagaccgtgctggttgacatggccggcatcggccagttcgaagtgcagtcgcgtggcgcaatgggtcaggctggtaatgttcgcggggccgccgacggcatcgacgatgcgcgccgcaatcactgcaggcgttgcgttcgatgcgttcgccacggttcctccttgctgccgtatgccactgtgttccattatcggcgctgggtgccccaaaagcacggcaatgccggcaaagcatcgcgaaacggcaactatgcgctacggtgctccgcgatggtgtcccgccataatgttccgcgatgatgcttcgccacacccgttctccgtatttgccgcagcgcccattccgacatcattccaccatgcagaatcctgcaatcgttgtcaaaaatcatcgttttttgccgcctattcggagtgtcgcgactgcggaagtcgtattctatctttcacacacgttgcgtagcagggttgttactcaaaacgaggcaagacctggagcgacgtggaatttgcgtatcgtgatatgcgaattccacgttgttccaggtctttttttgttttcgggcgactgcagacaatcgaagcctgaccttgcacgcggcagaggggccacgcaacaggcgcggtccgtcaacggcgaaaggacaaggcaatgacgacgacaacggcatcacccgtatcgaaacagacggcacccgcggcgcaggaaaccagcgcaaccggtgcggcggccaccgcaatcgaaaccatcgaaaccggcgtggccggagtggcgggcgcggccacaaacgcggcagccaacgcaatcgaggacctcgaagccgccgaatcgcacggcttctccacgcgcttcccgctcaacagcgcattcatcttcaccttcggcgcgctcggcggcatgctgttcggtttcgacaccggcatcatctccggcgcctccccgcttatcgaatcggacttcggcctgagcgtctctcagaccggcttcatcacctcctcggtgctgatcggctcgtgcgcaggcgcgctgtcgatcggcgcactgtctgaccggttcggccgcaagaagctgctcatcgtctccgcgctgctgttcctgctcggctcaggcctgtgcgcctcctccaccggattcgcgatgatggtgtgcgcccgcatcatcctgggtctcgccgtcggcgcggcctccgccctgaccccggcgtacttggccgaactggcgccgaaggagcgtcgcggctcactgtccacgctgttccagctcatggtcaccttcggcattctgctggcctacgcctccaacctcggattcctgaaccacaacctcttcggcatccgcgactggcgctggatgctcggttcggcgctggtgccggccgccttgttgctgctcggcggcctgttgctgcccgaatccccgcgttatctggtgaacaagggcgacacccgcaacgccttcaaagtgcttacgctgattcgcaaggacgtggatcagacccaggtgcagattgagctggacgaaatcaaggccgtggccgcacaggacaccaagggtggtgtgcgcgaactgttccgtatcgctcgtccggcgctggtggccgccatcggtatcatgctgttccagcagctcgtgggcatcaactcggtgatctacttcctgccgcaggtgttcatcaagggcttcggcttccctgaaggcgacgcgatctgggtgtcggtgggcatcggcgtggtgaacttcgtgagcaccatcgtggccacgcttatcatggatcgtttcccgcgcaagggtatgctgatcttcggttccaccgtgatgaccgtttcgctcgcggtgctcgccgtgatgaacttcgtgggcgacgtggccgtgctggcagtgccgacgatgattctcatcgctttctatatcctcggctttgcggtctcgtggggcccgatcgcctgggtgcttatcggcgagatcttcccgctgagcgtgcgcggcatcggctcatccttcggctcggcggcgaactggctgggcaacttcatcgtctcccagttcttcctcgtgctgctcgatgcgttcggcaacaatgtgggcggcccgttcgcgattttcggcgtgttctcggccctgtccatcccgttcgtgctgcgcttggtacccgagaccaagggcaagtcgctggaggaaatcgagaaggaaatgaccaagcgctagacaaccggcacacgattcgcacaaaagttgacaactcttaacataagagtacccaaagtggcgaaaaacgtggcagaatagggaacatggtagcaaacaatgcgggtcagcccgccaccccagcagatctgattaatgtcgatgaggttatcggcaagtactatgacctcgtccccgatcccgaagtccccgagcagcgtgtcatcttcggcacctccggtcaccgcggatcgtccctgaagacctcgttcaacgaggcccacatcatcgccatctcccaggccatcgccgaataccgcaagaaggccggcgtcaccggcccgctgtacctcggctccgacacccacgcgctgtccggcccggccaagaagaccgccatcgaggtgctcgtcgccaacggcgtgcacgtgcgcgtcgactcccgtgacgacttcgtgcccaccccggtggtctcccaggccatcctgacccacaaccgtgcggtcgacggcacccagcgcttcgagggcgagggcctcgccgacggcatcgtcgtcacgccgtcccacaacccgcccaccgacggtggctttaagtacgaccccgtcaccggcggcccggccccggccgagaccaccaacgccatcgccgctcgcgccaacgagctgctcggcgacttcaagtccatcaagcgtgtgccctacgaggaggccatcaagtccgagtacgtcgagggcttcgacttccgcgagcactacgtggacgacctggagaacgtcatcgacttcgacgtgatccgcaactccggcgtgcgtctgggcatcgatccgctcggcggcgcttccgtgaactactggccgctcatcaacgagaagtacggcctgaacatcggcgtggtgcgtcctgaggtcgacccgacctggcgcttcatgaccatcgaccacgacggcaagattcgcatggacccgtcttccccgtacgccatgaagggcctggtcgacgagctcaacgccggcgcttgggacaagtacgatctggtcggcggcaccgacccggacgccgaccgtcacggcatcgtctgcccgaactggggcgtgatgaacccgaaccactacatcgccgtgtgcgtggagtacctgttcggcggcaaccgtccgggctggcctgagggcgcagccgtgggcaagacgctggtctcctcttccctgatcgaccgcgtggccgcatcgatcaacgcgaaggtcatcgaagtgccggtgggcttcaagtggttcgtggacccgctgttcagcggcgaagtcgccttcggcggcgaggagagctccggcatgagcttcctgcgcaaggatggccgcgtgtggaccaccgataaggatggtctgatccccgacctgctggccgccgagatcactgccaagaccggcaagaacccggcccagcttcaccaggagcaggtcgagcgcttcggcgagtcttggtacaagcgcgtcgacaccccgaccacactggagcagaaggccaagttcgcggcactgtccggcgacgacgtgaccgcctccaccctggctggcgaagacatcaccgccaagctgaccgaggcaccgggcaaccacgccaagatcggcggtctgaaggtcaccaccaaggacaactggttcgccgcccgcccctccggcaccgagaacatctacaaggtgtacgccgagtccttcgtctcccccgaggctctggacaaggtactcgacgaggccaccgtcgtggtcgacaaggccctgagcgagtgaaatcgctgcgttagtcgcgttcaccgcaactaataaggctctgcattggattcatgcaatccactgcagagcttttttagcgcatatgcagttcgcgaccactgaaacacgcaggtcaacggttctcctcatgcaccgtgactgcattttctcaacatcactgcagggcaggacggccagatgaccgcgaaacgttcgcctgcctaccatcatcattgtggggtcacagcggccagatgaccgccgaagcgttcggtcggcttgcatcatggtcgagttttaacatcgttgtgggacgccacgacgaatttgcccattccagagctgccatcccacaaaagcgtgggacaacagctaagtcaatcgttttacatttcccccatcccacacactcaaactggaaaccccggaaagacgccattcctgccacacccgtcacagccattacccgaggggccgtgggatgccacgcaaaaatcggcaaaacacgcgtagcgtcccacacccattggcgcaaatccacgcccaatgcacccccccccatcgaccactatgacacatttccctccacaatcgaacactagtcattcacgaaatccatcactacgaggcatcgcaatcgaacggcatgcaatatcaagcacacaccacaacaacaggtcgtacaaatattgcctttacatcagtccgtttcggacattatggtcacagcaggctctgcgacaactcttcaagagacatggcaactacatgaaactcgaatacggcaccgcgcgaagcaagcgccctcgccacgttgaaagcgaattcagcacgagcgtcctcgttagcgatacttgccgccgtggcgacgaagaccagccatctccgcccgaccagcacaccccttttctcttggtcacggcgccattgagtcttactcgtacgatgatgatcgccatcatattcaacagcgaccttgaactccggccacgctaagtccaacgttatgggagctccagatgcaaaagtcgcgtccggcaccacatagttcgcaaccggccgtggaatcccatgcgctaccagagagagtcgttcttctgattctttgggcgaatcagcaccaggtgatatcaggagcaatgctcgaacgcaggacgggcgccctctgaatcgggtaaactgctccacgaacttcaccagatcctgatagattgcagcagcatcacgatccttagccaatactggctgtttgctcgtagcagcgatgacggcatccccgagcacaatcagggactcaaaagaaacatacggggcaagttgggcccatacgtgaaacaggtccagcgcaaacacgtgttggttcatttccacattggcggctttagccgcatgtttccaaatatgcgtttgcagtggtgcatggcgtgtacggaaccgcttgctcttaacgctggatacagtgtgcagcttggccgagtcgaggtcgcaatcggcgggaatcggtacggattgcagagcgagggaagtggtcatgccgaaaagcagcttcttgcccgcccgtttcgcttcctcagtgcagcgtgcgaccatgtcgcgtctgcgctgggcgaggctttcgctcatggtcggtgtcgctgcagaatcatgtgcaccactgttcggcgatgacgagtcgcgagaagtcgggtatttcgagtcagtagaaaatgaccccgcaaattcgggcggaacaaaaactgcctccgattcttccggaggctgatcgtatatagagcctggcagagctccatagttggtgatgccgtcggtcatcctgttcatgacaccaccatatgggtagtgggtgcggaaacggaagccgatccgaggtatgtggtcctagcttcacttacgcacattcattgtggataaccatgtggacacctcacttatacacatagtcatccacctcttcaaccccgatttgacacactaactgtatctgatatgattacagtatcataactgtacacatcatagttacagtatcgactcggtaaggaggtcgtttcatgaacggcgaccattcactggcagtgcacgcattggtctaccttgaccatcgcgccacacacctgcccagtcagatcctggccgagaacatatgtaccaatgcggcgcgcgtacgcaaagtaatgcgaccgctcgcctcagccggactcatcgccactaaagagggtgctgaaggcgggtacgctctggcccggcccgccgccgaaatcactttgcgcgcggtagcggaagccaccggcaccacttttgtgaaagtgaactggacaccgggcgacgtacacgaggactgtctggtgtcatcttcaatgggcgcggtgatgaacgacatctatgccgggctcaaccgcacttgcctcgaacaactcgaacacaccaccatccacgacatcaccgaacagatattcagcgagcgcaaaggccaataatcacgcgcgtttcccctagccagcatcagtcgataacgcttcggcagtcaaagaagaaaacagacgccgcacggcacacaacacatcagcacaacgcactcttatcactcgaatacgtaaggaagtaaccatgtccatcagcacacccaatgccatcagcacacccagcacctcccccactatcaccaccgacgccctgatcattggattcggcaagggcggcaaaaccttggctgccaagctcagtgcagccggccgcaaggtcgtcgtcgccgaggcaagcgccgacatgtacggcggcacctgcatcaatatcggatgcttgccgtccaagtcactgattttgtccgccgaacaggcgcggcgggatggcgcgaacagtactcccgaaacccgcgaagcagcgttcgaggctgctatcaaggagaagcgccgcgtcacttcgatgctgcgcgacaagaactatcacaagctcgccgaccaagacaacatcaccgtaatcaccggccgcgctcacttcaccggccctcatagcgtggaaatcgccaccgctgagggcccggtcgccgtgaccgccagcaagatcttcatcaataccggtgccacgccgcgcattccggatattcccggtatccacactacgcccggcgtctacaccagcactggactgatggatctcgacgatatgccgcagcgactggtgattatcggttcaggattcattggacttgagtttgcctcgatgtttgccgatttcggcacggcggttaccgtgctgcagcacaatgccgagttcctgccgcgcgaggatgcggatgtggcggccgcgattcgcgcacagttggaagcgcagggcgtcaagttcctgttcaacgcggataccaaggccatcgcgcctgctgctgacggcggcgtcaggttgtccgttgcggtgaagggtatgactcgcggcgcatcgcaagcttgcgattccacccccgccggcaccgggaacgctcataccgatatcaccggtgccaccgacgccaccgacgccaccgacactacaacaaccaccagccccactagcaacccgaccgatcacgccacgatgtcacacgttcaaacgaaaccatcagacgatggcgagccgcggttcgccgagccggctgaagcccgattctgcctgaccaccgacgcggtactggtggccaccggacgtacgccgaacgtcgagggactgcatcttgaggcagctggcgtggagctcaccgaacgcggtgccgtgaaagtcgacgagcttctgcgcaccacagcagccgacatttgggctctgggcgatgtgaacggcggcccgcagcacacgtacatttcgctggatgactatcgcgtggtgtggtcgcagctcaatggttccgaccgtccgtacacggtgaaggaccgcaagcatgtgccgtcgagcacattcctcgccacgccttactcgcgcgtgggattgaatgagcgcgaggcgaaggcggctggattggattatgtggtcaagcgattgccggtggccgctgtgccgaaggcccaggtaatgcggcgaccggatggtctgatgaaggcgattgtggaacgcaatactggccgcattctgggtgcgatgctgctttccgtcgagtcgcacgaggtgatcaatatcgtcaagttggcgatggatcttgacgcgccggccagcacgttgcgcgatatggtgttcacgcatccgacgattgccgaggcactgaacgacttgttcgcgtagtttgtccgcatagcacgcccgcgcagcatgacccgcgtagcgcagcccgcaacagactcccctaatgcgcgcgaaggtcctcatcgacgtaaaccgatgaggaccttcgcgctgtcgtcatgatccgtacgtgacagcaatcacgtccgaaccagccgttacttcaagccgagcttacggtccagaatgtcggaggcatccaatcccaagcggcgtcggatgaaccagccaagaccgagcggcaggccgggagccaaggccatgccgcctggaccgagtgccacggttttggagttgcctgcgataagcatggtgcccttggatgcggccgtggccgtcgaaccatcgctgtccgcctctggtttgaggatttcgatgttgccgtcactggttttgtacagtcccttattctcattccagataccggatgcgccattgttgccggcctcacccgcagagaggaaatgtcttgtttttcttgtgagcgctcacccattcacgcgcgatggcatgtttttcaagcaaagtcaataggtgtgatgttattcacactcttcactacgttgttttgcctcgcactggacaaccccacttcagcaagagattgcacagcttgcgttagggtggagaacatgactatcacagtatccacagatgggtccgcattagggaatccaaacgggccaatgggctgggcctgggccgatcatgagcagaacgccggcggcaagcccggccataagcacgacgaccatggttatgatgcgggcggcgcgaccaacggcaccaatcagattggtgagctgtgcgcagtgctggaagctttgcgagcgcacccgggccctgagccattgctcatcgaatcggattcgcagtacgccatcaattgctcgaccaagtgggtcaaaggctggaagaagaacggctggaaaaattcgcagaaaaagcctgtgaagaacaaagagcttattcaggcgatcgaccgtgagatctcacaacgccctggcccggtggatttccgatgggtcaaaggtcacgccggcaacgagggcaatgagttggtcgatgaactggcacgcacctatgcgggcgattgccgttcgggtgcgcgcgacggctatctgccgattgaaggctggcagtcgctactgggctccgaatacgcacatggcaccgatgtgcctccagacgtgcagttggtgctggatggcaaggcggatgcggcaagtttgcgcaagccggctgcggcgacggattcgacggatgccacaaggccagagaccaagtcttcgtcacccttagcgacacaatcagcgcaacctgtacaatcagcgcaccccgtacaccccgcaaagccaagcggattgacggtatccggtacgctgaccttctcccccgcgccgaaaacgagcccgtatttcaacgggcagccgatgccgatcaaaggcagcatcgaaatcgaaggctatgtggacggcgacggcaacctgaccatcaccaacgcaccattcgtacgacactaacacccaaacacacgaatatgtaccgcaatcggacacgatgacacaaaatcgctcattcgcgttaggataggagataaggcttcacgccgttgatccatgcggcggaggcaaggatggcaaaggagaaaccatggataaggcacagcaggatgcgctgaagaaggcggccggcatcgaagccgccaagctcgttgaaaacggcatgatcgcaggcctcggcactggttcgaccgtgaagttcctggtggacgagctcggccgccgtcatcaggaggaaggtcttgagttcactggcgtaaccacgtctcgccgcacgcaggtccaggctgaaagctacggcatcaagatcgtggacatcgacgacgtggaccacatcgacgtgaccattgacggcgccgacgaagtcgacaagaacttcaacggtatcaagggcggtggcgctgctctgctgtgggagaagatcgtggccaccaactccaaccagatcgtgtggattgtggacgagtccaaggttgtggacaccatcggcaagttcccgctgccggtcgaggtcattccgttcggcgctggccacgtcatcaagaagttcgaggaccgcggctacaagccggtgcttcgtcttgacgccgatggcaaggaagtgcgcaccgacgagaacaacttcgtggtggacctgcacctggagcgcatcgatcacccgcaggagctggccgaagacctcatcaacacggtcggcgtggtggagcacggcctgttcctcaacatggtcgacaaggtcatcgtcggcgacccgaacggcccgcgcgtgttgaccaacgccaacaagtgatcgtctcacatcactgaacttttccaagcccgcatctgtacatcgcaggtgcgggctttactgttgcccgaacaaggcaaaggagccaaaaagagaaaccccgcgaccataacgatcacggggtttctaatgccttgattgcaggtaagactacttacgctggtggcgggtcttacgcagcagtttgcggtgcttcttcttgctcatccgcttgcggcgcttcttgatgacagaacccatctgaagcctccatttcgattaatcgtaaaagttgcaacttgcaccataatacacgtgttgccagacagaggaaaccagtatgttgtcgatagtccgcatatgccctgaacgcagttggggcatccacatcagcaatgtagatgccccaacgttcataagtttgtgcagcagctgacagccgatacaagatactacatcgggaacttctggtagaagcgatcgaccgcttccttggtgccggtagcttggaagaccacggtatcgttctgccagatggcagcggcgttcttgctgttggaggcatcggccttcaccacgtacgcgcccgtgacgttgccggaaaccttgacgttgccggatgccgactcatcgccggtctgcgcagcgaccaacgcatcgtactgggtcttggcattgtccg

SEQ ID NO: 185 - DNA, 12853 bp, Unknown
  R101_18m  MAG No. k141_10911
attattttctcggtaactttcttaaatggtgctgtaagataatgcggaagaacatagaaatcaatcaaatcaagccctgcatcatcttcttgtgagtagtcctctggcttttcatccatttgctcgatatattggatgcttggagcgcatataattgcgcctgccgactcaccgatcatcaattttccatttgccaattcctttttcagtagtccatcagttcccgttttacggagctggtccatcagaaagaaagaatttccgccggtaaaatatatcacatctgcttcttcaaaaacagactgtatcgttgaataagcctccgttgaaatatcaatttcagttacgattgctctcaactttttgaataattttcgagccgagccgacataaccggtgtagccttcacgcagtgaagctgttggaataaatgcgactttcctattttcaatttcttcctttatcagacttcctacacttgaaaagtgtgaacataaaaatagtttcatcaatattcttctttataaattccgatttgtttctcaattttcgtattcaaattataccataaaattgtgaataattctaccgtcattttggactgtatgagaaaagtccggacagttttctgcccggacttttctcactcaatcataaatcaattccgctttcacaatctcctctgcctgtgctttgcaagcgttcatctgccgcacccattccatttggttttcggctttcagttgctcggtcacgccgttttgctctgccagtgaccgcacgatcagctccatgcggtttcgtgccgcttcgtcgatcttggcgcaatactgtcttacgtacacccagctatagtcaagcggcgttttttcgtaaggattttcggcgtatcaatcacgcatagatattgcgcggacgcatgtcctcgggcaggccgtcgagcagaatcgccacggaaccttcctcgaacacggagcgaatacccgcggccagcagcggtgcgcaagacagtacggtcatattcggcaggcgcttctcttcgggaatcggcacggtgtccataaacacgatttcatgcgcgccgcagtgagacaggcgctccacggccgggccggagagcaggccatgggtggcgaccagcgtcaccgacttggcgccggattcgttcagggtgcgcacggcttcgcagatagtaccggcggtatcgaccatgtcgtcgatgaccacgcagtcgcggccgtcgacatcgccgataatgccatgtgcctcggcatggttcggacgagtaatatcacgctgtttgtggatgaacgccagcggcagattgcctagcttggcggcccactgttcggacaccttgatacggccggcatccggggacacgatggtggtgttgcccagatcaagggtggaacgcacgtaatcgagcagcaccggcatggcggttagatgatcgaccggaccatcgaagaaaccctgctcctgagcggcgtgcagatcgaccgtcataatgcggtctgcaccggcggcgtggaacagatcgaaaatcagacgggcggtgatgggctcacgaccgcggtgcttcttatcctggcgcgagtagccgaggaagggcgccaccacggtaatcgacttggcggaggcgcgcttcaaagcgtcgatcatgatgagctgttccatgatccacttgttgatatcgcccgaatgacactgcagcacgaacacgtccgcaccacgcaccggttcggtgaaacgcacgtacatctcgccattggcaaagtcataggacgtggtttcgaggatttcggttcccaaacattcggccaccttctcagctagctcggggtaggcgcggcccgtgaccaatacgagtcgtttatccggagtgccttcaagaatcgccgacatgcgttcgcatcctttgtttgagtcgctgtgtgatttacgccttaaccagtgtacaagcaccccgccgcagcgaacgccacggcggggtgcctatttcgtaagagtgttgagattgccgaaattattcggagaactcgacactgaccttattgtctttgatggtgaaggtgccgtacaccgagaaagtgctggaatcgtcttccggttcccagccatcgctgtaacggtactcgtaattcgccgtcacatcaccttcgtcggtgctgaacgagctatccgacaggctcacgctggtgaccttcggataaccgtcaatcgtccacttgaagttgcggtatcggctggaattggaggtgtagtagccgaacgggcagccctgcggttccgcatcggtggaagccgcgcattcatccagcttgctcttcaccgccgtgtcgatttccgacgtcaacttgtccgtaggctgagcgtcaagagtgccgctatcggagctgttggtgctcagagacacggtcttggcggtgtaatagtcggacttcaccacgccaactttgtagacgccggggtacaccttgagccggtagttgccggtttcgtccgcgtcgttgttcacggcgttcttgggcgttacggtcacgccattgacggtgatgctgcccagcgagcttggcgcatataccgaaatggtcttgaccaacggttcggcgacggtccagttcttgaagatcaggaacttgctgccgttggccaccatcttgatggaatcgccggtgacctccttgccttcaagcgtgtacgtcagctgggcgctcacggtgccatcggcattgttggaagtctgcgagatgcgcgcgttggtgatgtgcgtgttctcgcccgaggatgccttgctggtcagcagtgcgcgctggttcgtatccacgtgaggatcggcgatggtgttggccttgtcgtagtcgccggaggagatggcggccacatagctgttcgccacgctcttcgcgctgaacacggcggaagacagcacgccatacacgataccgaacagtacgaggaagccggccacggcaccaacgatgatgaagatcttcttctgctgctcattcatggtggtggaggtcgcgccaggtgcggctaccggtgccgctccgggagtggtgggagccgcggttgcgaatgtggtgcccggagcaccgggggttgcaggggcggccggagcacccggggcagcgggcgcgggtacaccgacaccagcaacaggaggctggccggcggacgtcggcgtgacgttgacgtgaggctgcgcagcgtttgcgcccgtacccacgccggcgcttggcgtgccccacgtgggccacttgccgaccattgcgccgctggcatagatgtagtcgaccacaggctgaggcgtggcacgcacagtgccgcctacaaatagggcccgcagtcccggcatggaaaccaccatggtcgggccgaacgtcagtgcaacgacctcaaccaggaatgcccacaggcccatgaccaggaagtaccacatggcaggtccggtggtctgaacttgcgtgacggaggtgcggttgcccatagtacccatcagcagcgtggcaatcgcccagaacaccatgatggcgatcggggctttccagcagtgctgccagcccatgtaggcacggtcgtacaggttgcgtgcggagacgcgcaatgccgtgtagaaggtgaggaccaggaacacggcgaacaggatccaaataggccatacggtaacgctgaggttgatgctgaacaggctgagatcctgcggcagctgaccggactcggtcagtgtaatggcgccgaaggttccccaggtaaagaagaactcgccgatcatcagcagtgtgaccgggaacgtcagtatcaggattccctgacctgaggagaatgccacggcgaacagggccaccaggccgacgatgaagagcaaagccagctggaagctcaagacgctgaccaccgtgcgcgtgtatccgcgaacgcggtgtgcccactgccaagtagctccgaacacattcttggaatcggaagcatattgggccagtgcatagccggccagagcgccgagcgcggagagcaggtaggccataaagaacgtacgcactgtggcgccggtcaccttggccacgatggtggtgccactggcgagtggtgccgccgcgatggccgcaagcagcgtgatgaccacggccggcagcaatccggtgataaagccggagatcaggccggtgaacttgaatcgaatgctcttggaacggcccagcatgaatgcgccgaatgcggtgccgaccagcaatgccaagccggtgagccccagtgggtacgacatcatgttgctggcgtccatgctggaggatgagaggtcgacgatgtcgaaatgaataccgccagacaggcccatgaccaacgataggaacaggtagtggaagaagttcatgccgttgccggtgatgaacatgccgccaacggcttggttcagtgttgaatcggccccgaggctgggtgctgcggtgctcatggaattcattgcgattgcagggaaaatcgaaagcaccaaggcggctgccgtaccgatgccggccgcaatgccgatggtctgcatgttgggggcgccgaacagttccttgaccagtgggctggaagagatgggttgtgccggagcggcgggagccggcgatgggccgggctgccctgggttcggaatggccgtggtcggtgcggtgaatgccggtccgcctgcgggctgggcctgcggctgtgcagcgggctgaggcgtcggctgcacagccgctgcgccgggcaacggaatcgatggtgcgggagccgcgggctgtgcggtcgtgggaacggcgccggtgggttgaccgggcgtgggtgcggtgggcgtcgctgctgctggagctgacgccgcggcaagatggttgccgcaggaaccgcagaattgcgctccttcgcgcacagctgcgccacaattaggacagaacatatagtccccctttcttctgatgcttcttcgagcactatcgtacccgcaaaatcagcgccatgaccatagggcgaggctcgaaatggacaatactgggtgatggcgcgcgggcttggctgcgcgggcttggctgcgcgggcttggccaaaatggtgggcatcgcgaaaccggcaggaatatggccataccctgtcccgccttatatatagactgtccaagttgcccgaagatgcggtgccggtttggtgctgcgtcatgggctaacacgcatacacactcctgccacggaacgtccgtggccgaatagtccgaaggaggtgggtgatgtctgcgcacaagtacgaactgatgttcatcgccgatcctgagctggatgagcgcggtctgaagaagctgaccgagcagtatctggaactcgtcaccaaggaaggcggttctttcgatgagcccgattactggggccgtcgcaagctcgcctatgagattgccggtaagaccgaaggcaactacgtcgtggtgaagtacaccgccgagcccgctaccagcgatgagctcgaccgtgttctgaacctcaacgaatccgtgatccgtacgaagatccttcgtaagggctgaatcaagcgtttagtcagctgaacagctggtattcaaggtaagtaagaaggaccgttatggcaggcgaaaccgtcatcaccatcgtgggcaacctcactgcggaccccgagctgcgcactattggcagcggcgcgaccgtggcgagcttcacgattgcttccaccccgcgaacctggaatcgtcagaccaaccagttcgaggatggtcaggcgctgttcatgaggtgctccgcttggcgtgacctggccgaccactgcgcccagtccctgaagaagggcatgcgcgtgattgccaccggccgcctccagcagcgttcctatcaggcacaggatggttcccagcgaaccgtcgtggagatgcagctcgatgaaatcgggccctccctgcgctacgccaccgcacaggtgacccgccagtcgtccggtcagggcggcttccaaggtcgttccggtggtttccagggtggtcagcaacccaatcagggctatggcaaccagggtggccaaggtggttatgccggtggccagggcggttacaacggtggctatcagggtggtggcgctggatactcccagcagcctgccgctcccgccaacccgtccgctcctgcggccgacccgtggagcaatgccggtgcatctgatgccggtagcttctccacgttcggcgcttcctccgatttcggcggcggcgacgattccgacccggagttctgatcagtacttacctccccgctgccagcagcaatcaatatcaagatttataaggagaacatcatgtcacgtaagaggccgcaaccgccggtcaagccgttcaagaagaagccgaacccgctgaaggccgccaaggtcaccgagatcgattacaaggacgttgcgctgctgcgtaagttcatttccgatcgcggcaagatccgttcccgtcgtatcaccggcgtgaccgtgcaggagcagcgtgagctgtccaaggcgatcaagaacgcccgcgagatggccctgctgccgtacgccacttcgggtcgctgagttagggaggctttgaacaatggctgaaaccaaggttattctcaccaagaccgtgtccaacctgggccactccggtgacgttgtcgacgtgaaggccggctacgcccgcaactacctgttcccgcagggcctcgctttcgcgtggaccaagggtgctgaggctcagatcaccgctatgaagcgcgctcgtctggccaaggccgtcgccacccgcgaggacgccgtcgccgccaaggccgccatcgagggcaccaccgtcgagatcgccgccaaggtgtccgagtccggcaagctgttcggtggtatctccaacgaggccatcgccatcgctctgtccgacaaggccgcggtgaacccgaaggccatcgaggtcgagaccatcaagaccaccggcgatttccccgccaaggtggccctccacccggagatcaccgcttccttcttcgtgaaggtcgtggccgagtgagtcattccggcctagtgctggaatcacacagactaagagtctgagcttaagcatcatcccccgtgcagttcgcgccgcatgggggatttttgtattagcaaaaacgccggaaatagacgcgacacgccgagagttgcattcgcttcaaatctgagtatatttatcacctgttgcaaggaacacttcaacatctaaccaagcccctgtagctcagttggttagagcagctgactcttaatcagcgtgtccagggttcgaatccctgcgggggcacagacaaccggaatcgaaagattccggttttttgttttttccagcatcagtccgtagctggtgcggaaaggccgtcttcgcgcgtgacggccggacgtgtaaggagcggcgtcatgtctcagatattcgcgttcaccgtatccgaccccgaaggcatgcacgcccgcccagctggccggttggttgccaaagcgcgggaatatgagtcgaacatcaccgttgcctacggcggcaaatccgtggatgccaagcgtatcttcggtgttatgggacttgatgttcaacaaggtgacgaggttacggttcgggtgcagggcaacgatgaagctgtcgctgccgcagagttcgagcgattcctcaaggagcatctgtaatgagaacgatacagggcgtcggcgtatccgctggcattgctatcggcacggtccgcgtgctcgccgccgccgatcatgctgtagaacgccgcgtaatcgacgatccgcaggctgagatggatcgattccgcgcggcccgtgacatggccgtcgctcagctcaagcaactgcgtgacaacgtcgccgctgagttcggcgaaaacaaggccgagctgttcgacgtccatcggcttatgctccaggacccggactatgcgggatgcgtcgaaggtttgattgcgcaagacaaggtgaacgccgaatttgcggtgaagagcgtcgccgaacagttcgccgccatgttcgctgcgatggatagctcgaccatgcaggctcgagccgctgatgtcgaggatgtttctcgccgcgtgatgaacgtgctgcaaggcaaacgcgatagcacggcgcaggatggcagtatacaaggcgatgctgtgcagaacggtactgtgcagaacgggattgcgcagaacggcgaaagccacatcatcttcgcccaagatcttgctcccagcgagaccgcgcagctcgaccgcgctaaggttttgggcctcgtgaccgccaagggctcagcgaactcgcacaccgcgattctggcgcgcacgatgggcctgcccgccatcaccggtatcggcgacgccttcgacccgactgatgacggtcacgttgccgtaatcgacggcgccagcggtgcggtgttcgtcgacccggacgaggccacgctgaccgagtgccagcgcaggaaggccgaagctgaggaacacctgagcctactacggaagctcaaaggcaagcccaccgaaaccaagtccggtcagcgggtccacctgtacgccaacatcagccgtccctctgacgtagccgccgtgctggccaacgatgctgagggcatcggcttgttccgcagtgagttcctgtatctggaacgcgaggactggccgaccgaggaatttcagttcgatgcatacagacaagtcgcacaggagatgggcgaccgtccggtcatcatccgcacactcgacatcggcgcggacaaacaggtcgactacttcaatctggaccacgaggataaccccgcgcttggttaccgggcaatccgcatctgcctgacccgcccggagattttcaaagtccagttacgcgcattgttgcgcgcctcagcatacggcaatatcgccattatgctgcccatgatcacctcggtgcaggaggtgcgcgacgccaagcggattcttgaagaagccaaaagcgagctgcgcggcgagcacaccgacttcaacgagagtatccagatcggcgtcatgatcgagacgcctgcgtcggtcatcatggccgacgagctggccgccgaagtcgatttcttctccatcggcaccaacgacctgacccagtacacgctggcctgtgaccgtcagaccccgagtctcgaacgctttgccgacccgcattcaccagctgtgctgcgcatgatccagatgactatcgaggctgcccatcgtcatggcatctggtgcggcatctgcggcgagcttggcgcagacctgagcctgaccgatacgttcctgtgcctaggaatcgacgaactgtccgtctcgcccaccagcgtcctacccctgcgcaacgtcattcgcaaccactgagagtcaaggtcgcttcggctgattccggtggcttttttgggcattgcattcggctggacattcgacatcgcatcctgccagcatttcgtcgtggggcaaagtgtacaatcgccacgtttgctttcgcgcccagcgtaaatcgcgtcgccggctccgcgaacggatttccaatcacacagaatgccgtgaacagtcagccatgcctgttgcgcggcgaagagaaaagaagaagcagtggaatactctctctttaccaagctggccgccgagttcttcggcaccgccattctgatgatcttcggcaacggctccgtggccaacgtcgagctcaagaacaccaagggtcaccacgccggctggttgaacatcgccatgggctacggcttcggcgtcatgttcccggtgcttatgttcggtagcgtctccggcgcgcacatcaacccggccatgaccatcgcccaggccgtcaacggcctgttcccgtggagcgacgtgctgccgtacatcgtcgcccagctgctcggcgccctgctcggccagttcatcgtctacctgacctactacccgcactacaaggagaccgaggacgccgacgccattctcggcaccttctgcaccaccgacgcggacaaccagaaggtcaactacttcctcaacgagatgttcggcaccctggtgctcgtcttcggcgccctgtgctgcctgtccctggcttggggcaagcaggactacgccgcggcctccatcgtcgtcggcttcattgtgtggggcctcgtgacctccatgggtggcccgaccggccctggcctgaacccggctcgcgacctcatgccgcgtctgctgcacgccattctgccgatcccgcacaagggctcctcccgctggggtgaggcctggattccggtggtggccccgatcatcggcgccatcatcggcgcttggctgttcgtgttcttcttcgccagctgattcgttgattgattcatatatgcaaatggcctccactcgttttgggcggaggccattgtcgttgaatcaggtaaacgcagaggctactgctccaggaacacctgcggggccttcatgaagttcgtggcacagtgttcgccgcagaagtaataggacttgccctcatactcgcgcgtgatcgcgtcggcgttcaccgccacggtcatgccgcacaccgggtcggtggcggtttcgccgtccgcgggggcggtgtggtgcatgtgcattcccatatccatagtgttctccttgttggttggattattggattggtcagatgcgtgattggtgtgattcagcgtggtgcgatcgtcgatgatgacggttggctcgtgaggcgcgttggatgtggcggagccggtgatgttggcggcgttggctgattcggccgatccggctgattcgacatccgccgtgctgctgcccgagccagcggtgccatcgacaacgcccgcgttgatgttcgacccatgcagcctgttcgcgttcagcaccaggcacactgagctcaacgccatcgccagacccgcgatcatcgggctcaacagccagccggtgaacgggtagagcacgccggcggccaccggaatgccgatgacgttgtaaccgaacgcccagcccagattctcccgaatgttgcgcatcgtggcgttggacaggttgatggtcttgatgacgccgcgcaaatcgccgctcatcaaggtcacgtccgccgactgcatcgccacgtccgtgccggtgccgatggcgatgccgagatccgcctgggccagtgcgggggcgtcgttgatgccgtcgcccaccatcgcaatcagagtgcgggattgcgcggccgtgcgggaggtgccgtccgcggacttgacggcggcctcgtcgcgttcgcgctgcagtttggcgatccagtaggccttgccgtccggcttgacctcgcagatcaccgtatcgatgccgacttcgcgggcgatgcgcccggctacctcggccttgtcgcccgacagcatcaccgtgcggatgccgcgtgcgcgcaacgccgcgatggcctcgcgcgagccttccttgactgtgtcctgctcgtagctcggcttgtcccagtcggcggccgcgtccaccacgccgcgcgtgatggtgccggtcttgtcgaacaccacggtgccgatgcgacgcgcctgttccagcgccttggcgctggtgaccagcacgccgttggtggcacccaggcccagtgagaccgtcaccgacagcggcgtggccagtcccagcgcgcacgggcaggcgatgatcagcacgctgaccgcggtgaccagcgcatgcgccagttgcggcaccgggcccagtgacacccagatggcgaacgtccagatggcgatgatcatcaccgccggcacgaaataccgggcgatcttatcggccagctgctgcaccggcgccttggtcgcctgggcgcgggccaccatcgccgcgatctgcgagagtaccgtgtccgcgccgacttgggtggcgcgcatcacgcagtcgcccttgagcagcacggtggccccggttaccggatcgccgacggttttggaaaccggcttggattcgccggtgatcatcgattcgtcgatatgcgcctcgccggccacgatgatgccgtctgtgggcacgcgctcgccgttcttgacgaccagcaggtcgccggtggcgatggcgtcgatgtcggtgtccgtgaaatacgccggattgcgccattcgatgtcgtccacattgtctgtggaagtgacgttgagtttgtgcgcggtgcgcgggcgcagtttgatgagcgactgcaccgccttgccggtgccttcgcgggccttggtttccagaaggcggccgaccagcaccagggtgatgaccacgccaaccgattcgaaatacggttcgcgcgagccttccgggaacacccacggggcgatgcaggtcaccagcgaatacaggtaggcggccgaagtgcccagtgagaccagcgagttcatgtcgggggagcgatgcgccaacgcggggaagccgaccgtgtggatcggacgcccgcagtagaacatcaccggcgtgatcaggatggcctgcaaccacgggttcaccatccaatgcggcaccagcgtgggattggccatatgcagcatggtgacggcgaataccggcaacgtcagtaccgcgcccacaatcaccagcttcgtcagcgccttgatctcattggcgcgttcagccgcctctcgccgatcggcctccgccgcatccacggcggtaggtgccgtatacgaagcatcaggatgaggaaggggcgtgttctcatccgagccgtcctctccctcaaccctcaacaacccatgcaccatattcatgccgcacgcaaacggatactcgcccggcggcaacgccggcagttccacgtcggtggtggcgttgcccggcagcatggcgtcaagtcccagatcagcaaacaccacatgcgaggtgcattcgcc

SEQ ID NO: 186 - DNA, 14596 bp, Unknown
  R101_18m  MAG No. k141_12310
ccggcccgaacccgcacgggcaccgggacctccccgcatacccatgagacccacgcccgggaccattcccggccagccccgacggcgaggccgaacggcgcggcgcgtccgcgaccgtgggagcccaacgcccggccccccggtccgccgcgcagacagctcccctccagaggggagccagaaactggcttggttatggggtcgctctacactggcttctgctatgcattacttcacccctaaacgttgcgccacgtcgaataaaatcatgtaccacgataaggcgcaggctcagcgtgccgctgatcaaagcctgatcgagcgtggagccgagctatgggtgtaccgttgcgaatattgcggatgctggcacctcacacatcgcgatccacaatccagttaccggcatgtaccgctgaaccagcaactcaagccacacagtcgtaaaaagggctacaagccacgtagacgttagcgtcagaagctccacaggcctcgccaacgccgtatctgaggcaggttacggtccaaacacgccaggtcgtaggctgctaagcgttcagggcgctcggacacactccgtccaacactcacatcaccttggtgctttcaaggttgcggataacccaatcgttgaagcgaattaccggcttgcgcaacataagtcccaacagcaatgagggaacaaggaacagtgccagtttgcccatggaaacccagtattccatgccgaatgagcccgccatggccgaatgcatcgcatccaccgcataggggaacagtagccatttagaaacgacctggaagaacgtcggcagtgtttcaatggggaatgtgccgccggaaccggctacctgcataaccagcagtactacggcaatggctttgccgatatcaccgaacgatagggccagcgtatacacaatattcgagaacaccagtgcagacaaccacccgaccatcaaaaactgaatcggatgctcacactgcacgccgagatagaacatatcgcccaggcacaccagcgtaccttgcagcaaagcaaggaaaccgaaaatcatgtatcggccgaaatattcgtggtgcaagcgtaaaccgaactgccgcgcattgccggaagactcggcacgcggcttcttcagcacatccaacgcggcggccggtccggcaatccgcccggcaatcatggcctcgcgaagacccactcccgaaccgagcggcagatcattgcccaaccctaagatacgggccttctcatggtcggaaatcgatactttcaacatggcgaccagaatgatcgcaccgacccagatagacagaatcgtgtagaacggagccatcgcggaaccatagttggcaacgggatagagcgcgatgcggtcgaccgctacgggtgccgccagcatggaagcaatggcatcgggcttcgcagaggaaatcacagacaggtcgttggtgccgccactggtgatagaggcgagttgggaagacaagttgtcgagtttcttcgccgaacgggtcaaagcgctagctgcgtcagtcaaggccgactggatatccgtcaggctgtctgaaacgccgccagaaagacctgacacgctgctgacggtcgacgcaagcccgtcgattacggaacttgcctgcgtggccacttcgtccatggacgaggtcagattgttcagttgcggtttcagcgtgctcttgtacgtgtctgaagcctgagtaatcgattgtttggcggcggcgatttgtgatttcagatctcgacgcgctgtatcggcatcggcagtaccatttgctatgtgcgtggccgcatcgcccaacgcggtggcggcttgctgcatgctctgctgcgtctttgtggcttggtctgcagccgcgttcagttgagcggcaacggtatctccgcccacgggcagtgaagccgcttgtttggcgagatctcgtaaagcggcggcatactttccaaagctgtcggcctgagcctccactttggattgcatatcggtcagcttgtttgatatctgcgaggattgtgagcccacatcggcaaaagcggcatcgatctgcttggcaatggtgtcgtaggatgaaccggcctgctgcaatgccgtaccgacgccatcggtggctccggacaatgccttgtcgaggctggagacgccgttgcgggtctgtttcaacgcctttttggttgtggccgcagctgagcctgttgatcccagcagcttatcggtggaatcaatgatgctgttggcggccccgagcagattggcataggaatccatctgcgacgcagtgccggtcaaacgagacgacatggtggcaatatgactggaggcgttgttgacgtactgctccatttgcgggctttgcgcgtaatcggccacgttggaaaccaaatccagcgccacgctcgccaaggtcttcacaaatgtctggtcgatggtcgtggccacggtggtagcaccctggtcggtgatatgcggagcgatcggattgattttctcattgagatagtattcgagcttggcgtgcttgatcttcggtgaaaacagcgtcatcatatcggagctgaagctctttggaataatcagcgcggcatagtattcgcctgagttcacgccatcgatggccttagcacgatccacaaactgccagtcaaggtcatgattggccctgagcgtattggtcacggtttcgccgacgttgatggtgatcggcatcagatcggacttatagcccttatccacgtttgccacggcgaccttcaaggccttggtgttgccgtacgggtcccagctggcggcgatgttgtaccaggcgtacagtgccggcacaatcaccaatcccatagccacgattacggcgatcacattgcgggtggcttggcgcacgtcacgtacgaatattttccagataagcttcatcgtgcgcctccttgcccagactgcccagactgcccagactgaccggactgctcgaactgtgcggtgtgcgcagtcggctcggcggcctgatcgccgaacagtgtgagtcgttcagtggtttcgccgatatccggattgctgcccatcgccgcttcgtgacgtccgtggccgtggaaacgccgccacacatatccgttgagcatcacattgcggaactcgtcggcactcatggcactgacgccaagctgcatggcgtaggtttcgcgtgcgtattcaaccacaatgagataggcgtcgataagaataatcgacagaatccaggaggtcagcatggcgattttctcttgggtgatgaacagcagtaccaggaatacgaacgggagtacggtcagcaatgtcagaccggcaacgatcatctttgggtaccgcgcgaagaaccggtgcgcgcgatgagcgatgatatcgcgcagttccttgctgtcggacaccgtgcggaatacggagttcaagctcacctgttcgttcaccatgctgttgtgctcggtgatcatcaggtcggtatctcccaaacgatggtcgaacagcgcgttcaggttcatcgcataccggcgtacgacaagtcccacgaaaagcgccgccggcagataccagaacaggtgcagcatgtcgagccagtaatggttcgcgtacaggccggcgatcgggccgcgcatcgcgttgatgccgtaggtaaagggcagccatgggtgcagttcgcggaagaagttcggcatcatttcaatcggatacaggccggaggcaccgggtatctgcacaatgaccagaattacggcgatggctttgccgatatggcggaacgccacggccagcgcgtaaataatgttgatgtagacgaacgaacagaagattccggccaagatgaacagcagcggatgctcgcattggatgccgagcaccagatcgccaatggtggcgatgatggcttgcaggaatccgatggtgaccagcagcagccagcggccaagatatgcttgcgtagcggtgatacggcgaatgcctttgcggtcgacctcaagcttgtagatggcaatcagcacgaaaccgcctacccacagtgccagattcgtgtagaacggggtgactgcggacccgtaattgtcggtggcgtacacgactttcgtggtcagggtgacgggattgcccatgaactcgccgaatcccttgtcatccagatgcagcgtatcccggattttctggtaagcggcggaactatcgagcgtggcgatatcggtgcgtacggtggcgacatcgctggccgcctggcgcagcgaatcctgcgtgctgctgatggtggttttcgtttggttcagggtatcgacaagctggtcgaacagcccgtcggcctgatccaaggtgccggacaacgaagtcaacgtgccatccagcgtgccgttcagggcggcgaaactgttcaatgatgaggtgagcgacggcattacggtgccggtcagcgagccgcgcgcggtattcagcgccgcgatgccgccggtggtggtgttggtcatggctccggaaaggttcgtggtggcgtctttgccggagttgatgaactgtgtggtgtcggtatggaaggtgttgagctgtgtctgctgtttgctgatcaatgagtcgagcgcatcgatttgtttccagatgttctggccgaccgggtcggtggtgtctttgccgatgccggctttggtcagcgcgtctttcagatcgctgattgacgtttgggtggcgttcagtggggccgaaagtgtgttggtgatggtgtcgacggagttctgcgcgctgttgaaggagccggtgatgctgccggcggcgttgttgacgtggacggccagtccggagagttgtgctgaactgctgtcgagcgcgccgaccagtgtggtggagaaggcttgtgacccggcctgtgtttccgccaacagtgtgccggactggcgggaggcattctgcgcggccgcgacggtctgcttgagtgaggcggtggtctgtttggcgtcggcgagaatcgtgtctgattgggccagcgtgtcctgtaagtcggtgagtgaatcctgaacggtgttcagcgtggacatcaccgtattgagatcatcgatcgtatcgtgctggactttgccagtggcttggccgagatcgtctccggtttcggaaatggccgaggcaacggtggtggctaccgtggtgacgaaggcggagttgatctgctcatcgatggtggtggcgccggtgtcggtgattttcggcgcgatcgcgttcttcttctcgttgacgtaatacttgattttcggctgtttggaggttccggtcaccgattcgaccaagctggcgctgaaatccttgggcagcacgatggctgcatagtatccgccggtctccacgccgtggacggcctgttcctcattgtctacgaagcgccagccgagttcgtcgttctgcttgagtttcttgacgacctgccggcccgcatcgagatggccgaccagatcgttggtggtgccttggtcttcattggctacggccacttgcagattgccggtggctgaatagggatcccagttggcgagaatgttgaaccatgcgtacagcgagggcagcattgctacgccgagcgtcaccacaacggcaacgggattgcgtaagatacgtctgcaatcgcgcagaaagacttgccaaaccttccgcatccagtccctcttttccggttcgtagtcattgcggccacatgcagtctattcccaccactggtgcggatactgctggtttggtgggttttcttgcaaaactggccgttggttgtccgcataatgggactgatatgtgaacgtttgttgatggtgcgacaccggcgggatggctgtgcaattttgccggtatccggtgatgaaatgttgaggtgttggaactgagtcgtcgcagtgctgagaccgagacgactcagtgacgagcctatccgaggctatctcgttggttctggtctcactgatccagacggaagccctgagcggcggccttgtcgagcagtgtctgatggctgacatcctgccgactgatcgtggcgacctgatcgctgaaagcgtccaccggacggtcggcttggcgcagatcgtagtaccggtgaactttcctcgtcgaaggcgggcagctggtcgagtacgccatcggcgtcagccgggtaggtgttctcgaagaactgcatcgtgcgcggcatgcgcggcttgacggtcgggttctgatcgggcttgccgatggccagacccagcaccggatacgtgtattccggcagattcagcacgtcgataaggccggggatgttgttgagcagagagccgagaatcacgcagcccagtcccagcgaataggcggcggtctccatggcgtgcagggccagcacggcgtcgttctgagcttgggtgaagcgatagctgtacttgagatggaattcgtcggaagcgggatcgatacccttgcgttcggcgatgcgtgcgttgcggtgctcgtcgatgacgaacacgtacagcaacggcgcggtggcgatatacggctgatggccgaattcggcgagcttggctttggtggccgggtcggtgatacggatggcggaccagtcgttaaggaactggctggacgcggcatgttgggcgacggtttcgagcgtggcgcgggtatcgtcgtcgatggcctcgtccttgaacttacggatggagcggcggcccagaagagcctcgattgttgcgttggtaaccatggctttattgtcgcacggcagacgccggacgccacggtggattacctcacagtgaaatgccgatattgtgtggcggaactgtgctggactgatggttcctgtcgattgactgatggttccttgacgaaattccagcgatgagtcatcagtcagccaacagaaaccatcatccaaccgggggattagcggctgggcttgcgatggcggtggtcgacgaacgccttggagccccgatccgacagctgcgaaaccactgcgccgagtgcggccgaaacggcggcgaatgccagactcattgccagactttgcggcgcgtctgccgccagtcccttgcgcagattgcgtttgcttgtgcccttgtcccatatcatctggaatgctttgccggcaaccaagcctgccagcgctgggactgccgacttgatgagcttgtcgcccagagaatcagggtcgttgagccggtcctcgcgcagcctgttgaccttctcgtcgatgcggtgcaggctgtcgaccgcgcggtcggcgctggaggggaagtcggtgttcgtttcgtcgctcatgactctcagtctaatagcatctcaatcatctcagcgcaaaagatgggcgttaatggtggagtcatgaacgagcgcagactagagtggaggcatgagcgaacagaacgtgaacggcaccgttgccgtcgagaactctcgtggcggcaatggatttttggtgttgctgcgccacggccagaccgtgtggagcgaatccgggcagcataccgggcgcacggacatcccgttgaccgcggtcggcgagcagcaggcagcggatgccggaaggcgcctgcgcgaggccttccccgaaggattcagccagagctgtgtgttttccagtccgctgaagcgggcgtgccaaaccgctgaattggctggttttgcggaccacggtgtgttggacggcatcgctgaatgggattacggccgagccgaggggcgtacgcgccagcaggtgagtgaggccagcggttttgaatgggatgtgtggcgtgacgggccgcgctcgctgacgcccacgctggagggcgactgggtcgagaccttgccttcgggcgaacaggtgtcggtccatgccgggcctggcgagacgctggaagaagcggcggcacgcgccaagagcgccatcgacgagattacgccgctgctgaaagacggccataatgtgctgttggtggctcatgcgcacatcctgcgcatcctcacctcgcaatggctgggcgtggacccgcatttcgcacggttgctgcgtttggatacggcgcactactcggtgctcagcgtctataagggagataacgtcatcgaacggtggaacgcctagccccggttgcgctgcgattgcgctggcctgcccgctactgcgggcgggcctttattgtttgtggcgggaattgcggtatgtcgataaatgatttgcaaacgatagcgtcggcgtgttgtttttttgatgggtataagtggcaatcgattgccatgaaagatatgttagcgctctcatgattgcgaacgcttgcattgcgataatgaggcaaaaatgactgaattaatgggatatttgttgacaatggcctgaaaatgatgatttatgacgcgccgatattgctatcgtttgcaaaaagaagcaaaccgttgcacaatagtgcatgtcgatagtcgtaaaggtgcgtgctagcgtacctgtcccgaccggggacggccgggtcgacgatgaaagagaaaggttcgatgatgaatcgtacagtcaagtcagcagtcgcgatggcggctgtcgctgcgatgtccctcggcgctttggcggcctgcggaagctcgacctccggcgatgacgccaagggcaaggtctactacctgaatttcaagccggaagcggctgatcagtggaccgctctggccaaggaatacaccaaggaaaagggcgttgaggtcaaggtgcagaccgcggcctccggtacctacgagcagaccctgaagtccgaaatcgccaaaaccgaagccccgaccttgttccaggtcaacggcccggtcggctaccagaactggaagaagtacaccgccgatatgtccaatacggatgtgtacaaggagctcaccaaccaagatgtggccctgaaggatggcgacaaggtggtcggcgtgccgtacgtgatggaaacctacggcctgatctacaacaaggacatcctcaacaagtacttcgcgctggatggcgccaaggccacgtccatggacgaaatcgacaacttcgacaccctgaaggccgtggccgacgacatgcaggcccgcaaggacgagctcggcatcaagggcgcgttcacctccgccggcttcgactccagctccgactggcgcttcaagacccacctggccaatctgccgctttactacgagttcaaggacgacaacgtcaccgagcagccggccaagatcaagggcacctacctgccgaactacaagaagatcttcgacctgtacatcaccgactccaccaccgaacccacccagctgagcgccaagaccggagatgatgcgaactccgagttcgcgctcggcgaggccgccttctaccagaacggtacctgggcctggaccgacctgcagaaggccggcatgaccgccgatcaggtaggcatgatgccgatctacatcggcgtcaagggcgaggagaagcagggtctgaccaccggttccgagaactactggtgcatcaatgacaaggcctccgacgccgacaagaaggccaccgaggacttcctcaagtgggtgatcacctctgataccggcaagaaggccctctctcaggacatgggcttcaccaccccgttcaagaccttcgatgacgtcaaaagcgacaacccgctgaccgaggccgccgtggaagaccaggagtccggcaagacccaggtttcttggaacttcaccatgatgccgtccgaggaatggaagaacaaggtcggccaggcgctgctcgagtacgcgcagggcaccggcaagtgggatgccgtcaagaccgccttcgtggacggttgggcttccgaatacgaggcctcgcactgagtcttatagagtcccatagccgataagtaacaatccgcggcgcccctgcctttccttctccaggggcgccgctttgtattgctgagtctcgcacaaaatcgtccgccgcagaaaagtgtgaggcacgcacccgctcaatcgcacactgtgggtccatggattggcgatttttcgccatttcccacaatgtgcgattgagcgttattgtgcggttgcctcacgctttttctatggtgggctttgttgtgtgagcctacttaacgcgggaggtggaggagcggaccttcagctgggccgggaacacgatgtagggttgctcaatcggcttttcgtcaatgagatcgagcgtcatgcgggctgccacgcgggccatttccaccggatcctggcggatggtggtcaggccgatatcgccggtgtagaaactatcgtcgtagccgaccagcgagacgtcgccgggcacggagaatccattgcgctccagctggaacataagcggcaaagcgatgccatcctcctggcatgcgatggcggtgggcatctcatcttggctcatgagttggtcgaccacgtcgctgatttcataacgtccatcgtcatcgaccttgcagacgatgacctgcggctcgatgccttccctgcggcagcaggcggtgaatgagtcgaatcggctttgcacggagaagctcagcgacacctcgcgattggtgctgatataggtgatgcggcgatgtccgagattgataagatggcgggcggccagcgtggagccctgcacgtcgtcgatattgacggcggcggtaaagccgcgggcttcgggctcgactgaattgatgccgacgatcggcacgccgaccgaagccagttgcgcgatttcgttgttgtcgatatcgaaagacgccacaatcacggcatcggcgttacggcgtaccggcaacatctcgaagaattccttgcgctcctcgatgctggaaatctggaataccgaaatatcgtagccctgcgtgtgcagcacctcgttgagcccctcgatgaccgaggcggtgaaccacaggcggatatggccgctcatcagtactgcgatgcgcagggagcggccggatttcagggccgcagccgagcgggagagtgagaaattgagtttgtcggcgatggcgagcacgcgctcgcgggtcttggccgacaccagatccggcctggtgaaggaacgtgagacggtggagatggagacgccggcctcgcgggcgacatcctgaatgctcgtagccattgcagcccccttgcgttgaatggaaaatcgcaatacacatgcacaactgactacagtgtacatgctgattgattgatttgcggcgatgacaacgattgtattacaaacgtttgcaaagtgtctatgacggcgtcagattggctttatatagccattatcttagttgaaagaagattgctggagctggagtatgctcgagattgaaacgctgaaaatgacaacgtttgacatataatgattcgacgtttactatgaacataggcttgaacgagaacaggccgtgcatgcggttctcgatcggcaggctcgcattgagttgaactccgcagccggcgcacgatgcagtgtcacaacgcagcggactcaaggaggaggaaaagtcatgatcagcatggctggcaaggcgatacgcagatggtgggcgctgttcgcgctccccacattcgccgcattcatcatcgggttcctggtgcccttcatcatgggcgtctacttaagcttttgcgaattcaccaccgttaccgacggtgaatgggtggggcttaagaactatggcaaagcgttgaaagacaaggaattcctgcacgcgctcggcttctccaccgcgttcaccatcgtgaccaccatcgtgatcaacgtgatcgccttcgccatcgcctacatgctgaccaaggcgatcaagggctccacgctgttccgctcggtattcttcatgccgaaccttatcggcggcatcatcctgggctacatctggctgctgctcctgaacggcgtactggcccactggggccgcgccctgacctataaggcgtcctacgggttctggggcttggtcatcctggtgtgctggcagcagatcggctacatgatgatcatctacatcgccggcctgcaagccctgcccaccgatgtgctggaggccgcggccgtggacggcgccaacggacggcagaccatgttccgcatcatcatcccgctgatgatgccgtccatcaccgtgtgctccttcctgaccgtgaccaacggtttcaagctctacgaccagaacctcgcattgaccaacggtgcgccgagcaacatgtctgaaggtctggcgctgaacatcacccgcaccttctacggccgtatgggctgggaaggcgtcggccaggcgaaggccgtgctgttcttcatcctggtcgcggtcatcgccctgattcagaacaagctcaccacgagcaaggaggtggcagcctgatgaacgagaacaagcctgtgaagcatggcgcattatggaccgtgctgtttgccgttgtctccctgttctggattttcccgatcgtcctggtgctgatcaactccttcaagcagaaggcgtacatctccaagaacgccttctccctgcctgccggcaaggcgttcgtgggacttgagaactatgtgcgcggcatcgagaccacgcagtttttcgcctccttcggctggacgctgcttatcaccgtcggctcggtggtgctgattctggtgtgcacctcgatgtgcgcatggtggatcgtgcgcgtgaacaactgggctgcgaagctgctctacaccctgttcctgttcaacatgatcgtgccgttccagatggtgatgttcaccctctccaagatcgccgacatgctgaagctcaataccccgtggggcctgtgcatcgtgtacctcggtttcggggccggtctggccgtgttcatcttcaccggcgtgatcaagggcatcccgcaggagcttgaggagtccgccatgatcgacggcgcgtcagtgccgcgcatcttcttccagatcgtggtgccgatcatgaagccgtcgatcgtctcggtggccatcctcgaagccatgtggatctggaacgattacctgctgccgtacctgacgctcgacctcggcaagtacaagaccatctcggtcgccgtgcaatacctcaagggcggctacggttccgtggatatgggcgccatgatggcctgcctggtgctggcaatcatccccatcatcgtcttctacttggtatgccagaagtatatagtctctggtgtcatggcgggagccgtcaagggctgacgactcgcgtcgtcagcccatggctggaagcccagtgggcttccagcaggctccaggctgagccgcgacagcggcgaagctaatgatgagcctcgtcgtaggcgagtccgtaattgcagggccgaaggcggagccgtcaagggctgagctccaccaatccggctcccctctttgaggggagccgtcggcggaagccgactgaggggagtatcctgagctccatcaagtctcccctcagtcatctgcgatgacagctcccctcagagaggggagccacaggcgacacaaggagtagttgatgaactggctggcaccggactcgaaattcatgcgcgcgtggagcaatcttgttgacggcgtatggatcaacattctgatgctggtcacttcgattccgctcatcaccatcggtgcggccctgaccgccggccatgatgcttgccgccgctccatcgagggcgagggcaaaggtgtaaccgccaactacttcaagtcattcaaagccaacttcatcaaagccacactgctgtggctgccgttcttggtggtgctgattgcactggtctggtcatggatcgtcctgcagatcacgccgctgctcatcatcaaattcgcgctgaccatcctctggcttatcggcttcgaatgggtgttcgcgcttcaggcacgcttcgagaacaccgtggccggcaccttgaagaacgccttcatcttcggcatctcccacatcgcgatgaccgtggccctggtcatcgtggatgccgtgttcgtggcgctgctggtggccagctggttctacatgcccggtggactgttcctgctggtgattcttggttacggcaccatgctgatgctccatatccccgtcaccgagcgtgttttcaatccatatctcattgactaggcgggttctctcgcgaatatgcggcgatcttcgaggtctgagcgttctctgtccacgcaagcgcggtaaagataacaaattgagactattcgctgtttgtggtgggtgatggtcaagtggtggtgacggctttgaggtcgagtctgccgcaggtcaggtagatcatggtggcgaagtagtccatgtcgcggaagcctctcgcccgtcgtttgacgttctggatgacgctgtcggcgccctcgagcacggcgttggtgtacgggtgctcgaagtatgcgacgatctcggcgaagtggcgtcggatcatgcgggcgaagtccttcatgggctcgagcctcgagtgcatcatccatgagcacaggcgatgcaggcgcacccatgcctcggacggggtgcggctgtccgtgtggatgtcctgcaggacctcgcgcatccggcaggcgcggccggtcttcaaccgttgcctcgtcaggttgcgcttggtctccacctgcagttcggtcaggctttcctcgttgc

SEQ ID NO: 187 - DNA, 59260 bp, Unknown
  R101_18m  MAG No. k141_12382
gacacccaccccaataacaaggccatgcagcacgtgctcgaaagctccggcttcgcccgttgcggcctgatccagctgctcgaccggccggtcgacaccaccagaatcgcctatcagcgccacgagtggtgagtgtggctgtcgccagcgtgttcggttccgcggtggagctggtcaggtaaggtccacgtcgtcgcgcacgtacggtccgtcggccgcccgttcaaactcgtgcatatcgcaaaaaccgtacgctgaaagtaactcagcgtacggttttcacgaaagcagccatcgactatcggtcagccgatagacctcagtcctcagtcgcagcgaccttggtgtcagccccggccttctgctcaaggccgagcttggagcgcttgcggctgtagccgaagtacacgatcaggcccagaccgaaccagatggcgaaacgcacccaggtctcccagttgagaccggcgatgagcacgaagcagaatacgatggccagaatcggggtgaccggcacgcccggcgcgcggaagccgcggggcgcattcggctgggtcttgcgcatccatagaataccggccgacacgatgatgaacgcggacagcgtaccgatgttcaccagctcgaacagcacgttgatgttgatgaagccgccggcgaacgcggtcagcagaccgaagaaccaggtgcccttgaacggggtgcggtacttctcgtgcacgtggccgaagaacttcgggaacaggccgtcacggctcatggcgtagcagatacgggactggccgtacagctgtacgagcatcaccgtggtcatgccgatgagggcgcctaggttcacgatcaccgcgagccagttcatgccggtctccagaatcacgccggccactggggcgtcgatgtacttggcgaactccttgtagggcaccacgccggtcatgatcatggtcatgacgatgtagagcacggtggaaacggccagggacagcaggatgccgcgcggcagtgtcttgttcgggttgatggtctcctcggcggaagaggacacggcgtcgaatccgatgaagctgaagaacacgatggatgcggccggcacaatgccgtacggctgggtggagccgggctggaaagtgtagatgccgtacggggagaacggctgccagttggacggcttgacataccacacggcgcacacgatgaacagcacgatgatggcgagcttgatgagcaccatcacgtcattggtgcgcttggtctggttgatgccgatcgagagcacccacgtgatgatcagcacgatgacgaaaccgggcaggttgaagtaggtggtgacgtccgggttggtgccgtaggcggcggtcagctcgaccggcaggtgcagtccgaagccttccaacaacttgttgaagtatccggaccagccggcggacacggtggccgcctgcagagcatactccagaatcagatcccagccgatcacgaaggcgatgagctcgccgaacgccagataggcataggagtaggccgagccggacaccggtgccatggcggcgaactcggcgtagcacaggccggcgaaaccgcagcagacggcggccagcaggaacgatacggacagggccgggccggcggtgagcgcgcccttgccggtgagcacgaagataccggtgccgatgatcgcgccgataccgagcatcgtcagatcgaaggtgcgcatcgtgcgcttcaggggagtggattcggcgacaagctgatccacgcttttcttacgaaacagatccatgttcttctctcatgaaacttaagatatggggctagaccggacggatttccgggatcccggcacgcctcaacgccgggaatcaaaggcggcttccgagaaaccgcatatcggtcattagtgtacgactgccgggcgaaaacaaacgattatgaccacacgtcacattcctgcgcaacaataggtgcctatgagcatgaacgcagcacccgaaatcgcattctcgtccgagcagggcaaggccaactatgcggccacccgccgccaataccccgcacaggccatcgtgaacctcaaaaccatgcgcgacaacatggcccacctggtctccgtggtcggcggcccgaactccggcacggcggtgatgggcgtggtcaaggccgacgcatacggccacggactgctgcccgccgcactggccgcgctcgccggcggcgcgacatggctcggcaccgcgcaatcgcatgaagcactgctgctgcgcaaactcggcatcggccccgaccgttgccgcattctgacttgggtctacaacggcaccgaagtgccattcgatgagctgatcgctgccgatatcgacgtatcggtcggctccctgcccggcatcgatgccgtggccgccgccgcacgcaagctcggcaagcccgcccgcgtacacgtcaaggtcgattccggcttcggtcgcaacggtttcacgccggctggattcgacgccgcgctcgccaaactcgtgccgctcgccaaagagggcgtgttgcatattgtgggtcagtggagccatctcgccgtggccgattcgcccgatgtgcccgaattcgtgtcctccaccgaccgccagatcgaaacattcaaggacttcacgcgccgcatggaacaggccggcattccgccggagatccgtcacctggccaacacggcggccactttggaccgcccggagattcacttcgaacttacccgccccggcatcggcctgtacggctacgagcccgatcccgcgatgggcaccccgcgcgactggcatctgaccccggccatgcgcctgcaggcgcagctcggcacggtcaaggatgtggaggccggccacggcatctcctacggccgcacctacctgaccccggacaacacctcgaccgctattgtgccgctgggctacgccgatggcatccaccgctccgcttccggtttcgatatggaaggtgccaagcacgtggagaagccgggcggcccggtgcgcatcatgaccactgaaggtccgaagctctaccgcgtgtgcggccgcgtgtgcatggaccagttcatcgtggacctgcacggatccgccgccgaactcggcgttcacgagggcgacacggtcgaactgttcggcccgggccgcggcgaggattacgttgagcctaccgccgacgattgggcccgcgccgccgacaccatcagctacgagatcttcacctgcctgcgcaaccgcatcccgcgcctttacgagcatgccgccgaagtactgcccgccgccgacctcgccaagctcgaccccgccacgctgctataaggtgcattaccgccatacggtggcaccccgtaatcccttcttcccgaatatgtgccgttgacatgtgctgagcgtcacatattcgggaaatcggccccaatctcccgaatatgtgccgttgagttgacgtcagtggcacatattcgggaagtcgggattactgcggccgatatgtgtgcctatgcttggaatatggaaacgacgttggatggggaacaggtgctgagcgatgagggctacagcgccttcgacgaggagcggtgggcacccgagccgcccaaatccaagtcgcgcacggctttcgaacgcgatcgcgcgcgactgattcattcgtccgctttgcggcgtttgggcgcgaaaagccagattctgattgccggtaccgacgatttcgcccgcacccgactgacgcatacgctggaagtcgcccagatcggtcgccaaatcggcgcattgctcggctgtgatccggacgtggtcgactgcgcctgtctggcccacgaccttggtcacccgccgttcgggcacaacggggagcgtgcgctcgccgacatcgccagcaatatcggcggcttcgagggcaacgcacagaccatgcgtatcctgacccggctcgaacccaagatctttcacccggacgggcgttcggccggtgtgaacctgacccgtgcggccttggatgcggccgtcaaatacccgtggaccttggccgaagccgaccaacaccccaagggggagcggtcgaagaagttctgcgtctacccggatgacgaaccggtgttccgctggctcaaaatcggcgctccccaggccaccaagcccatggaatgccagatcatggacctttcggatgatgtcgcctactccgtgcatgatgtcgaggattccatcgccaccggcgcgttcgatccgattgtgctcgccgatccgaagatgctggaccacatcatcgagcagacgcgcgcatggtatggggcgaagtgggatgccgacaagctgctggccgcgttcatgcgattgcgccgagagcatttgttccctgcacatttcaatggttcgcgcgaatcgttggcacagctcaagaacatcacgtccgatttgatcggccgcttctgctggtcggtggaaaccgccacgcgcgacacgtatgggcccgggccgttgacccggtattccgcgaacatcgtgattcccgaggacacgaattacgagatcgtggcgttgaagggcatcgccgtgtacttcgtcatggcgcctcgcgagcgcgagccattccatcaggaggagctcaagatcgtatcggatttggtcgatgtgcttatggccgattcgccgctcccatccgacgctttggaaagccagttcctggccgattggaatgaatccaccaatgacaacgagcgcctgcgcgtcgccatcgatcaggtcgcaagcctgaccgacaactccgctctggccctgcactccatcttgtgctgagggcgtgttggacgggtgcttccctcagtctcgctgcgcgagccagctcccctcgggtgaggggagctgtcgctgtaggcgactgaagggagtttcgcggaagaaatgataaccgacggtaaaaatttaccgtgtctcaggtgaagcggtactctagagacttatggtcggaatgattaagaaagaagatgtcgagaaggtgcgcgccgccgcggacctgtatgacatcgtatctgcgaccgtaacgcttaagccctccggcaccggcaccttcgtgggcctgtgcccgttccacgacgagaaaaccggcagcttcaacgtgcgcccctcactcggcgtgtggcactgcttcggctgcggcttgggtggcgacgtattcaaatacgtcgaacaatccgaaaacatcgacttccgcgaagccgtggaactgctcgccgacaagtaccatatcgagctgcactacgagaacagcgtcaacggcccgaaccgcgagaacaccggctccaagcgcacccgactgctggaagcctgcgaggaagcccaacgcttcttcgtctcccagatcctgaccaaggaagcactgcccgcccgcaagctgctcggaggccgcaacttctcccaagccgactgcgaacgtttcggttgcggctacgcgccccaaggttgggataatcttgtgcgccacttggcctccaaggggtttacgcagaaggaaatcctcgacgcgggcttggcccgccaaggccagcgcggcatctatgactatttccgcggccgcgtgacgtggcctatccgcgattcgaccggccgcacgctcggcttcggcgcgcgcaaactatacgaagacgatcagatcgccgccaaatacatcaacacgccggacacgcagctctaccgcaaaacccaggtgctttacggcatcgatttggcgaaatccgccatcgtcaagaagcgacaggtggtgatcgtcgaaggctatacggacgtgatggccatgcacttggccggcattgacaccgccatcgccacgtgcggtacggcgttcggcgccgagcacgccaagattgtgcgccgcctgatcgccgacgattcgctgggcgcggtccagctggtcgggccgttgaaggtcaaggaccagccgttgagctcgcgcatcgtgttcacgttcgatggtgacgccgccggccagaaagccgcgctgcatgccttcggccttgattcggccttcctctcccaaaccttcgtggccgtggccgacgacaatctcgacccgtgcgacctgcgcatcgagcgaggcaacgaagcagtgcgttcgctgatcgcccgcgccaaaccgttgtatgacttcgtgatcgacgccgccatcagccggttcgacctgacctacacgcccggccaagtgggtgcgatgaaagccgtggccccgctggtggcgcagattcgcgaccgctccctatgggacgcttacgcgcgcaagtccgcgggccgtatcggcgtggatcttgaggtgatgcgccgcgaggtgatgaacgcgcgccggcagatgcatgtacgcgatgaggacgcctacgcgcccaaacgtcgattcgagcgtgacgagccgcgtgtggaacccggcaccaacccatacgccaatccggccacgcgcaaggcgttggagcgccgtgacgccgctgaacaggcatatttcaagatcgacgacgccgtattcatcgccgaacagcagttcatggccgtgctgattcaggtgccgcgcgccatcgaccgcaccatgttcgggcagctgaccatcgaccatttcatgacttcggtgttccgcaccctgttccaggcgatcgcggccgccggcggactgccatccgacgataccccgcaggggctgtggatgcacaacctcaccaaggccggcgggccgatgctgaatcaggtgatcaacgagctggccgtcatgccgttgccactgcctggcgacgacaccggtagcggtgcgcagccggtgcaggccaacgtgtcgggaggaggtgttggcgtgaatggcggtgccgccgcagtacagctgcgtcctgccacgccggaggagcagcgctacgccactgagcttctcacccgattgttggacatgggcttcatgcgccagatcggtttggccaaacgccgcatggcccagctgcccgacggcgaagagaagataaccctcctcggccagatcacccgcatggaaaccgcccgtaaagacctccaagcccaaatctacggcaacaccgtcggctaatacctcccactgattgcgcgcatcttcgaatacgtgccggatgcataaggccatacaaccggttgccggattggatgggtgcagaagttgcggattggccccatccaaattggactggtttgggtggggccaatccaatccgttcaataatgaagcgcgataccaagcagcgtcgaacgaagggaaactcatgacgcagaatcgtgcggaactcaaccgtaatctggcccagatgctcaagggtggcgtgatcatggacgtcaccacgcccgaacaggcgaaaatcgcgcaggatgccggcgcgtgcgcggtgatggcgctggagcgcatccccgctgacattcgtgccgccggcggcgtctcccgtatgagcgatccggccatgatcaagggcattcaggaagctgtctcgattccggtcatggccaaggtgcgcatcggccacatcgccgaggcccgcattctgcaggccatcgacatcgactacatcgacgaatccgaagtgctttccccggccgacgacgtgtaccacatcgacaagaaccagttcgacgtgccgttcgtgtgcggcgcgaagaacctgggcgaggcgctgcgccgcatcgccgagggtgctgccatgattcgtaccaagggcgagcccggcaccggcgacgtgattcaggccgtgcgccacatgcgcaccatgaacaagcagatccgcgagctcgtggccttgcgcgacgacgaggtctacgaggccgccaagcagctggccgtgccctacgacctggccaagtacgtgcacgacaacggccgtctgcccgtcgtgaacttcgccgccggtggcgtggccaccccggccgacgccgccctgatgatggagctcggtgccgaaggcgtgttcgtgggctccggcatcttcaagtccggcgacccggccaagcgcgccgccgccatcgtcaaggccaccgccaactggcaggacgccgatctgctcgccaagctgtccgaaaacctcggcgaagccatggtcggcatcaacgaggacgagattcagaccatcatggccgctcgcggcgagtgagacaacatggttgtagctgttgaatatatttccaaagaagagtccgcggacgtcgaaaacgtcaagcacggcgtgaccggcatcctggccgtacaaggcgcattcgccgaacatgcggcggtgctggacaagctcggtgcgccgtggaaactgctgcgcgcggccgaggatttcgatgaatccatcgaccgcgtgattctgcctggcggcgaatccactacacagggcaagctcctgcattcgaccggactgttcgagccgatcgccgcccacatcaaggcaggcaaaccggtattcggcacttgcgccggcatgattctgctggctaaaaagctcgacaatgacgacaatgtctactttggcgcgctcgacgccgtcgtacgccgcaacgcctatggtcgtcagctcggtagtttccaggccaccgccgattttggtgcagcggatgatccgcagcgtatcacggacttcccactggtattcatccgcggaccgtacgtggtgtcggtcggccctgaggccacggtcgaaaccgaagtcgatggccacgtggtgggcttgcgtcaaggcaatatcctggccaccgccttccacccggaactcacggacgatacccgcatccacgagctcttcctgtcgctgtagtcgattcgtctgccgctagactggtatccgactgacgaatcaaggagacgatctgccatgcggtttgagctgaatcgacgcagcaaggtgccgatgtaccggcagctggctgccgagctgcgtgaacagatcgtctccggcgcgatggccgagggctaccgcctgcctcccgaacgcgagctgtcctcgcgtctcgaagtcaatcgcaccacggtgttgcaggcgtatcagcagctcaaggacgaaggtcttatcgcctccaaagtcggcaaaggcacgttcgtgctgccggctgcctccgcaagccgaacaccgcacacgtcaaacagtgacttcgggaatgcaataacgcgaacaacacgatcgtcggcagaaatgggaacatcgcaagcctcctcttccggcgacgtagaacgtgctacctccactggtttcttgacgacggaccagggcagcagctctgcggcggtccatacgattcgtgaaagccgttcggttcagggcccggagccaaccgtcgtgcgtccgccatggtcggtgttgttctctgattattccaaccggtttacctaccatgacatcgcctcggccgagcgggcgcagcgcggcgacaccattattgacttcgccaccggttcgccgaacccggcggatatcccggacgatctgctgcgcaaggtgagcatcgaggcgttcgaatcgcgggaattcgacggccaaccggaatcacctatcgagggattcgaagagttgcgtgcgctgcttgccgaacatatgcgcgcacgaggcgtacaatgcggcgtccgcaacgtgatggtgctttccggttccgagcagggcatcgacctcatcgtgcgcgcgttcatcaaccccggcgactgcgtgctggtcgaacaatccacgttcttcccggcattgcagaccttccgctcggcggatgcgcgcatcatcggcgttccagtggacgagcacggtatgcgtacagacctgttggacggctattgcgcgcgattccggcccaagctcatctacaccgtcccgacgttccaaaaccccaccggtaccacgctgccgcccgaacgacgcagcgaactcatcgacgtggcgcggcgctatcagtgtctgatcgtggaagacgatgcttacggcgatttgtggtacggcgggggatcgtccgacgcacatcgccccataccgcttaaaggcatggagaatgcgggatacgtgatgtatttgtcgacgttctcgaaaaccgtcacttcgggcctgcgcacgggatgggttgtggccgacccgcatgtgatcaaccggctggcggctctgcggcgcatggtcgaccagcatacgagcacgtcatcgcagcgcatctgcctggaactgcttaaagaaggccgcatcgccgaacatttgcgcggtttgatcaagacttaccgcattcgacgagatgcagcaatcgcagcattggagcagtatgcgccggatgaagtgtattggaccgtgcctgcaggcggctactatatttgggtttccttaccggacggcgtgcgctctctggatgtattggaatcctgccgttcccaaggcgtcacgttcatgccgggcagcgtgttcgacgttgacgaaatggatgattcccacatccgtctcaactttgtgcgcccggatgctgctgacattgataccggcattcgaatcattggcgagacgatagcacagatgtagccaagtgactggctcattgcggttgtcgagttttttgatggctgcatacccacatcgatgggtgcattcgacgaataaataagcgaggaagccatcatcagttcgctgtggcatgcgcatagcgttgtcgggcgaacggggcagaccacgtggtcgttgcgtgacctggccgatcgagccggcatcgcattgcccctggcgtagtggcgaggtggcgcagtaacgagtcacgccatcgcgagccgatgatgcgaaatgcggaaccggtcgcggccatcaacggctatcatacatgcggaagcaacgatacgttggcgtcagcacatccatctgactccagaaagggacacgatatgaccacatcctccgtttcgccggtgaccactgaactggcgggcagcgaaaccggcatcacgcttatcattcacgccggagcgggcagtcgtggcaagcgcagcacgcctgaacgcatcgcccaggtcgaacttgatctgcagcgcgccctcgatgccggataccagttgttggaatccggagcgccggcgcatgaggctgtggtcgccgccatccacgtcatggaagacgctcccgaattcaacgccggccgtggtgccgccctgaccagcgatggcatcgcccagatggacgcctgcctgatgaccggcgatggcgaggtcggtgcggtcaccggcgtaagcaccgtgaagaacccgatcgatgcggcgcgtgccgtcaaagagcagaccaagcatgtgctgttcgcggacccgaccgatgccgagatcgccgattggggcgtcgcgaccgaaagcaacgagtacttcatcaccgaacagcgtcgtcagtccttggccgaggctcagtccggtggcgatgagtgggagaagcatggcaccatcggcgccgtggcgcgcgatgccgaaggcaatatcgccgccggcacgtccactggcggcatcaccaaccagatgcacggtcgtgtgggcgattcgccgctgcccggttgcggcacgttcgccaaccagtccacggtggcggtgtcctgcaccggcatcggcgaggcgttcatcaaggtggtcgccgcccatcaggtgtcggatcgtgtgcgtttcgccggcgagaacgtcgaggatgccgcgacggccactttggacgaagtcgccgcgcatcatggcgatggtggcatgatcgttctgccggcggtcggccgtggcgtggtcgcctacaacagcgagatgatgaacttcggataccgtagcgcgcaaggcggtaaggtgcagggctgattgcccccctgtattgcggcatatatcataatggccggtgtgctgcggattcttggtaaggaatccgcagcacaccggccattcatgtatgcggcaagtgccgccgatcagtgcggcagtgcgcgctacttggtgatcgtgttgtacgtgggcatgttcgtgtaatcgaactgcacgttcttcacgttctgtgcagacacggcggcgaaacgtttgaccgggaatactggggtaatacgcaacttcatcgctcctcttcctcgaatgaaactatgttccattggtatgagccagccacgtacggtattcgtgtctggcctgccacacaatgatgcagccgtatatacgggcacagcattgcgcggcaccggtccaaaaactcatgtccgccagcgcaacgcgactacgtaccttatgccggtctgcgcgtagaatggaacggctgcgatattgggttattcacggaggaatggatgcgacgctggctgatcaatgtagccaaaaatgagacgattctcatcgtcgccgcaatactcgccctgatttcgtgtttcattgtgccgccggacgccgattacaaaagctacattcacgccagcaccatcagccagctcatctgcctgatgattgtggtgtgcggattccagcgtatcggcgtgttccgcatcatcggttcgcgattgctggagaaggtcagcaccatgcgcggactggtcattacgcttgtcgctttgacgttcttttccgcgatgttcatcaccaatgacgttgcgctggtcacgtttgtgccgttcgcggtggccgtgctcatcatggctgggcaagaggataagaccatcctcgtggtcacgctgatgaccattggcgcgaacgtgggcagtatgctcaccccgatcggcaacgcgcacaacctgtatctcaaagccctgaccggcatgccgaccatggaattcctcggcatcatggcaccgtattccggcacggcggccgtgttgctggtcatcgtgatttccgtggtgtttggcggcaaaccggtcggcgacctgggcgacctcgaaaccggcgtgctggctcccgagcgcaacaaacaccagcccgacgagatttgtatcaccggctacggcgccggttatggcggctggcgcaccatcgtctactcgctgctgttcatcgtctgcctactggccgtctccgacgtgattcccctgtgggtgatgtgcgtgatcgtggtcgtcgtgttcctgttcaccgatcggcgcgtattcaaatacgtggattggggactgccgctcaccttctgcatgttcttcatcttcatcggcaacatgaagcgcgtgcccgaattctacgaactggcgcgctcgctggtcggcggccatccgctggaggtggcggtcggctccagccaggtcatcagcaatgtgcccaccacgattctgctttccggcttctgcgaccaatggcgcgatctgatcattggcaccaatttgggcggcatgggtacgctcatcgcctcgatggcctcgcttatttcttacaagaacgtcgtgcgccaatacccgcacaagaaaggccggtatctggccgtctactccgccgtcaacgttctgtttttggccgtattgctgaccttgagctggatcatcgagccgagtctctgagccgccgttgtgggttgggccgatctaccgcgcgtatacggtgggggagccggtcagtcggctcatggccgactgcgggatgtcgtggatgcggccgatggtggcatccagcgtggatacgccggatacgccgtctgtgttggctgtggtggatgcagaggtgatgctggatactccgactgcggacgatgatacggccgcaaccatcggctgacgataggcgttggagttgcgggccagccgggcgagcgcagggcgctgcctgcggaacagattgataaacataccgcatactccttcatcgttggccggcggtcttctggccgccgtggtttccatcctgccctcccgtgcttgtattcgctatgggggatagcccctattattccctgaatctgcacgattccccctcatccttgagggtgattctaacggcaaaggaatcggcctaatggccgatgccaatcagcgcgaagccaccagcgtgacgctgtacggcttgatcttcatcgccagcaatgaagacggcgacggcaatgtgtaagcccgacgttccggcacaatcgcccccgaagcctcgccgcggtatccgatagtggttttcgccgtcggactggcgcttaacgtcgtcacctccaaacgcaccggtcgcgatggcgaggtgcccagcccggccagtccgcgcgcgatttccaacgtcacatccaccggggaatcggaggtattgacgattttgatgtaacggcaggcgtcatccccgtcatgcccggtggcactgacatacagatgtttggcggggcgtgacgcggtctgctcgatggacacggcatatgtcgtgtcgcccagatgcgtggaaaacagccgctccacctcataattcaccgtggggttcacatgcgccggattgagttcgataagattctgcgcccaccccttagccgggatatgcgcgagcagcggtgcataggaggtcatgcgcaccacgtcggaattgcgctcgcaaccggtcaggaacgcggcctcgccgagtgccgacttccacgtgttcgcgccctgttcggtctgcggttggccggcaaaatagccgttggctgaatattcgccgaaatagacgccggcgccgcaacgcgggtaagcgtcgaatcgtgacgcttggtatgcaaaccattcgggggagtggtaagaatgttcgtcgacgataatcgcgtcaccggtggcggaatcatgtgccccggaatcggttgcggccaacgctcgcgcatggtcccagctgcgtttcatcgtcggctggaaggggaacagtccggcgctcatcacacacagcatatccgggtatcgttcgtgaatggcctcgctgatcatgtcaaacttggccacgtagtcagccccgaagttttcgttgcccacgccgatcatgtccaggccgaacggttctggatggcccatatcgcgtcggaccgcggcccacgagctggactccggatcgccattcgcgaattcgatgaggtccaggtagtcctgaatcacattgttgcggaaagtggccgaattgatatccatgtggcgcggatcgcggccgggcgactggcatgcgatgccggcgaacagagtgggcagcggcttggccttgaggtcctcgcacaggcagaaatactcgtagaagccgatctgatagctctgcgaatagctggaaccatccggcatcttgaacgaccacatcgaatactgttggcgtcgcgcggccagggagccgacggtatccttccagcgatattcattgccgggcgtcacaccttcgacgatgcagccgccggggaatcgcagaaacgctggatgcaacgcctgaatggtttccaccagatcgcggcgcagcttgccgtaacgccatttcgggtcgcccgcgccccaatagtccgcatccatgaactgcaccagatccagatcgaacgtggtgcgttcgccggcgtcaatggtgatacgcagcttgccgtaatcggtgttcaggccggttacgtcggcgttgaaccggtaccagccgtcacggccgatggcgatggcaccatccgacgaatccggactgatcgaaacgccggaatcctgcgcattggcaccatcgtcctgcctcagaccggtctcttccgtatcgtcaagcggatctgcgtccacgatatacgacaatcgagtggtgctggtgagcggcagaccgtacctatcgaccacgccgacggacagcttggcccgcccatgaaccggacgtaccgcgagactgacggaataggtgtggtcggcggcgatggagaacgcgggctcgcccccgttgtcgccgcctccgttatagccgaggttttccagatatgcagggccggtttcggaaggaacatcggacgtgatgcgagcgtatcggctatgtgcgtgaattggcggggcggggcagtcggtggtcacccgctggccgtgaatcccgcgtatctcactgccgaggctggcggcggaacagttgatgaaatcccagaaacgcagggaatcggcctgtgtacaccatcgttcggcgccggccatacgccacgtgtgatggtcgagatagacgccgtcaaaactgtagttgttcaccatgttggcgttcagcccgccatccgcaccatggttgatgtcctcgaagaacacgccgtacagccgcccgcttgtgtgatgggtggggcttcccacgctaatccgcaccatggttttgattgtagagggaatggagcggaaaggtaaacggaagagttcgctcaccgttcatgttgcggtcaatccaagtcgactgttcgccggtatacagccggtaccctcgaaacaggaatggaaaatacggacgactaggagcgcggctgtgcaatcctcggtgggaatacgcgagcgcatcgaccacgtgtatccgtcgctgcgtccggcggagcgcgccgtggcccagtatattcgggatcatatcgaggaggcggccgacctgaccgtcggccagatggccgacatcgcccacgtcagccagccgacggtgattcgtttcgcccgcaagctcggtttcggcggttaccgtgaactgcggtacgtgttgcgccatccggccgccgagcacaaagtgaccttcaatccgttggctggattcgatctgaatccgtgggatggcgaagatgagattcccggcaaagcggcctatggcgcgaaggcgctgatcgatgagctgcacagtgcgttggaccccaaggcctatcgcaaggcggtcgccctactcgccgaatcggagttcatcgatattttcggcgtggagaactcgttgacaccggcgatggatctgttcaccaagctcggctacctgggactgacatgccgtctcaataccgacgcttacctgcagcagatcggtgccgggcacctgccccacggcgctgtggccgtcgccttctcccattcgggcagttcggcggatacggtcaaagcgttgcgattggcgaaatcgcatggcgcgaaaaccatcgccataaccaatgccatcggcgcgccgctggccagctgggccgacgtgacgttgctgacgggtcgtgactcgcacacgatctatggcaatgcgattttctcgcgcgtggccgataccgcgctcgtggacatgctgtacatgggcgtgattctgtccgactacggccgtttctccaccgcgctcgacgaatccggtcgcatgattcgcgatcgcgtattcgagaactgagctgctgctttatcgtgccttgggctgtattgctctggtcgttgccgctttgttgccgctctggtcgttaccgtcctgaggcatgtgccagcgaatacgtagtggacttggcgtgcgtatgacgttcgatcttgccgctcaactccagctggtccaagagctgcgtcatctgatccttgttcaggccaagcgctttctgcatggttttacggctgagcttcacgccgcggaacgcgaggaaattgagcgtgaactgctccaacgtttgaggcgacggttccagcgtcgctgtatcgagcgggcgggtactgacctggtcgtcaccgtccgggcgctcgccgaatccactgccgagaatcagcgtctgcaatggcgcgcagccgatgatgcgtgcgccggccaaagcatctgcggcgttatccgtcatgcgctgaatcgtggggaatgaatacattttggcgcgctgcgcttcgtcagtggtgctgggcgcggcggaagcatcggtatcggtccgatgcaaggatgcggcctcggccgagaccgggatgggcagcaccatcgccaccgaagtggggcctacgcgcagttgcggactgaccgcgctctgcgcgtaggcgtccataatgcgttgaataccggtaccgcagttctcgcagaggcccagatcggcgaacaattcagccaaacgcggggtgcgtggctggcatacgccgttgagcagatcgttgatttccaaaccatcggtcaggccgccgagcgagacgatttccaggcgggaatcgaagatattgatcagtgtggggccggagtacgtgtaatcgcgatgttccagtgcgttgaccaatgcttcgcgcagggctatggccgggtgttggccggattcgttgatgccgttcagcagggcgctggcttggtcgagctggcgcagcaccgagccggtgaatgtgtgacgttcgcgaatggcgtttttgccattgccctcgaaaatggtggccttgataacgaacgggcattggtcggacagcagggtggcaagcgacgattcggtggtgctggtcaaagtgttgttggcgccggtgttgatgatgctgccggcgagggcattgccggcatcggcagagacggatgcagccatgttggtcacaaccgggctttcccaatcccggccttcactggcaaaacgaccctgtgcgtatgtgaaagtgagctcaccactatcgcctgcgacggtctggcccgatgcggcgtgatctacgttgctctccgttgtccccatatcgccgatggtaccggtgcaagccgacgttacgccgaggtgttttacacccctacggctagacttacacgagtttggccccgtagctcagctggatagagcatgtgacttctaatctcaaggtcgacggttcgagcccgtccggggtcacgatgcaataaacccttggtccctcatcgtctgtgggggccaggggcttttgagtattatgccggtctgggtccgtctggagcctgaactgtcgaccttgagatcagcggttatatgcttatcactgccatccgggaacacccttaaggggtgcggctcctgcataacggttatacactgacttgagatgtgctggataataaccagctatcgcgcgtccgccaatggcgacgaacgaaggaagaagggcccgtgccgcgagcaatcatcgaggtaagaaacctacgcaaggaataccccgtcgaggatgagacggtggtggcgcttgaccgtgtcaatctcagtatcccgcaaggccagatctgctgcattttcggcgaatccggctccggcaaatccacgctgctcaaccagttggccggcatggaaaaaccgacgcgcggcggcgtgagaatcggcggcgtacccgtcagcaggctcgacgagcgtgagctggcggccttccgccagaagcatctcggcttcgtattccagtcgtacaacctgttgcccaatctgaccgcgctggaaaacgtggcgatgccgttgatgttccgcggagtgcccaaggagcaacgcgagcgcgcggcgcgtggcgtactcaaacgagtcgggctcggccatcgtctcagccattacccgcgccagatgtcgggcggccaacagcagcgcgtcggcatcgcccgggcgtttgtgaccaagcccgaggtggtgttcgccgatgagccgaccggcaaccttgactccaaaaccaaaaccgaggtcatgacgatgatctgcgcattcgcccatgacttcaaccagaccatcgtgctggtcacacacgatccgcagatggcctcatacgccgaccgcattgtcaccttgctcgatggccgcatcaccagcgatcggctcaacaccgacctttcccgcccaactgttccgtccacgccgtccgccccaaccacaccaactacaccgtccacgccgtccgcccatagaacccaaggaactgaccgatgaagcacctctcccaccacaccatcgccatcatcgtcgcgttgctctccacgctgtcactggcacttgccgtcatctcccttccgcatcaggcgtacgcggtcgacggcacagacggcacaagcggcacgaacagtacgtctcagggaagcgacggcgattccgcgccgatcgccggaccggtgcccaacatcatcatcaccaacttcgcgtatggaggtgattccgtggccgccggatccaaattcaatctcgacttcaccttccagaacaaggggcaggtggcggtgacgaacatggtcgtcaccgtggacggcggcgagagcttcgccatcgcgggaggcacgaacacgttctacgtcgacgcgctgtgggccggttacgccatgacgcaaagcgtgccgatgcaggcgctcgcctccgcgaaaagcggtgcccagtccgtgaccgtgaacttccgatacgagtatgtggacgccagcgcccgctcctcaagccagtccgacgtcaagatttccgtgccgatcagtcagcctgaccggttcgaaatcagtgatcccgtagtgcccgaccaggtgatcgccggccaggaaaacacggtcacgatggaatatgtgaacaagggcaaaggcgatatcgccaacgtcgaggccacgatggagggcgaaggtttcgatgccacgatgaaaacccagtacgtgggcaatgtggcttccggcgccaccggcacgattggttacgccttcacaccgcacgcgtcaggcgagctgaagaccacgctcaaagtcacgtacgaggattccgacggacagaccaagaccaaggaattcccgctcaccatacccgtaaccgatatgcagccgatggatgattccggcatggccgatccgaacatggaccagaacgccaatcagggattgccggtgctggtgtatgtggtcatcgtcgtgatcgccgtggtcattatcgtggtgattgtgctgctggtgcgtcgccggcgcaagcagaaggccaagaagaacgatattgatgaggactgggatgattggtccgaaggcaaggatgataagaccgataccggcgtgacggatggtgctgcggcagacaccgctcctatcacaccagtcaccccagcctcatcagtcgcaccagccggctcatcccacaaggcctgaaaggcccgaccatgcgattcggcgacatactgcggctctgcagacaaaacctatggcggcgtaaatcccgtacgattctgaccgtgctgggcgttatcgtcggctgctgctcgattgtgctcatggtctctttgggccaaggcattaacgagcagaacgagaagatgttcaaatcgatgggcgatctgtccatcgtcaccgtgtacaccaacggttatgccggtccgatgggcggtggcggttcgtccgagatgggcgataccaagcttgacgacaaggccgtggaatccttccgcgcgatgagcggcgtatccggcgtgacgccgatgatgaacttcccttataacgtgacggccagagccggcgcgggcggccgttacatctatgattacgtgcagatcatgggcatcgacatgacccagctcgaccagatgggctacaagctcgtcggtggcgagaaaccggtcaaaaaagaccaggtgcttgccggcgaatggttcgcctatggtttcatggacaccctgaagaacggcgaacaacgcaccagcacacgtggcggtcagtattcctcatgcacgtttaaccaggccaccggccagtgcgaggaagatcaggacgaagatccgttcttcgacccgctcaccacgcaaatcagtctgaccaccggcaccaattatcagggcgaccagtacagcatgaacatgtacggcggcggtggcggcggcacaggcggcgcgggcggcgcaagcggcagcgccgcgggtcagtcggaaaacgtcaccctcgatgtgcgggcttccggcattgtggcgggcgactacaacaagggctatgccacctccgacggtctggtcatggatttgcaggcgttgaaggaactggccgccaaagtcgatccagccgccgccaaaaaagccaccgcctatgatcaagtgctggtcaaggccgccgacctcaagtccgtgcccgaagtcgaatcacagatcaaagcgttgggctacgagacctcctcctatgaagacatgcgtaagtcgttggaagaacagtcgcgcgcgattcagctgattctgggcggtatcggtgcggtttcgctgttggttgcggccatcggcatcgccaacacaatggttatgtccgtaaccgagcgcacgcgcgagatcggcattatgaaggcgcttggctgctacgttcgtgacattcgcgtcatgtttcttgcggaggccggcgcgatcggattcttcggcggattgatcggctgcgtgctgagcggactgatatcgctgggcatcaacgttgtcggcgcgttgtatgcgggcggcatgagcggcggcatgtctggcggtatggtcagcggtgccggcgggggctccggcgaccataccggtggcggaacatctatctggaccatactctggcaggcgatagttggtggcgagaatgtgacccgttattcggtgattccgtggtggctgttcctgttcgccgtgctgttttccacgctgatcggcttgctattcggcttcggcccggccaataaagccgttaaaatcccggccctagacgccatcaaaaacaacgagtgatcgcctctgtcacctgctccaccgttagtccataacgttcgttcagttcgcccagcgacacgcggtcggtaaattccttggctgcgccgaagttcagcacacgaggattacggctgccgtccgagacatgatgattcgcatagtatgcggtcactttctcgccccagccgccttcaagctgcccgtcttcaagggtgatgacctgctggtggccatcacgcaacgactccagtacgtctgaatccagcgacgtgcactggcgcgggtcgataaccgttgccgtgatgccataatcgtcagacaatgcggcggccgtctgctccgccaacggatacgcattgcccagtccgatgatcgcgacttgcgagcccgtctgattgacccgccaatccagcatgtgacgcgcaccggcatgctgagccgttacgctaacggtcccgcggactgttgcggcagatatgcccccgctggcggagctggcggaggctggcagcgaagctgactgggggcggtcagcaatctgcccacccgtcaccggcagcagcgtcgcatcccgttccgccgccagaatcgcctcgcccggcacccgaatcaccgccggaccagcaggggcgtccgccgaaccggccggcgcggtagcccacgccaaatcagccagatagtcgcgagccgaagtcggcaccagcatcgtaacccctggaatattggagaacatcgtcacgtcatatgcgccggaatgcgtattgtccgaaccggacaagccgcccagaaaatcaagtaccgtgactcgcgaacggttcaggctcatctcctggaagaactggtcgtacgcgcgctggaagaaggacgccgtggtggccaccaccggcgtgccacccgcccgtgcgatgccggcagcgtacgccacggcatgcgattcggtgatgcccgtgtccacataatgtgcgcccgcgcgctctcggaactcatgggtgatgccgttggagcccggcgtggcgggggagatgaccacgagtcctggctcggtggcgaaacgcggttcgagcgcggccatcgccattttgccgtaatgcttgcgcggatcgtccggcttgccgattgcggcatccggattctgccaatgcgaggcctcgcactggccttcatgcggttcgtgatcggacaggttgcagtgatccgaatgccacggctcgctgtggttcacgttatcggtggggtgcacgccggtgtcggagactgccggatccagctcatggacgttaccggccgaggccgagggtgcgccggccacgtaatcggcgccgtcgtatcccgcgcccttcagcgtgtggatatggaccaccaccggatggtcgatattgcgcacttcctcgaaagccgcgaccagagcggaaacatcgttgccggccgccacataccgataatccaagccaaacgcgttgaacagattcggctgggcggtgccgccggacgcgcgcaggcgggcgagcggaccgtacatgccaccgaaatcgccggcgatcgacatctcgttgtcgttgaacacgatgatgaggttgccgccttgctcggccgcgttgttcagcccctcgaacgccacgccagaactgagcgaaccgtccccgatcacggcgaccacattgccgatgccgctgcccggcccctccatgtcgcgggttttcgccaggccgcaggccaaggagatcgaagtgccggtgtggccgagcacgaactggtcgtgttcgctttcgtcggggttggtgaagccggtcacctcgccgaaacggtccgggtccagataggcgtcggcgcggcccgtgagcatcttatgcacgtagctttggtgggacacgtcgaacacgatacggtcgcacggcgagtcgaatacgcgatgcagggccaccgtggcctccaccatgcccagattggagccgatatgaccgccgtgttggtggccatatgccagcagtgtggcgcgaatctcgcggcacagttcggcgagctcgttgggagcaagggccttgacatcggccgggctggcaatgcggctcagcagatgggagtcgtcgccatgggaaggggtaatgctcggggggatgtcgtgaaggcgcgcggccccctcggcggcaccggagacggcgaaggaatcgcttgaatcaaatccgtttcctgacgcgttgcgcataccctcgaatctcccttcgctagtctttccgaagttgaatgctaacgcccggcattgtccgaggtccacatgacgaatcaatgcccccaacatctccgtaaatgggtgattcgttcgctgcgcgatgtgggacaatgaatgcggtaattccttttgataccaaggagcgcgcaatgaaggccgtatacgcatccaccgtcaaccatgacgatccgcttgccgcgttggcggtgggcgagcagcccgaaccccaggcccgcccgttctggtcgaccgtttcggtgcgcgcggtgaccgtaaaccatcacgacgtctggtcgctacagggtgtgggtctcgccgccgaacagacgccgatgatccttggcaccgatgccgtgggcattctggacgaggacatccccggcaagcatgggctcaaggccggcagcgaagtggtgctgtacacgttcgtcggcaccgatggggcgggcgtggccccgggcgagcgccgtacgatcctctccgagaaataccccggcacgatggccgagaaaactgccgtgccgtccgccaacgtgttcgccaagcccgcaaaccttaccacggccgaggcggccgcactcggcaccagctggctgaccgcctactcgctgctgttcgaggccgccagcatcaagccgggcgactccgtgctcatccagggcgcgggcggcggcgtgtccactgcggccatccagctcgcccatgccgccggtctggaggtgttcgtcacctcgcgtgacgcggacaagcgcgccaaagcgctgaaacttggcgcgaacgccgcgctggagaccggtgcgcggttgccgcgcaaggtcgatgcggtgatcgagtccgtgggtgcggctacctggagccattcaatgaaatccgtgcgccccggcggcaccatcgccatctgcggcgccaccaccggcgaccagcccggcgccgaactgacccggttgttcttccaggacatccgcgtgcagggctgcacgatgggttcgcgcgaggatttcgcacgattgctgcgcttcgtggagcacgccgacctgcatccggtgatcgattccgtggtcagcgggttggacgccgcccccgaggcgttcgccaggatgatcgccggcgacatgttcggcaagatcgttattgagctgtaagcctcacagaattatgtattgagaacgattcgctgcgtggcttaactccgctatcaggagtacagtgggccttattctcaataactagggagtaaatgataatggcaaatgaatccaagcccgaagtcgcagtggtcatgggatcctccagcgactgggagaccatgaagcgcgcctgcgatattctcgaccagttcggcgtcgcctaccacaagcaggtcatctccgcgcaccgcacgcccgagctcatggccgagttcgcgcacaacgcccgcgccaatggcctgaaggtcattatcgccggtgccggcggtgccgcccacctgccgggcatgatcgccgcgcagaccacactgcccgtaatcggcgtgcccgtgcgctcccacgccctgtccggctgggattcgctgctgtccatcgtgcagatgcccggcggcattccggtggccaccaccgccgtcggcaactccggtgccaccaacgccggcctgctcgccgtgcagatgctctccgccttcgagcccgaactggccgacaagcttgaggattaccgtaacgaactgaaagaaaaggtggctgaatccaatgcccagcttgtctgaggaaacaggcggtcgtgtttcgatgctgatgccgggatcgaccatcggcatcatcggcggcggccagctcggccgcatgatggctttgtccgcccgctacatgggcttccgcgtcggcgtgcttgacccgacgccgaactgcccgaccggtcaggtggccgacttccagatcaccgccgaatacgatgacaaaaccgccatccatgatctggccgtgcagtccgacgtgctcacctacgagttcgagaacgtggacgccgatgccatcgacgaggtgcgcggcatcaccgccaccccgcagggcactgacttgctgcgcgtgacccagcaccgcgtgcacgagaagcggttcatcaacgaccacggcaccgccaccgcaccgtggcgcgccgtcaacaacttcgatgagcttgacgccgcattggatgatattcattatccggccgtgctgaagaccgtgtccggcggctacgacggccacggtcagctcgtgctgcgttccgacgccgacttggagaagatccgctcccgttccgaccgtggtggcggcttcccgccgagcatcctggaaggcttcgtcgacttcgcattcgaggcttcgatcctggtctccggcaacggcaaggacttcgtcaccttccccatcgtgcgtaacgagcaccgcaacaacatcctgcacatgaccatcgcccccgccgaagtgtccgaacatgtggctcgcgaagcgcatgaactggcgattcgcttggccaagggcttcgaactggctggcacgctggccatcgaactgttcatcaccaaggacgatcaggtcatcgtcaacgagctcgccccgcgcccgcacaactccggccactacaccatcgaggcctgctcgatggaccagttcgacgcccacatccgcggcatcgccggctggcccatgcccaagcccaagctgctctcgccggccgtgatggtcaacgtactcggccagcatgtggagccgacgcgcgcgctgatcgccacccacccggagtggaatgtgcacgactacggcaaggccgaagtgcgccacgaccgcaagatgggccacatcaccgtgctcaccgacaaccctgatgccacggttgctgaccttgaggccaccggctgctgggacgacctgaaaaagaaggcgtgaccttatcgatggttgaacatatcgaacgccagaccaagcagaaggacgcgattcgcgccgccttggccgactgtgaggagttcatctccgctcaggacctgcaccgcaggctggaggacgaaggctcgaaaatcggcttggccaccgtgtaccgccagctcaacgccttggccgatgccggtgccgccgacacgatccgcctggacggccagcagctgttccgcctatgcggcgacgacggacatcaccaccacttggtgtgcaagcggtgcggcaaaaccgtggaaatcgatccgcccagcgaggcttggctgcgcaaagtggccgacggccacggcttcaccgtcgaatcccacaccctggaggtcttcggactatgccctgattgccaaaaggagcagaaagcgcagaaggctcagaaagcagtgagcgaataattgaatgggatcggcttcaaagccgatcccatttgctattccgctgctattccaccgacttcagggcgccgagcatgtcgaccgtcttcaaccgccggtagaccagcacgccgagtccgccgagcaccttgatggtcggcagttcgcggatacgttcggagacgttgagattcgtcagattgtagaggatcaccacggccagcagctcagccgcgagaatcagcacttccatgatctgatccggcaagtcgacgattgtggccacctgtttcttcgaagtcgtgttctgcacaatgcccttcgcgccgtccaactttatgagcttggcgctacgcgactccacattggaggtctcatggttcttgagcctcaccatataggtgttcgactggtactgttcgccgaacacgtgcttatagccacccgaagtcatgaacatgaaatgcccgatatgcatttcggtgatgccgtccacgcgcaccttgcgctcggtaccgctcgaatcggtgacggcaatcgtgtcgcctaccttggcgtccatcatccccgccatacgttcggagatgatcgcaccacggtcggtgagcacctgcggcttgtgcccggtgcgcgaacgcagggtgatgtagtcgccgaaattgtaggcgtcatcagtggcgatcagggtaatcgactgtttgtcgttctccttgccggccactttcgacatctcctcgtagtagatcggcgcggactcggagacggccccgcccctcatcgccttggccacttcggcgcgctgcgaataatgttttcgtcagctttggtcaggccataatcgctgatgacggttatgtcagcgagattgttctgattaaagaagtcggtgccggttatttgcatgtccgggccggtgacgaacaggcctacgagcgcaaaggagccaagcgtcatcaggctcacgatggaggcgaatcgacccttggatttggccatggtgacgcgggtgtctttccatagcatgcgcttatggaatgacccgttgcgtcggcggttgcgcttggccttgtgcgcgtggggcgttctgccggacgcggtataggagtcgtttgctgaatttgcggcggaatcggctgcggagtcggtcgcgggcgtaaggttggtcgtttcggtgaaatcattgagatcggtcatactgcttaccactccagatccttgatatccatcgggtgctcgttcacttcgatcgatttgacgcgcgcgtcatgcatgtggatcacacggtcggcaatcggcgcgatggcggaattgtgcgtcacaatgaccacggtcgcacccttcttacggctctgatcctgcagaatctgcagcacctgcttgccggtgttgtagtccagagcgccagtcggctcgtcgcacagcagaatcttcgggttcgtggccaccgctcgggcgatggccgcgcgccgctgtccgccgcccgaaagctgcgcggggaagttgttgatacggtcctgaagccccacgtcgataagcgcttgggtcggttcctgcgcgtctttcatgatttcggaggcgagctccacgttctccttggccgtgaggttggccaccagattgtaggactggaacacgaagccgaggcgttgcgctttgtcaagcgtgagtatgcgttcttcgacgcactgtcccgttcgggcaacgatatgcagatgtatgaccgggtcaaggatgtgttgaagcagatgctgcttgggcaggcggcccgtgtgggtgccgagctgagctacggcggcattccgcgcgcctatgcgctggaaattctggtctccgccgtctcatcgattatctggctatgggtccggcgcggctgcaaggaggcgcccgagcaaatctgcgccatcatcgagaaaaacaaaaccaccgcgcccgtagacatcatacggtaagcgcggtggttcgtgtcggaatctgactcccctccctgagaggagtcaatccgcaggagaaatcggaaacctaaaactcagacagccagctcggccttgagttccttgaggtcggccaggatctcatcgtggcacttctcgttggtgtcgaaggcaaggtggcagaaggcgcactcgtggccttcgcggttctcgtggcaagcgtgcaggcaagccttgcccccgcactcttcggtgtggttgtgctcgcagccggtgtcgtcacagcagtcgccggtgaagcagcagccgcagcggccacaggcggccacgccgtgctcgtgcttggtggcgtcgaacttggccagcgtgtccttgcagacggcgaaggtgccctcttcggtaacgatctcgtaagcatgctcatcgatggtcttgatagtcattgttgttcctttcagcgtttgttcgtctgcgactgtagggcggcagacggcagcggcgaaagttggtgaaagtgattatcaggcccattgctgctattaagagcaatgagacctcatgcagttttgtgtcggtaacgggccgattgttggccgagtgtcgacgcctggtataggtggtggcggtaccaatccaaatattggtggaacgacgacgatgagcgtgtctggcgtcggtgctgcgccaagcgttggcaatctaacgatgcgagtggagcttatatcgtcgctattgcgccaaggattggaagggcaccgatgctgaaggccagtagcgtcgggactgcgccattatttgttcgagcgccgacggccagtatcgtctggcgtcgtcagtggtccatcctttggtgaggtgccgacgctgagaggcggttcgatggcatgcttcgccgcacacttggggcacaggtcgaaaatctccagttcgtgggcgatggtctggtacttcaactgcttggtggctttgtcgatccactgctcaaatccgggaatctcgatttcgatggtccgcccgcattcgtggcatacgatgtgatggtggtgatgctggtccgagcactcgcggtagagggcctcgccgttgacgtggattacgtcgagctcgccttgggaggccatcatctgcacattgcggtaggcggtggccgtgccgatgcgcgtgccgcgctcgcgcaggatgtcggtgatttcctgggccgtggcgaatcgggatagttccgccaggacctgggtgatgaggagtcggggtcgcgtcacgcgccgagtggtcgcggtttgctcgatgctcatgacgttttgcccctttctgttaacaaatgatattcattatcgttattaaagcaaatcagatgcccggcatgttgtcacatgatttgaatcaactggcagaaatcccgcgtttcaacgaggcctgcgcgggatttctgccagttttgagccctataaaggcagagcccccgcgtacctttcgttgtaacgcgggatttctgccgatatggggcgagtcatggcgcagcgcagtgctttccatttcgggagacgcgtcatttactgccagtagaagtagccggtcggggcggctgcggctttgctggccgaccggacctgcagtatcaggccttggcgctcgtggccggcggagccgtaggcgccctgcttgatgacggcgtcgacggtgacccagtcgtgattatgcggggtgccggccttgccggagctggctatgaacccgaatggggtcatgtcgagaatgcagcaggacatgaactggcgggacagctcgaactcgtccgcgtcgaacgtacgcgacttgctcacaaacccggtgacctgcacatggtaaccgacgtaacgctgcggattatggtcgatctgctcgaaccatgagccgaattcgtcgtcgctgatggtcagggtcttgtttgtcgtgtcgagtccgtgcagctgcgaggcgccatcaggcttgtgcgagctgcggggaatggcgatagcgcggccgccggcgtactcgtcgaagccgccgctgccgctgctgggctggaacggcacgacgatcagcagcgccggaataatcaaggcgatcaggaaccgcaaaaccgaacgctccgtggcgtggaacagtccgagccatgctgcggtcgccagcacgaacagcagtgccgcaccgatgatgagatacggcagcgaacgcggcgtggtcagcgtggtgtatgatccgcccaccgccgcataggcgatggccgcgcccagcgccgcgaaacacagcgcctccacgcggtcggggagtgtgactttgcgcttcatggctacgctcccatcaccagatgggcggcaatcgcggcgaggaagcaggccgccgccacggtcgcgatgaaccggatgatgaaccgtggccggcattccgtggccagcatcagcgtgttcttgaggtcgagcatcgggccgaagaccaggaaggcaagcatggcggagaccggcagcgcgccaatcatgctggcggcgatcaccgcatcggacgtagagcacagcgaacacaggaacgccagtcccatcgccgccagaatcagtacgatggcaccggcgtcatcgagcgtgcttgaaccgttggtcaacgacgacaatgcggtgcgcatgatggaggcaatgatcgtgccgaacagcagaatcggcatcatccgcataaagtcgtcatgcgtatgccgaatgaaatgcgtgaaccgctccaatccacgccccgtgccccgccggcggggctgtcgacaaagcccgactggggggtggctctcaggcgaatcacccgtcgcccctgcacaatcctcgcaaaccaacgaccgcccaatcgtcagcggcctctcacgcaccgcaggggagcggagcggccacaccgcgaacgacacccccgcgactatcgccactaccatgcccaaccccatgcgggccgccaccatccatggtttgtcggtgaatgcgaaccatgtggaccatatcgccatcgggttcatcaccggcaccgcgcacagaaacgtcaccgcacacggcagcggcaggcgtttgcgcatcagattcgcgaacgtgggcaccaccatgcaatcgcacaccggtaggcacaggccggccgccaatgccgcggccagtccgccggccaacgatttcggtatgtggcgggccagagaatcggtgctgacgaacgtgctgaccacggccgacatcatcgcgcccagcagcatgaacggaatcgcctgcaggataagccccgcggcaccggtgccgatacgcaccagcggaaccggaaacccacgcgactcgagcatcgcggaagccgcaatcaggaacgccaccagcggcgtgccgataatcagaaacagatagttcgccgaatggtcctgttgcgcggtgttcacctgttccgtgcgctgcgtgcgaggttctttcatgcgaatatcacctgccatatcgccgtcatattagcaccgtacgcatgatagtggtcgagataatatgcgagttccccgcataccgatggtacacatcgatatgcggggaactttgcacatggttgcctgggccgatggcgaatcggtgggccagcatctcggtggccacttcctccttgctcatggatgccgggtaatacgtgggccagttgtccatttccttgaggatttcttcctgtcgttgaagtgacgttgcacggtggcggcggtggcagaaccggccccggccttgtccgcgtagacggcgttgatggcttcggcggccttcttcgccctcggcgtggtcgtgggaatgctcgtgctcgtcggtggcggtgacgcccatgaggccgcccacgttcacgatggtctggcgtttcttgtcaagctgcgccttttccgcccagccgtcgtagccggcgccgttgagcaccacgatgtctgccttggcgagcttggccagatcggatgcggtggcctcataaaacggcggttcgccccggcaggtgacggcatacggaaggaaatgggagaaagaacgtacgccgccggcctgtggagcggaccgtcgagttgttgttacgagacttgatggattgcggaatccacgatgttggttatggcttcatatacccctttcgtacggctgcggccagattctgcggaacctgaaccacttcgccttcaggcgttctgaccgtggccagctgaggcaccttggccttccagttggctcggcgcgaatgcgtgtttgctcgggacgccttgtacttgggcagtgccatcagccttgcctcgccttccagtgggggttcttcttgttgattacatacagatggccgcgccggcggacgacataggagccatccttgcgggccaatgagcggaccgatgccttgaccttcatgtccgttcctttcttcttgtcttacggtctttgcggaatgtgcggcgaatcacttgcgcccgtaacgagcgttgaacttctgcacctgaccggcggcgtcgatcaccacattcttgccggtgtagaacgggtggctgtagctggacacctccacattgacgagcgggtaggtgttgccgtcctcccagtcgatggtcggcaggtttacggccttggccaccagtgtggacttggtgaggaagtacttgtcggcggagcggtcatagaagaccacggggccgtattcggggtggatgccctcttgcatggttatggacctttggctgtgtggtgttgtgtggtgatatggatgagaatggcgtcggacgcgcgggtggaatccggtgaattgagatggcctgagacggcctgacggccggttgtgccggcccgatcaccagctggatttcaccacgccgggcagtttgcccttgtgtgccttctcacgcagattgatacgtgacaggccgaacttgcggttgtaggcgcgcgggcggccgtcgatggaatcgcggttgcgcagacgggtggggctggcgtcgcgggggagggcctgcagcttgcgcatcgcctcggcgcgttcttcggtggtcagatgagggttgacgctgtcgcgcttgtgttcggcgcggcgttcggcatacttggcgaccatgcgttcgcgctgcaattgtcggttgatcttactggttttggccatgtccggctccttgataaggctccggggcgcgggaatcgcgccggccggagctgggacgagtgcattcgttcattgggcgcatgccgcaaggttcggaagatgagttcatgaaatggtgatagaggaaaccgccggaatgccaacgaggaaacgatttcggcgggtgcttaagcctcttcctcgcctcgcgactggtgtccaatgaacgaacagatggattagcgggtctctcggaagagcacccgtttgcggactaccggatcgaacttggtgagctcaagacggtccggcgtattacgacgattcttggtggtggtgtaggtgaatccggtgccggccgtggacttcagggtgatgaccgggcggattgcggaggatttgcttgccatgagtggtgctttctatgtgtgggtgtcacgctgttatgtcacgtatgtcgcgtacgtcgcggtgccatgtgggtgatgcagctcgttagcgcggtttgttgcgcggttacgcgccggcacagtggcgggcctactgactgcccgagcatgggggtgatgccgtggccggttcagttgacgttctgatcgcggcggatgcgggcgatcgccgcctcgatgccgatgcggtcgatggtcttgatgcccttggcgctcacggtaagcgtgacgtgccgctgcaaggacggcacccagtaccgcttggactgcaggttcggggcgaaggttcggcgtgttttcctgtgcgagtgggagacgcggttgccgaccccggcgcgtgttcccagaatttgacatgttttggacatgcctgcaactatatcataatgataaccattatcaaattagaaaggctgtcatgattcatccggcattgcaatcacagggaaacgcggaggggcgcacgcccgtggtgctgctcaccggcgccgaccgcctgagcctggactccgtggcgttctcgttgatcgattccttcccgtccgtatgctcgattgcttatgacgtgcgcccgaacgaagccgtggaatccggtctcgatatcgtgcgcaacgtcgcgaagccccaggcaagcggggtggtgttcggcgagtccgattcgttcgggctcgaggggtgctgcatgagctgcacggtcaaacatgaccttgaacggacgctcggatcgctgcaagggcgggccggcgcgtttctggtctcgctgcctgtgggccttgaggccacgccggtcgcgcagtatctggccgattccttccgtctcaacgagtggggtgagtcgatgttcgtgggtgcggtggccaatgccgtaggccttgacgaattcgaagagcgattctttgacgacgaccgtttgtgcctgtacggcatgggcgaggagaacggcgtctatgacgagcgttcgaccggcgtagtggtctcccgcctgatccgtgaggcctcgtgcgtgctcgaattgccggtcattggtgccggttgcctggcacgccatttggatacagacggggagtgcgcctgccgcgacatcatccgtgcaatcgccttgcgtgatgcgctggtctgtgaggatgcccacaccgtggggctcgtcgacctggtgcaggcgtcggtctgtgccgcgatgccgttgtgacatgtgcggcaaacggcagaacccccgcgtccgaacgaaggtggcgcgggatttctgtcgtttccgaggccttaaatggcagaacccccgcgcgggtatcgttcggacgcggggatactgccgtttcgtctgccgaaaacggcgggatcccgcgttgtcatcgtcggggcgcgggatttccgccggcagcgcgggtgtgcgcgtgcaacacaccgacgtaaatgcaaatgataataattctcaatacatgttattctgtcgtgttgggggccgggcgatgatgcagcaacagcagcatcgcccggccaaacagccgaattagagaggaaaatccaatcatgtccatcatgtccaacgccaagcgcgcgctcgccatcgcggccgccgcggcgaccctgttctcgatggccgcctgcggttccagcaatgccgccggcaacaagtccgattccagcagcgccgcgtcttccggcaagatcgaggtcgtcgcctccatcaaccagtggggttccgtggccgaagacctcggcggcagcaacgtcgaagtcaccaacatcatgaccaagaccaacgttgaggcgcacgattacgagcccaccagccaggatgttgccaagttcggcactgccaaggtggccgtggtcaacggcgccgattacgacccgtgggccaccaaggccgcccagtcgaccaaggccacgctggtcaccgccgccgaaaccgccggcatcaaggaaggcgacaacccgcacgtctggttctccgccaaggtgcgttccaacgctgccgacgccatcaccgccgcctaccagaaggccgacccgagtcacaaggacgactacgccaagctcaacaaagaatggcacgccaaggaagaccagcttgagtccaagatcaaggagacttccgccaagaccgagaacctgccgtacgccgccaccgaatccgtggcctggcacttggccgacgacctcaagatgaccgacgccaccccgaagggctacgcccaggcttccgccaacgagagcgagccgaccccggccgacatcaaggacttccaggacaccctgaagggcggctccatcaagatgctcgtcttcaacagccaggaagccaactccaccaccgaccagatcaccggtgccgccaaggacgtcaacgtgccgatcgtggagctcaccgagcagatgccgaagcagtacaccaacctgctcgactggatgagcgcactggtcgaccagttcgccgccgccgtgaagtaatgcggcggtagccggcaatccgcaacagcaataaggggaataatcaagtcagatagcgaggcgttgcctaggggagaacagaacgcttcgctatcagggaaggctccttatatatcagggtgcttcggggatgtcccgaggcaccctttgcgttagggtgaatagttaggaaacggtaagaaaaatagtggaactatggattttccaaggttcagcggcaacaatatgcccttgaaaagtcacatacggaaacaggcgaatgagcgagaacactagtagtatcaccacagtgaaaccccatttcaagctttgggtcaaaaaagccgaagccaatgaagtcacgccccagcacccccacaagcccttccccggctgggcgtacggcgtgctcttcgttatcttcgacattattgttgtgacggcgctcgaagtgggcgtttcgtccagctccacccgtgtgcaactgtccagtccgaccgtcggattcggcttcgtgagcaagatgtggaccgacggcaatttcgtattcgtactcaacgtgatacttgtcgcgttgctgtacctcatgttgctgatgctgttcaacagattctggacggcaagcatcgtgattcttgcggtcggaatcatcgtggccgccatcgaacatttcaaggtcgagatccgttacgaggccattctgcccgccgacctcggcttccttggctcgaacaccggcaatatgctcaccttcattccggccggcgcgcacgtgaccatcctcgtggcacttggcgcgttcgccgcgctgctcgccctgattctggtgctgcgccacttcgacgggcgcaaaggtcgcatgatccgtacggacaacctgagcctgaacctcacctcccgtctgattctgctgctgctgccgattctggtgttcgcgttgtactgcattcatgtgagcaccaccgattcgctggccaacaagttctcccgcgccttgggggacacgccatccatgtgggattccgtgtatgacgcgcagcgcaacggtccgctcgtggcctttacccgtcagctcaacccgaagatcatggacaagccgagcaactactccgaggagaccatgaagaaggtcgccgctcgctaccagaaggaagcggagacaatcaacgcctcccgcaccaacaacctcactgattcgacagtggtgtacgtgctgtccgaatccttctccgacccgagccgcgtgccgggactgaagaccaataaggattcgatgcccaacatccgcaagatcaaggcgggcaccacctccggcctgatgctctcctccggctacggcggcggtacggccaacctcgaatacatgggactttccggtctgagcatggccaatttcgattcctccctgtccagcccgtaccagcagctggtcccgagccagcattggacccccaccatcaaccagatgtggggtgcgcccgccaactcgctcggctaccatccgtacgagtccagcatgtactcgcgcgctacgaactacaagaagttcgggttctcgcacttctacacgctgaccggtccggacgtgatcaagtatcaggacaagattgacgagtcgccgtacgtctctgataagtcttcctatgattctgcgctggaaggcatcaggtccggcaagacgaacaagttcattcagatcatcaccatgcagaaccacatgccctaccacgagtggtatgagaacaacgactacaccgctgaatccaccacgggtacgccgctgggtgatgatgaacagcagtcgattgagacctatcaaaagggtgtggagattaccgatcaggccactcaggagttcctgaacgaactggatgcgctggataagcccgtcaccgtagtgttctacggcgatcacttgccgggcatctactcgtccgccagcgaggatggcaacaactccttggccctgcacctgaccgattacttcatctggtcgaataaggcttccagctcccaaggcaataaggcaagcgatgcagcctactcttcgccgaacttcttcgtggcacaggccgccgatcacatgaacgccaaggtcagcccgtatctggcgttcctgaccgaaatgcattccaagattgccgctatggaaccgcctgtggtcaacaaggtccaaggctgggatcgtattcccgaaggccagaacatctatctcgaccaaaacggcaacccgatgtccaccgatgacttcgacaaggaaaccaagcagttgcttgccgactacaagctcatccaatacgacatcaccgccggcaaaaactacctcaaagacacagattttatgacgttgccgtaaagcagacagcccggccgaaccgtaaagcggatagctcagtgggctatccgtaggtgaggggagcggctgtgccgcgacggaaaatccggaggattttcggtctgtaggcaacgtgcgagccgacaggcgagccagcaaaacgcgggcgaagcccgtccaaaattgctgtaccgttgccatagtgctgtgagctccctctgatgagggagctgtcgaacgaagtgagactgagggagagatcccacagaccaatcactcccgccttacaataaagccatgaagcgcatcgatgtgaatcatggctggcggttccgttcaattggcaaggaccgcgatacggcagcgcggcagccagtcacgctcccgcacgatgcgatgattcacgagtcgcgcgaccctcgcgggccgcacctcgcgattcatcgaacgaggacatgacggcgtggccagctggtcatgggcgggctatgagggccgcgacgccatcgtgcatgtcaccgatgaccgccgcattgtggttgatgcaggcgggcatatcgccgtcggaccttctgccgaagctgtggatgtggaggtacaagtggactctgtggccgcacaacacgacctgcctgccaatgccgaactgctcggcgtggccagcgccaatcccatcaccgtcgatgaactcgccgacaatacctgcaccacctacttcggccgagcccaagctatttggcgaataccagccgaaacgtctggtattgcctgcagcacaaacgccctcatgccatcgtcatgacggtacgataggtacagtcgatgcccggaaaaccgacccgggcatcctgcgggaaggatgtgccatggtcaatgcggatttcgctcagttgcgtcacgcctacgaatccgggtgtacgcggccattggcttggcgacgggcgcaattggatgcgctatgccgtctggtagcggacaatcgtgatgctttcgtggctgcggccatggccgatttgggcaaacccgcggcggaaaccatactgatggagctgaatctggtggccggcgaggcgcagttcgtccgcaaccggctcggactgtgggccgcgcgccatcccaaggcgatgcattggatgctgcaacccgccgccggctggacgatcgccgagcccaagggcgtggtactcatcatctcgccatggaattacccggtgctgttggctctggagccaatggccgacgcgctcgccgcaggcaacgccatctgcctgaagccctccgagctttcgcccaacacctcgcgcctcatcgccgaactcgtgccgcaatatcttgaccccgagtccgtgtgcgtggtcggaggcgggcccaaggaaaccggcgaactgctgaaatgtccgttcaaccatatcttctacaccggcggcgggcacgtcggcaaaatcgtcatgcgtgcggcggccgagcacctgacaccggtcacgttggaactcggcggcaaatcaccgtgcttcgtggaccgtacggtggatatcaatgtggccgcacgacgtatcgcatggggcaagttcaccaatgccggacagacctgcgtggcacccgactatgtgctcgccacgccggatgtggccgaggctctggccgagcgcatcgccgtagccatcaccgaattctatggcgaagatccgaaggcctcgcctgattttggtcgtattatcaacgatcgtcattttgaacgactgtgcaagctattgccggtcggcaccgtgccgtctgaggagccgagctcgccgctggtacaggtggcatcggcggtaggcgcggccatggatatggtcgggcggcgcttcaatgtcgtggctgccggacgcggaagcgcgggggagacagccggtggtggcaccggtagcgcgaacaatgcggcgaagccggcggccggttcgaatacggcagccgctgatagtgatgcgactgcctcggccgctgttgagccgagcgagattcacaaggtgcccggcgtattcgatccggccgggcgaatcgtttgcggaggcaaggtcgatcgcgccgcccgatatatcgcgcctaccgtgctatacggcacgtcaccggatgcgccggtaatgaaggaggagatcttcggcccgattctgccgatcctggtggttgaggatgccgagtccgcaatccgattcatcaacaagcgatcccggccgttggctgcatatgtgttctcgcgcgatcacgaggttcggctgactttcgaacgtcagaccagctccggagctttgggatattcgttgccgttgggtcacctgctgtccagccgactgccgttcggtggcgtgggcgcgtccggcatcgacgcctaccacggtaaagcaggcttcctcaccttcagccacgtcaaaaccgtggttaccaagccgcagttccccgacactctgcgcctcgtgtacccgcccttcaatgaagccaaggccaaactgttcaacatcatcgccaaattcagctagcgtgatatcgctcgctgatattgggtgatggcgttgtcatagtgacgttcgctgtcccggcagccacgtcaatcgattgattcgtgtaccgggccagatttgtcggtcctggtatttgatttcgagtcattttctgcttaccgggacaaaactgacgccgaaagtatcgtccgcgtattacgaaaatggcggaatagtgcggttttgcatggaagggaattccaaatattcctatattcgaggtgttcaactgtcctggtttgcgaaaaagagccgaaatcagctaccgggacagaaaaatctggcccggtagccacgtcaatcgattgacatggccaccgagccaaaaatatgcggcagatgcgccgcttctgttacttcagggctttgaagccgatgtcgtggcggtagaacagtccgcgcagctcgagcttgtcgatgatcgcgtagaccttgtcctgagcggacttgatgtccggggcggaggtttcgacgagcaggacacggccggagttggcaatcagaccacccttgtcgtcggaggcgacgccggcatagtagacatgcgaatcctcgtcgacctcgatctcgggcacacgggcacccttgatgacgttctccgggtagccgttggaggcgatgaccacgccgagggtggcgttggactcatcccagatgaattcgggggtttcgccgtcgagaatggcggagatgccggcaccgaggtcggaggtgagcttcgggagcacgacttcggtttccgggtcgccgaaacgagcgttgaattcgatgaccttcggtccgtcggcggtggcgatcaggccggcgtacaggatgccggtgaacggcgtgccttcctcggccatgccttcgacggtggggcgcacgattttctcgatggcctcgtcgaccacggactgtggaatctgcggcaccgggctgtaggcacccatgccaccggtgttcgggccttcgtcgccatcgtgggcgcgcttgtgatcctgggagatcggcatcggccagaaatcagtgccgttgacgaagctcatcagggagaattcctggccgtcaaggaagtcctcgataacgaccttggcaccggcggagccgaagcgatgatcgatgaagatgtcttcaagcgcacgctgggcggtgtgctcgtccatggccacggtcacgcccttgccggcggccagaccatcggccttgatgacgatcggcgcgccatgctcgtgtacgtaagcctgagccatgtccaagtctccgaacgtcttatatttggcggtcggaatgttgtgacggtccatgagctgcttggcgaagtccttggaaccctcgatctgggcggcggccttggacgggccgaacgccttgatgccggcggcggcgaaatcgtccacgatgccttcgatcagcgggacttccgggcccacgaacacccagtcatagccattgttcttcacgaattcgataagtgcggcgtggttcgactggctcagctgcgtggtgtggatgccgtccttgagcatgcccgggttgccgggagccacggtgacttcgtcaatgctcggtgccttgagcagcgtgtaggcaatggtatgctcacgcgcaccggagccgatgaccaatactttctgacccatgtttttccttcctaaagtctttggctcccctctttgaggggagccggtatctggagctacttcagtacgatttgcgtgtcggtggtatcggtggtgatctggccgagcacataggcgggttcgttgttgtcggcgagcagcttcagcgcctcgtccttgcgggcggggtcgatggccagcaccatgccgatacccatgttgaagatgttgtacatctccttgtgatcgatgttgccggccttctcaagcacgtcgaagatcgggagcacaggccaggtgccaagctcgatctcggcggccagaccgtccggaatcatgcgcgggatgttctcgatgaagccaccaccggtgatgtgggccacgcccttgaccacgcccgccttgaacagcggggagagggccttgacgtagatcttggtgggggtgagcagcacgtcgccgagctttgcgccgcccagctcggcgagctcagtgtccacggtatagccagcctgctcgaacagggccttgcgcaccagggagaagccgttggagtgcacgccggtggaaggcagaccgataagcacgtcgccctcagtgatggtggaaccgtccacaatggcggacttttcggcaacgccgaccgagaaaccggccagatcgtactcgtcctcgtcgtacatgcccggcatttcagcggtctcaccgccgaccagtgcggaaccggcctgcacgcagccgtcggccacaccggccacgacctgctcaagcagggccgggtcgttcttgccgcaagcgatgtagtcaaggaagaacagcggctcggcaccctgggcggcgatgtcgttgacgcacatggccacgcagtcgatgccgatggtgttatgcttgttcgccatcttggcgaccatgagcttggtgcccacgccgtcggtgccggagatgagaaccggctctttgtatccaagggaagccaggtcaaacaggccgccgaagccgccgatgccgccgaccacaccggggcggttcgtgcgggctacgtgcgacttgatgcgcttgacgacttcgtacccggcttcgacgctcacgccggcgttctcatatgcttttggcatttggtggggcctttctgttctattttcaagctcccttgccggggagccacctgcaaaaagcggattttcgtttgtactaagctccccttgtcaggggagctgtcagcgaagctgactgaggggtagtcgtaaagaccaatgactgaggtgtagtcgaaggaccggccgaacctactgcacgtccggctgcacggtgttgtactcgttgccgatgtacttgctcttgtacagcgcgaattcaggcagacgcacacggtcctcgggcgtgagggacttcaggaagtcggcctcgtagtcgtcgagcgcagtggggtagtcgccgttgaagtaggcgacgcacaggccaccgtatggggcgtcggcgttcagtccgatggattcgaccagaccgtccagagataggtaggccagcgaatcggcaccaatgtagtcgcgaatctcttccacgctcatcttggctgcgatgagttccttggtggtggagatgtcgatgccgtagaagcacgggtacttgagcggcggcgagctgatgcgcatgtgcacttcggcggcgccggcctccttcagaagctggacgatgcggcgggaagtggtgccacgcacgatggagtcatcgatgacgatgacgcgcttgcccttgaccacgccacgtacggcggacagtttcatgcgcacgccctgctcgcgcagttcctgtgtgggctgaatgaatgtgcgggccacgtactggttcttgatcagacccatctcgttgggcagcccggccgcttccgcgtagccggaggccgcggacagggaggagttcggcacgccgatgaccatgtcggcatcgaccggcgattcctgtgccaggcgtgcgcccatgcgcttgcgggcggagtgcacgttgacgccatagatatcggaatccgggcgggcgaagtagatgtattccatcgagcagatggccagctgcgtgttgttggtgtactgcacgatcttgtagccgtgatcgttgaccaccacgatttcgcccgggcgaatgttgcgcaccagctcggctccgacgacatccagtgcgcaggtttcggaggcgagcacgtaggcgccgttcttcatcttgccgagggagagcgggcggaagccgttcgggtcgagtgcgccgatcatggcgtcttcggtcatcaacaggtaggcgaagccaccatgcaccgtgttgagcgcttccttgagcttgtccataaaggtgcgctgcatcgaacggcgaatcaagtgcatcagcacttcagtgtcggagttcgaatggaagatggcgccttcgtcttcaagtttgcggcgcagtgacgggcagttcgtcaggttgccgttatggcacagagccacgtcgccgtcatggaagcggaagatgaacggctggatgttgtccgtggtgcccgagccggccgttgcgtaacgcacgtggccgatggcgcaattgcccttcagtcgttcgatttcgcgctcatcgccgaacacctgggtgagcaggccgagtccgcgatgaccgatgagatgaccgttatcgttggagacgatgccggcaccttcctgaccgcgatgctgcagcgcgtgcagaccaaaataggtgagtcgtgaggcgtcggggtggccccatacgccgaagatgccacattcctcatgaatgtcttcgagttcagccgacaagccaaagctcctttttcaaacaggggattaactatctgccaaccctaccaatcggcggctacatcgcgtgttgtggggtggtggaacttgttggggttcgcggacgcggtttaagcaccagatcagttgagtatgaatagtggcttaggattttggcctttcgtcgtatgaatccggtgcttgttcttcggcttcgtctcagtgcctgaaatggctgaaaaactcgatggtctcgggatcctgcgactcgtccatcacctcggcgggtgtgccgttctcggcgatgacgccgtgacggagcagtacgatgcggtcggccgcgtcgtgggcgaagctcatttcgtgcgtggccatgaggattgtggtgccttgggcctttaactcggcaaccatgttgagcacttcgccgaccagcatcggatcaagagcagatgtgatctcgtcaagcagcagcagttccgggtcggtcatcagtgcgcgcgcaatcgccacgcgctgctgctggccgccagagagctgatcagggtaggcgctggctttatcgcgcatgccgatgcgttcaagcagttccatagcgcgggtttcggcgcgatccttgctccagtggtgaaccttgattgcggcaagggtcacgttcctgagcaccgacatgtgggggaagaggttgaactgctggaacaccacgccgatacgtgcgcgaatcttgtcctggtcggcacgcgggtcggtgatatcggtattgcccagccaaatccggccgtcatcgacctgttcaagcaggttgacgcatttcatcaatgtggatttgcctgaaccggaaggccccagcaaagccaccacctcatgttggtgaatgtcaaaggaaatgccacgcagcacctgcgtgtttccaaaggatttgcgcacgtcatcaagacgcagcaccgtcttgttgctcacgggggagtcactcgcctcggtggtgatattggttatttcgctcataccgttcctccgctgagttcgcgcttacgcagacgttccgtgtaccagtcgttcagcaggatgaacggcacgctcatcaggatgaacagcaggctggcgaccacatacggcgtgaagttgtaggtgctggccacgtcgatctgtgcggcgcgcacggcatccaccgcacccagcacggaaatcaggccgacgtccttttgcatggagatgaagtcattcatcagtgcgggcgcgactttgcgcaatgcctgaggaatgacgatcagtcgggtcgtctggccggaggtcaggcccaacgagcgggccgaggctcgctgagaaggatgtacgtcgttaaaaccggcacgcagcacctcggagacgtaggcgctgtatcccattaccactgcaatggtgccgagtaccgagggatcgatacggccgaacaagcctaggccgggaatgccgaaaccgattagatacagcacgacgataataggcacgccgcgcatcacagtcgtgtagatcaatgccaggatacgcagcgggaacagaataggggagcggctggtacgcaccaatgcgatcagcgtgcttagaatcgccacgccgaccactgcgacgagcagaacgcggatgttgagccataggccgtcaagcacatggggaaacgatttgacgaagtattcgccggagaagaaggtctccttgactcgtggccagccgggggagagcttcaggccgatgacgatgaccacaacgaacacaatggtgctgatcagactggtaatcgtcgattgaatttgctgatgaacacgatattggcgtcgtttgagctcgacctgacttacctcgtgtccgtcaggggcattgtactgcctggtttcggttggtgctgcggtcatgtgatgaatgtcgctcgcttcctgaatgccggaatggccgggtgtcacaggaaaatttccgcagcgcccggccaaggtgttgtgaccttatgatgtgagcctactccacttactttttcagttcggtcaggtcggtggtgtactcggccagccacttgtcctgaagcttcttgatggtgccgtcggcgttcaggtcatccactgccttggtcacggctgcagtcagcttggaatccttcggcaacacgatgcccatgccgctcttgtcttcggagtcaggcagacggccgagcaccttggcgtccttgacctgctcggactgcaccatgtacacgcattccacggtgctggtgaccagtgcgtcgatttgaccggcgtcaagtgcctgagccagtgcggcatcatcattgaacgtctggatgtcgtccttgatgttcgccttggcgtagtcgtaggcaagggtgccgaccatgacgcccacggtcgcattcttcagatcggataccttggtggcgttggcgaacttgctgtctttcttgaccacgacggactggctgtcgttgtagtagctggacgagaagtcaacggccttcttgcgctcgtcggtgatgccgaactgctggatgttgagatcccagtccttggcgccgggagcgatggcggtgtcgaatgcggtgcgggtccacaccacgtcgctcttcttgaaaccgagcttgtcggccactgcgtaggcgacggccgcctcgtagccctcaccgctttccggcttgtcgttcataacccacggctcgtaggccggctgtccggtggcgatggtcagcttgcccggcttgtacgtctgctgggtgatgtcgttcgaatcggcggaattggatgcggtggactggccggaaccgcaggctgcggtgaacgacagagccaggatgctggcggtggccgcaatggtacggacgatgtgttgcttattgaacatgggcttcctctcctcaagtgttcgtcatgcacacggttcaaagccgtgcttgatgcatgcgcgccaattgtatggctattgggttactacaaaacagcgatattctcggatgctggttatctccattgcttatggccggctagagccgcgcaatctggcgcgtaagcgaacggatatctcatattggcgcagagcggaatggcgttcactgttcgagtgtgaagccgtcgaatacgaatcccggactgaccacacaggagaccagcgcatcgccctggcctggcactgtgcgctgccagacgccagccggtacgaccgcatgtcccgatacggttacgtcggcctgatcggtggtgatgccggaacccagggtgattacggttcgcttggattcgtcggattccggagtctcgccgctgccgccgagttccagcttgaccgatgccgggccatgccacagccagacctcatccgcatcgaccttatgccaggcgctggcatctccctcgggcagcaggaagtaaatcagtgacgatagcggtcggcttgaggcctcatccgtgtgcggggattgccagtcacgcgtgtaccagccgccttcggggtgggcttccagtccaaggcgttccactatggaccgggcgtatggactcatgtctcgcaaagcgacgctcataatgagatctcctgttcttgacgggtttgctggtttttggcttcttgatatcaggtcgggtcagcggtgtcaccaggcgttgttgtaggcttcgcgcccggatatcaccgtggctcggttcgtgcctgcgccgtgcttcaccagtgtttccagcgtttcttcgatgccggccggagatgatgtgtcgacggggatgtcgaagaacgcgaaatcagccaatgcgcccgcgttgatctgtccaatgcggttgcggcccacgtgcatgcccatggaggcggcgccgcccagcgtcatcatacgaatcaggcgatgtgtcagatcgtcgctggcatagccttgttcgcgggccaggccgtaaagcatcgacacgtcatcaagcagatcgagggtcggcgtgctggagagcgaatcggtgcccacgcttaccagattgccttcctcgaggtattcgcgcaccggtgcatctttgccggtgttggtaatgcgattcgatcgggggcacaaggccacgcccacgccgcgctgacgtagaatacgccgatcctcgccattggcccacacgccgtgtgcaatgtgcacatccgggccaagcgagccaagctgatcgacgaactggatggcggaggcacctttgcccacgtccttgagctgccggtagctttcccaatcgtggtcacgccagtcggacgccgaataagtggtgagcaccggcggataagtgccggcctcgagcggggtctccgccagatggatatgcagtcgcatgttcagctgacgagcaatgtctggaagatcaacgaacggttcggactccagcgtatacggagcatgcgggctgatgccgaggttcggcagctgctcctcgttcatccggcgcaactgccggatgagctcggtgcgacccttttccatccattcgtcgttgtgccagcccattacctcccaataagcgatgccgtgcatgccctgcgaagccagcgcgccggcggcgtccaaatcggtgacgatgtctgcggcggccgtcgttcccgattcgaccatctggcgagcaccgtcctcggcccactgcttccatggctgggtcttctgcgcctcggcgtacacctcgttgaatgccagttcccaggcgcggaaccgatcgtaggtgccttgcccgacctgcaccatgccgctgtactgcagatgagtgtgcgcgttgaccaatccgggggtgagcaccccatcccaatgccgttcacggatggtgccgtgagacgtcatttcctgcttcagcgcctccagcacccagcggcgtttacctacatgaaccacgcggtcgccatgtatggcaactgcgccatcgatgatgacggggcccgtcacggggatgatgagtttggcggaatacagtgtcacatcatcgataagctcggtatcgacggtcggccaggtgttgtcggtcatattctcctcgctgcgttgtgttcggtgccgtgtctatggctatcggtcggcgttctctcggtcgttttccgcgaatctggtcagtcgccaatcgtagccgttgtcctccacggcatggctggctcggtatccgcgcgccttgagcgcgctggcggcgatgcgctggtcggtcgctgcgtcaagtctgataagcgtgtgatccagtgtgcctcgatgttccagaagatatgcgacggcgctggcctgtacggcgaagctcagatccatgatctcgattggattgccgcctcccaccgtgtagttcacgccatcgccgtcggcgattagcgtgagcgttggtccgtcgggaacaatgagttgcgcggtgtccctgttgacctgtgggatgaagtcgcttacctcgtccaaggcgatttcgttggcgatgccgccgatcactgcgagcgccgcgccctcgtgcattgcgcgcatgtgctcaagtgtgactgtatgtctcacgccagtggcggacaccaccatatccgcgcaagggagtgcctcgtcaatgtcttgtgcggcgaagccgtcgaacaccgctttgagtgaagccactggatcgatatcgcagatggtgacttcggctccaagcgcgcgaatacgccgtgcgaagccttggccgaccgggccgtagccgatgacggtgacgttcttgccgtcgaatgcatgctcgccgagaatgcgctgcatggtggtcacgcatgtctccccagtgccgtgggcgttgtcgaatccggttttcagcacactgtcgttaacggctacgaccgggtaggtgagcgctcccgcttcctgcatctgctggaacgcgcgtacgccactggtcgtttcctcggccactccaatgagattcgccgtgagctcggggcgttcgagcgaggcgaggcgggcgaagctggcaccatcgtcgatgatgatgttcggctgtatcttgtccagcaggcgcagggctgcctcgtgcgcctgttccgcggtccaggctcggctggattcgaccgtgattccttcccggcgcagctgttccgccactcggggatccgtggaatccgggccgcaatatacgccgacgattgcgccggtggccttaagcttgcgcagcagaatcgcggtttttggctccagtatcaggcagacggcaatacgaatgcctgaaaaatcgatgcgggtggtgaggtcatccatggtgtcgcgtaataccggcatgtgctgttccgcgtactccattgcctccagcccacttgccgtgcgcatgtcggcaatggaatcaatgctttgtgtgccgtcacagaggaattcctcgctgtgcccgtcggtcatcgtggcatcttcgacggtcatgccccattgctgggcctgagacttgatttcggcatgcttctgcggctccggaatcgcgaggcgggctcctgccagtgatcgattcgttttctgggatcgggctgccgcccacgccgcaaaatcgctgtctgccgtaatgcttttcttcatattccccatggtacgcatgcatgccgctgctctgccgctgctctgccgctgcgcgtgtggtgtgggtgaagagcatgcttgggcgcgttgcgtgcgtcgacttcggcagcttcgaacagacatgttgtatcgaacaaatgttcgaccgtattgatatgctggtcgggccggcggtggtaaggaggtgatggcgatgggcagcggaacggtatcgacgcaacgcgagcatacctatattgccattgatctcaagtccttctatgcctcggtggagtgcgcggcgcgcggactcgacccgttgaccacgcatctggtggtggccgatgaaacccgcaccgataagacaatatgtttggcggtctcaccctcgctgaagaactatggcattcccggtcgcgcgcggctattcgaggtaaaacagcgcctgaatggagtcaacatcgagcgcgcggtccatgctcccggcggccgattaatcggggagtcctgcgatgcgcgcgacctggaacgctcgccgagactcaaagcctcgatggtcatcgccaagccgcgcatggcgcactatttggaggtcagtgggcaggtatatggcatctacctcaaatacgccgcacccgagcacatccatgtctactcgattgacgaggtgttcatcgacgtcacgccatatctgcgctcgctgggtatggggccgcatgccatggcgcgaaccatcgtgcgcgaaattctcgatgaaaccggcatcaccgccactgccggcatcggctccaacatgtatctggccaaagtcgccatggatatcgtcgccaagcacatgcccgccgacaaggacggcgtgcgcgtggccgaactgaatgaaatgtcatatcgtcggctgctctggagccatcgtccgctcaccgatttttggcgggttgggcgcggctatgccaggaaacttgagcacgccggtctgatgaccatgggcgatatcgcccgatgctcggtgggtcgtgcttcggattactacaacgaagacctgctgtatcacatgttcggtgtcaatgccgaactgctcatcgaccatgcgtggggctgggagccgtgcgaaatcgcggacatccgatcctatgagccggatgcgcacagcatcagcagcggtcaggtgctcaccggtcccgccgactatgccacggcccggctgatcaccaaggagatggccgatgcgctggccctcgatctggtcgataagggggtgatgacgaatcggctgacactggcggtcggctatgacattggcagtctcgatgcttcgaagcttgattcatgcgcagaccgggcgatgaggcgtgccgccgaacgcgcggcaaagacctatcaagggccggtgaccgttgaccgtttcggtcgtcgggtgcctaagtcggccgtggggtcgattggattgggcgattttacgtcgtctgccgcacgtattcgcgaggcgatgaccatgctgtacgagcgtattgtggatgcgcggttgctggtgcgtcgactcacagttgttgccgatgatgtggccacgcccaaagaactggcggcgggcaaacgctatgagcagcttgatttgttcggtgatgatggcgatatgcgatatgactgtgatagcacggaatccggtggcgacggaagcgggcgtatgccggcttgtggggacgatgccgccgcacagacgttggctcgagagcgtgatatccagcgtgcgttgctggatgtgaaacgtaaattcggccgcaacgccgtcatcaaagccatggatatggaagacggtgccaccggtcaggctcgcaaccgtcagatcggaggccatcgcgcatgaccctgcaagaaacccatgcatacgacgacatcatcaacctgccacaccaccaatcacgcaagcatccgcatatgtctcgtcaccagcgggccgcccagttcatgccgttcgcggccttgaccggatacaaccaggtcattgagcaaacagcaaaaaacgccgaaaccgccatcgcccaggccgaggcccaaggcgataccgatttcggcgcttaacaatcgctcccgttggaggaagccgcagatccgtcagcccacgtgacgctcaaagtggtggaagccagtgatcttgtcgatttcggccatcgcgtcagccggaatcacaaagcccgcggccttcatgttgttctccagctggctgggcttggaggcgccggcgatcacacagctgatctccgggtgctgcaggatccacgccatggaaagcaccggcaggttcgtgccgagctcgttggccacaacgcgcagcgtctcggtcagatcggtggtctcgtcgaatcggtggcagaagtacatgtccagatagtcggtctgcatgttcttcagtgtctgatcaatgctctcgaagatatgcttgcgggacaggccgcggtcgttcacgccttcgccggtggtgacttcgcgggcgcaacgaatgaaatcatcaatgacgctccagcggtatggtgtggccgaaacgtcgaatcggatggcgtattcggtctccggcccgcaatccagcacatgcaaggtgcgcagccgttcgccgtcaagcagcgctggcaggaaccgctccgggcataagcaggcacccatgccgtaatggcatagttccagcagcgtcaatatgttgtccgaacgggcggcgactttcggctcgaatccggcacgacggaacagaatctcgccgatgcggccatcgatgtcctgcggattgcccagcaaaaacgggcagtgcgccaacgaagatagatcgcctggagcaatggcgcgttcatctggaatcgtgttggggatggtggaatcgttggcaatattagtttggctgttcgcggttccggtggtgactaaatccagtcataatgattgcgcaataaccagtaccatacgttcgtcgtagaatctggggttatcttgagtcatggctcgtgcgaatagcattgatgtttgcaactgcgggtcatgagatgaaatctgagatgaggtcgtagccggaagaggagaggatcacatgctggaagcgggcgcgatgttgctgttctgtgcggtgctgtttgccagcgtcgccctcggctggtcgattattcccgcgctgttcgttggtgtgctgctgttcatggggtatgggctggttcgccggtgctcgctgcgcgcgatggcgagccgtgcggccggcagcgtacggtccgcggggaccgtggtggtgaccttcgtgctcatcggcgtactgacctcgctgtggcgggccagcgggaccatcgccttcatcgtggcccattcgactgcggtaattcacgccgccacggtgattccgctgtcgtttctactgtgctcggcgatgtcggtgctggtcgggtcgtcgttcgccagtgcggcgactatgggtaccatctgcatgtcgctgggattgtcgatgcaggcgaacccggtgatgctcggtggcgcgattcttgcgggcgtctatgtgggcgatcgttgttcgccggtttccaccagtgccttgctggtcaaacagcttacgcatacgaacctgttcagtactattgcctgcatgctgcgcactggtgcggtgccgtttgtgctgagttgtgtggtatacgttgcggctgcggtggcggagtggctgtgtgcaagcggtggttccggattcggtgcggctagagcggctgtttcaaccaacacaagcagcataaccgatatcggcggattgttctcatcggcctttgatttgcattggcttaccctagttccagcattactggtcatcgtgttggcgttgctgcgtgtggacgttcgcctgcttatgctcgccagcattgccgcctcggtcgcgatatgcgtgggcgtgcagcacatggaatgggcggaactgttgcggctgcttattttcggttaccatgcgcaaaatccgcaggtggccgcactcctggacggcggcggcatcctctccatgctcactgtgatggccactgtctgcatctcctccgcctacgctggcatttttgccgagacgcggatgcttgctcggctgcagcaggtcatcgagatgctcggtcatcgcatcggcgcatgtggcgccaccatgattaccgcgacttgcgcggcggcgctcgcctgcaaccaaaccctcaccatcatgctcactcaccagttgtgcggcgggctatacggcgacgacgaatccgaacgcgccgcgcaagctatcgatttggaagacagtgccgtggtgatcgctccgttgattccttggtcgatcgccggtgcagtgccgctcgccaccatcaacgcccccacgttgagcttggccgccgcaaccttcctctacctgctgccgctgtgccgaatggcggtttcagctgtgcgtcaccgccgtgcaataactactaatatatgagtgattttgggcgtatacaggcgaaattactcatatattagtagtttggcgaacaactatattgtattctcgaaaagcttcgcgataggcggtgataaggtccggcaaacgcattgaggcgttggccgggctggtggagggcagttgggtcataccgatggcgatgccggcttcggtcaggcgcggctcgataagtttgcggtaaagttgcgctgatttcgcgccggttgcgaagatgtgggcgattggagcgccgcgcaagattggtgtcaagtcgttgggcacggcattgcggatgctggcatcgctggctccggtgatatcgcaagaagcaatgacatcccataacgcaatgtggtggcgcagagcaaacgcacgacgggactcaggtaaatcgccgacagcgtcagtaggatcagcggagttggcaaacagcgcctgcatcaccggccaaaaccggttctgtggatgcatatagtaaaacgccgccgctcgggatttcggactcggcatcgatcccaaaatcaaagcccgggactcaccatcccacaccggcccaaacccatgctccacatgttcgctcataagccccatattatgccgtttggtcttgaaaatagttcgggggcggacagttaatgtcatattccctcaaagagaagaaggatttacaatgaaaaaaggtggaagaaattgccagtgaaggcacaagccattcttattggtgttttagtcgtcgtttgcgcaattgctgcggtatttggatataggtcagttgacaatatgctgcatcctcaggcgactctgaccaattcggttgtggccaggcagttggaaaagattcaggatcttactacggccaaggaaaccgattttggttttgaagagtataaggaaggcaacattgctccacgccagatcgtcctcgaagccatccggcaacggaaccagcggattcttccacatccggaaatccgcaaccagccgcttcaactcctcggcataccgtcgctcatccaaccgaatggacatccccactcaccttccttcacactaccatcccagcgcacaaccagccgtcacgccatgggcagcgccgtacacacgccaatgacgaacaacgcctcggcggtgagccagaacgcggccggccactcgccacacgactcacgacgattatccacacaaaaacaggcagccgccaaatc

SEQ ID NO: 188 - DNA, 8679 bp, Unknown
  R101_18m  MAG No. k141_12531
atgaatccgtcggtcacctcgaacatgtggcgatcgccatcgggctcaaccacggtgagcgtaccctgcttgatcaccgtgagcacaggctcatggtcgggcaggatgcccatgccgccctcagaggcgggaatggtcacgctcgtcgcctcgccgtgccacacagggtggtcagcggcgacgatgttgaccttcatcgtggttttttccgcagccatcacgcacccagttccttctgcatgttgtgccacttctcttcgagatcatcgatgccgccgataccggagaacgcctgctccgggacgtcgtcgtacacgccgtcgcagatgcgggtgaaggcttcgatggtctcgtcggccggcacgtaggagccggggcgaccggtgaacttctcggcaacgtagaagttctggccgaggaactgctcgatcttacgagcgcggttcacggtggtcttgtcctcttcgccgagctcgtcgataccgatcaaggcgatgatgtcctgcagctccttgttacgctgcagaatcgccttgacgcggttggcgcagtcgtagtgagcctggcccacgtaacgcggatcgaggattcgcgaggtggagctcagcgggtccacagccgggtagatacccttggaggcaatgtcacgagacagctcggtggttgcatccaaatgggcgaaggtcgtggccggggccggatcggtgtaatcatcggccggcacgtagatggcctgcagcgaggtgatcgagtgaccacgggtcgaggtgatgcgctcctggagggaacccatctcatcggccaggttcggctggtaacccacggcggaaggcatacgacccagcagggtggacacctcggaaccggcctgggtgaagcggaagatgttgtcgatgaacagcagcacgtcctggttctgcacgtcacggaagtactctgccatggtcagtgcggtcagcgggacacgcagacgggtacccggctgctcatccatctggccgaagaccagtgcggtcttctcaagcacgccggcctcggccatttcgccgatcagatcgttaccctcacgggtacgctcgccgacgcccgcgaacacggacacgccaccgtggttctgagccacgcgctgaatcatttcctgaatcagcacggtcttgcccacacctgcaccaccgaacagaccgatcttgccgccctgcacgtacggggtcagcaggtcgatgaccttgatgcccgtttcgaacatctgggtcttggactccagctgatcgaaggccggcgggttgcggtggataggccaacgctcggagacggtgatggtctcatccggcttcttgttgaggatgttaccggacacgtcgaagacgtggcccttggtcacgtcgccgaccggcacggagatcggggcgccggtgtcggagacggaggcaccacggaccaggccgtcggtgggcttcagagcgacgcaacggaccgtggaatcaccgaggtgctgttcgacctcgagggtgatctcggtctccttcgcctcgccttcttccttggcgccggtgttgacgatcgttactttcagggcgttgtagatgtcgggcagatgacccaccgggaattcaacgtcgataaccgagccctggacgcgggtgacgcgaccgttggtaggctcggccgcagtggtctggttgtcagccatatgcgttcctactcttccttcttggtcagcgcgtcagcgctgccgatgatttcggtaagttcctgggtgatcgaggcctggcgggaagcgttgagcttgcgcgtaaggtcgtcgatcaggtttcgtgcgttgtcggttgccgtgtgcatggcgttctggcggcttgcggtttccgacgcggccgcggtcagcaggcactcgtggatgcgggactgaatgtacttcggcagaatcgcgtccagtaccttttcgaggctgggctcgaaagtgtacagcggagcgacatccgcagtagccggtgcctcttcatcaggatcgggcaccttggtctcgtttttcacgatttcgaccggcagcatgcgcagcacgcgcaccttttgcaccaccatgttgatgaactcggtgtagacgatgtagagttcggaaactccacctttctcagccggcttcatgtaggcgtccatcaaagtgttggagatcgtttcagcaatttccacgccgggctggtcggtgtcgccttcccacgtcgccgcgatgtcacgattacggtacttgtagtacgtcgaaccgcgacgcccgtacacgaacagctccggctgcttgcctgccgcatcgaggcgggacagcagcgactccgtttcacggataatcgaagaggtgtacgggccggccataccacgatccgaggtgagggcgagaacagccacgcgcgggttcttctcgtccttcaccgcgatcggatgcgtgatatgggtgtgggccaccaacgcttgcacggcatcgaaaatcgcatcggtgtacggcttcgcgttcagggccacatcacgggccttggcgatatgcgaagacgcgatcatctcctgagcgttgaagatcttcgccaacgactcggtggagtggatgcgtgatttcaatgcgagttgcgagcccatggcttacttttctcccgccacgatcttttcctgatcaaccggcgcggccttgtcaacgtccggcttcttctcgaccagcggcttgccggcggaagagacgaacgtcgaacggaactcgtccacggccttatcgagggcagcctcggtgtcggcggtgaattcctcggtctcgcgaatggtcttgaggatatcggtgttgtggtcgatgtagtccagcagtccctgctcgaacggaaggacgtccttcaggtcgaggtcgtcgagcttgccgtgggtgccggtccatacggacacgacttcctgttccggcgagtacgggtggaactgcggctgcttcaacagctcggtcaggtgggcaccacgggtcagctgggccttggaagccgcatccagatcggaggcgaacatggcgaaggattccagcgaacggtactgtgccagggagatcttcagcgtaccggagaccttcttcagagccttggtctgtgcggcgccaccgactcgagagacggagataccgacgtccacggcggggcgctggttggcgttgaacagatcggactgcaggaagatctggccgtcagtgatggagatcacgttggtcgggatgtaggcggacacatcgttcgccttggtctcgacgatcggcagacccgtcatcgaaccgccgccgagatcatcggagaccttggcgcaacgttcgagcaggcgggagtgcaggtagaacacatcacccgggtaggcttcacgccccggcgggcggcgcagcagcagggaaatcgaacgataggcctctgcctgcttggacaagtcatcgaagacgatgagcacatgcttgccgttgtacatccagtgctggccgatggccgagccggtgtacggggcgatgtacttgaagccagcggaatcggctgccggggaggccacgatggtggtgtactccatggcgccggcgtcttccaggctctgcttcaccgaggcgatggtggagcccttctggccgatggccacgtagatgcagcggacctgcttcttcgggtcgccggattcccagttggccttctggttgatgatggtatcgatcgcgatggcggtcttaccggtctggcggtcgccgatgatgagctggcgctggccgcggccgatcggggtcatcgcgtcgatggccttgaggccggtggacagcggctcgtcgaccgggtggcggtgcatcacgtcgggggcctgggcttcgaggatacgacgaccctcaatgccctggatctcgccgaggccgtcgatcggcttgcccagcgggtccacgacacggccgagatagccgtcgccgacgggcacggagagcacttcgccggtgcgtcgcacttcctggccttcctcaattcctgcgaaatcgccgaggaccaccacgccgatctcacgggcgtcaaggttgaacgccaggccgagcgtgccgtcttcgaacgtcagcagctcattggccatgcaaccaggcaatcccgtcacgtgcgcaatgccgtcaccggccgtggcgacatagcccacttcctgggtgggggtgtcgctcggcttgtacgatgacacgaagtcgtcgagggccttgcgaatcgaggcgggatcgatggtcagttctgccatgatcactccttctattggttattgttcagtcaagtctttgcttgtgtgtggtgttggacggattggctcggccggtcaggccggagtcgcctccgtctgcaccttgcgatgcaggttctgcagctgtgcgaccacggtgttgtccgtgacttcgtcgcccacctgaatgcgcatgccacccagtacggtcggatcgaccaccgagttgatgtgcacctggcggcccaccttggcggagtagacctcgaccagtcgctcaatctgctccttcttcagcggggtggcggtggtcacggtgaccatcgactcgcccatgtggcgggagaacttgttgatcagccactggatggtctccaagtagcggcggcggcgcaggttgcaggtggcgtgttcggcgagcctcatggtgaccttgttcagggtcttgccggagaacacctcgcggaacagcttcacacgggcctcgctggtggcctggtagtcgtacagcttggagcggacgaccggcaggttcagcagtgcggaatgcagctcggacagctcgatggatacctgcagcgtggcgtcggtggcgtcagcgtagtacatcatggcgtccacgccgaagtcctccaccgcgttggcgatgtcgcgcgcacggctccaacggcgggagaccaagtcggtcatgatctccatggtcataggatgcgcgttgtcaccgagcagtcccttcaggacggccaccttgtcggcgaccgggcgggacgggtcggtcagtgcgcgttccagctgaatgctgtcatcgagcaccttggtgatcgtgaacagttcgttgccgatccgccacgcgtcctcacgggtgtcgcgcagtttcggggccagcgaatcacgcgactcgcggtctgcaatacgtgatgcctctcctcgcatggtcacctccctttctggttacggatggtcacggtcacttcttggcgcccaggtcgtcgatcatcgaatcgatcatcgaggactgcacgtcgctgtcttccagcttggcaccgaggatcttgccggccaaggcggtggcaagtgcgccgacctcgcccttgagcgagacgatggcctgctggtgctgagattcgatcgagcgctgtgcggatgcggtgatctgggccgcatcggactcggcgcgggaacgagcgtcggcgatgatgtgggacgcttccgcacgggcgtcgtcgcgaatcttggcggcgtccacacgggcggtgctcagctgggcctcatacttggccttggcctcgtcggcgtccttcttagcctgctccgccttggcgatgttgccctgaatcttggcggcgcgctcgtcgaagatcgcattgaacttcggcatgaagaacttgtagaagaacaccgcaacgatgacaagaatgatcagggaccacacaatgtcataggtctcgggaatgaacagatcaattccgccttctgcgagcgtcattatgaagtcctcctttcactggtggattcgttttgccttctgtattcgactgagaaaacgttcgatcagtggaacatcagggcggtaacgaagccgatcagtgccagcacctcgatcagagccaggccgatgaacatgatggtctgaatcttgccggacatctcaggctgacgagcggtggattccatggccttgccgaagaggatgcccagaccgatgccagggccaaccgcaccgagaccgtaaccgatgacggacaggttgccggcgaccgctgcgagggtgatgatatccattgtgtttcctttctaacgtacttggcgacgttataaatcttatttcgttcggccctgcctacctaggcgaggccgggttccgaaagagggggttgaacctcactcctccgggaagcttaggttgatgtacacggtggaaagaatggcgaagacgtaagcctgcaggaaggcgacgaacgcctcgaagcacgtcatggcaagaccgctgacgaaccacatcgcgccgactgggatgccttgcagcttgttggctgcatcgacgatccagtactgtgcgaatgccaggcaggtggcgaccatcaggtggccggaaatcatgttggcgaacagacggatggtcagggaggccggacggatgaccagcaactcaaggatgttaatcggggtcaacaggatgtagaccggccacggcacaccgggggtgaacagctcgtgacgcagataatggccaagaccttgcgaacgtgcggcggcgatccaatactggaccatggtccagatggcgaacaccagcggcatgaccacagtggcggtggccgccatgttcatacccgggatgatgccacacaggttgaagatgaaaatcgtgaagaagatggtggtgatcatcggcacgtagcgcttgccgcgaacctcgcccatcacgtcatagacgaccttgtcacgcacgaagtcaagaccgtattccaccacgccctgccaacggccggggatgagcttggcgcgctttgcggtcacgccgagcaccaccaacagcacgatggttgccacgatacgaatcaaaataatgcggttgatggcaaacggagttccctggaacagaatctccgggggaaggaagtcaccaaccgagggcagatgagcgcctgcctcgtcagccaacagcaatcctgcgccgagcgaaccgaccatatcacgcctcctgcttcttcaatatcaggtgtcagtttaaacccaccgggcaggcaaatgtgacgtgctcgttactttcgtctcctcggtgtggagtctgccgggcgcggacacggagtctgcgctgggcattcggctccgaatgactgaagagtgattatttgcctgcgtctagacaatgtcaatactacaccggcgcgtcttctggaatcggcggcggcgcaaggtttttcggatgttgcgcaagcgttgtgcgctattagtcataatacgaggatgtgcggcatttgcgctaccctctgatcactccgtatccgtcgtgggcgaacggcttgaaatcatcctggcgcggcccgcccggctcatgccgaatcgaacgatcagtaccgagcttcttctcagccctgagctgcggcacctcggtcaggtcgtacggcgtggtctggtacacccagttgagccagttgcgccacagcagattggcgtgggcacgccagacgaacaacggttccagcttcggatcgtcatgcgggaagtagttcttcgggaagggcacgttggtcatgcccttggccatatcgcgctcgtattcctcggcgagcgtgtacttgccgtactcccaatggccgagcgcgaacacttcggagaagtcacgtgtggcgattaggcccgggccggactgcggcccccaagtcaagatctgaaggtcatggttggcacgtacctcgttttcgttcacaccggcgaggcgggagtgcggctgcagatcaatctcgtcgaagccattggtcaggaagcagtattcgtcctgcaggtactgcgggaatacgccgaaaatcttctcggggtaatccaccttgtggatgccgtagcggtagtacagtgcgcccatcgcaccccagcacaggtacatggtggagaacacatgggtggaggcccagtcgagaatcgtcttgaactcgtcccagtagtccacatcttcgaacggcatatgttctacaggcgcgccggtgaccacaaaaccgtcgtaatagttgtctttgaacgcatcgaggttttcgtagaacttgacgagatgatcggcggaaacgtgcgtggcctcatgcgtggaggtcttcatgaagtcgatttcgacctgcagcggcgacttggaaatcagacgcagcagctgcgtttcagtctcgattttcttaggcatcaagttcaggaccaccagtttgagcgggcggacgcgctgacgctccgcctcgggcttctccagagcgaagatgcgctccgaatcgaggatatctctggccggcaggccactggggatcttgataggcatgttcctattatgtcaatattcgggataacggttcagggcattcctataacggccatttatggcgcgttatcaccccgactccggctccgccccaaacccctcgctgcgtgagccgattcacgttttaaaaccgtgggaaaatgacacgacacgccgatgttgactttctggaatctgcacctattgtagatagagctgtctgagagacaagccgacgcggggtggagcagctcggtagctcgctgggctcataacccagaggtcacaggttcaaatcctgtccccgctactgcgggcgaggccgtcacgattattcgtgacggcttttcgtttatccgccgtcgtgccctacggggccgcatatccgatcggggcgatgatgtcctgtgaaaaaacaacatccaagcccgctctgggcagaa

SEQ ID NO: 189 - DNA, 25651 bp, Unknown
  R101_18m  MAG No. k141_12790
cttttgctggtcactccatccaccactgccgcgaaaccatcggtgatgatcagcccgtcctcattgagcgactggtcagacctcttgccttggcagtgctgttctatgatgtgcatagcgattttcgattccatggttgtcagaacgcttaaaggcgtctactggctcattatgatggcagcagtgacatgcggatatggagggcgctgtctaaatgaaagtgcaacaccctttagattggagattgtccagataaccagtgaaagggtgttgcactttcatttagacagcggggggacgattgagaagtcataattccgttacactggcaaggacaaggaactaaggtatgcgaggattatcggtattgagcagggcgttgcgatgggcgttggtgggtatgacgttttcgatgctgtccaacgcgattttcgaggggtcggtgattccttcgattctgatcgtcggactgccggcatgggtgatcgcgttccgcaagacgttcaatctggtcatcgacttcgcttctccgatatccgcatggatcgtgcagcggttcggctcgttccgttcgcttgcgaccacggagggcgtagaaggcgtactgtgcctggcggtcgcgctggtgcccaacggttggacgtattggaagtggctgctgctggccctgtcatgcctgctgctgatgaccgggcaggtcatcgacgtggcctccgaagtgttcgaggtggatgcggccggcgacgacgatgacatgctcgtcaagtacagcggctatgtcgccgtgattgccagcgtggccggtacgttgctgggccaggttgccggatcggccttggccaacgcctccatcatggccatgctgctcacctcgtcggcactgtcatttgcctgcgcgctgacgcgattccgcacccgcgagttcatgccgggattcggcaacgatggtgcgggcggcgatgacggcgacggctccgccgacgaatccacggcggccgacacgtcacacgcgccgcagcgcactccggtcacccgctcgacccgggtcagactgctgatcgcatcgctgctgcttgcgctgattccgtcgctgtgggcaagctatgcgttgctgggcatcggctcccggtacggcagcgatatgctgaccgtggtctacgcattcggcggcgtgggcagcatcgtcggatcgtttgtctacatgcggctctccgcaaaactcggcatgtgcgccgtgtccgccatcggggcaatcgccacggcgatttcccttgccgccgtactggttcccgagtttgccgcggtgtgcgtcggatggctcatcaacaacctcggctatggcctgctggcgcatggcgtgatcgtatcgcgacaactgctgctgagcggtggtgacctggccaaattcagcggccgtgccaggttcgcgtatgcgatcggcggtgccgtcggcacgtggggcggctggctcggctccgcccactggcagatactcgccgtcgtggccctggtactgtgcgctggattcatcccgttgctcaaggccatgcctggcccggtacggcactgaggtgacggatggggccggctggcatctcgtgcgccgggcgatttcggcagattttgccgtgctgatgtatgcaggtgttgacgttcggcgaggttcccagccacattgctgtgtgattgatgccgctcgataggcatgtcaggccggacacaccacggtgatgccgaatgggcgacgggccgacgacccgcatcatcgcagcagccgggttttgccatccttgacaagcagggcctgccggttggtgaggggcttgagactgagatcggcaccataccggtcgagaatgcgttgtgcggcgtggcccatggccgttgcatgatggtgggggaccacgcggaaatcagccaagcccaatcctgcgtaatcggtgagatcgggggctttgtccgtgcggtccatgagcttgatatagccgatgtcaggtgccgtgatgaccgagcccgcggactcgccgatgtacggcgtgccggcgcgcacctgctcgatgatggcccggtcggcaccggtgcggcgcaactcctgcaggagaaagaacgtgttgccgccgcccacatagatgcagtcggcctcggcgatgctacgcgtgacgcgttcggcggacccgctcggcacatcttccacatccagttgctccacctcgaaaccgaggcgttgcagcgcgtgtttgctcaacgccgagtgaaccggcccccacggttccacggcgctcgccgtcgggatgaacgcgacccgcttgccttgcggatgcggttcgacttcatgcacggcggacgaggcgttgcggaatatcgaagtcagcagcatcgtaaccataaaagccttcttcacatatcgactaggcgactatgcggcagtgtcggccttgaatatacggaagtgttcgtgcgttcgctctgggtatatccggcctgatcagcgggactcggccaatgtgatgccggccgccgtcatctgtttgcgggccgcgacaccgagctcctcgctgaccggtacggtcaggtcctcgaacacggtgacctcgaaaccgaacttcctggcatcgagcgcggtgtccttgacgcaatgcgattcggcgatgcccaccacatccacgcgactcacgccggcggccttcagcgcattggccagcgtcttgccggcggattgctcggccgcaacctcctcacgggtctggatacggtcggtattgtcctcgatgccctcaaaaccggaatatgccgccgaatactggcccttcttgaaatgatgatggataatcagcgccttgatcgccggatgcaattcggcgttcggcgtgccggccgcaccatgcttcggccacgtgtccacgaaatccggttccgccgaccagtgcgcgcccggctcgatatgccagtcctgcgtggttgcgatatacgcgtactcgctgcgatgcgcgttcacataatcggcgatccgctcggcgaccgcgttgccgccttcgactcccagttcgccgccttcacagaacgtcggctgcatatccaccacaatcagtgccttggtcatcatcattccccctattgccttggattcgttttgaatattgtctcgaactcgacgtgcgattgctctcatcatagccatgcgcggccctgtgggaaatgttcgggcttacactgcaagcagcaatcgaatacaagaaccaggggagggtgaccaagaccatgctggaccatctgacgttgcacgtgaaagacatcgaccgtagtatcacattctacaaacaggcgctcgcaccgctcggctatatcgtcaaggcgcatcatgagcccacgctcggattcggcgtggatgacggaaccctgcactccgatttctacgtgtcgccgattgacgggccggaggcggaggcttcgccggtcacgccggtcacacacatcgcgttcctggctgacagtcagcaagccgtgcaggcgttccatgcagccgcgctcgccgccggcggccgagacaacggcgctcccggtccgcgcccgtaccatcccggctattactccgcattcgtgctggacccggatggcaataacatcgaagccgtcgtggattgggctcattcgaacgagtaaaaatcatatccgtatcgtgcctcaggcggcatcgacggcgtaggctccagtcagtcggatttgtggtcgcgacggcgttataggtcacatcacgcaagcgtgacggtgacggtctgctcggcggtttcggtgccggtccatgtaccggctttgcggttccaattcatgccgtccgcgtgcagtgcgtcaatgccgtattgacgtgcatgcgtgaccagccagcctgccgtctgccagcaaagtcgagtgcggttgtcggcggacaggccgtccggcagtgtgatcgtcaacgttgtgctggccgtattggtcgcagcgccgttgttcgtgccgcttttgccatttgggggcgcaaccgagacactgacattcggcagtgtaccgcctatggcggcaaccagcccgtccgcgtccgaggagattgctggctccaacgcgcacgtgacgtccgccgaccgttcaccggtcagccccgaagcccaagcgcgtgccatcgcatcccatgtggcatatagttccgggtagcctgagcgctgcacctcctgcgcggcgtcctccaccggaatcgtctcccaatccggcacctgcagcagatggtcgtagaagatgtttgtcgcataggtcatgtcggacacctgctccgccgtgccccagccttggctgggccgctgttggaacaggccgagcgaatccaagtcgccgtagtccagattcgtcagcctcgactcctgcatggccgtggcgatggccaccgtcgccgcgtgatccggcagtccgcgcgtgacggcgatgttcgcaatcagcgccgcgttctgcgcctgatcaggcgtcaaggtgcggcgggctccgtcgggcgacaccgccgcgcaatatgcttcctcggccgtgcgcgcggtctcgtgaggcgtgaatagccgtggcagcagcgtccatgccgcgatcagcgccgcaacaacaagtatgacggctgcaatcagcgcgcccgcgccatgggagcggcgtctgccgcaccgcacctgttgtcccattgcgcctccaatatttcggtgtcatggctgaccgtgaccggctggcctatgcagcatgcgagatttgccgtgttccggctcggccgtcatcatgacagcgtggcatatccacctgaacggcggctgcgccatcacgcgactttgtgacaattcttcacgcttcctgacatccgcgcaatcagaccggggaatgatacaccgacatctctattgcaagttcgacgcggctgataagtcgattcgcaatcgtctatttgcgtttcaaggggctgatttgctcgttccgagacatccacttccgtttcgaggggctgatggccgagtagcgacagctccaaaacggtgaaatgacgttggcatgaagctattcgtacttgggttttggccaatgaccagccccttgaaacggaagtggatgtccccaaaccacgaaatcagcccctcgaaaccgagaatggcggtcgggattgctctgacaccaggggagctgctgccgctattgtgtgaaaggcgatttgtaccgggttgaaggagaggcacacatggcacaattgcagccgtactgcgcgattgagggcaatgatgatggattgcccgtcgtgttcgtgcatggcatgggtgtggaccatcgttcgctgatgatgctcgacaaggcgtttgacggcaatgattcaattcgccgtatatatctggatctgcccggtttcggccgtacgccggcattgcccgagcatgcctgcgggctgccggaaatggcggattggctacaaacggccattgacggccttgtcggtaaagcggctccattcgccatggtcggcaactcgatgggcggtgcgcttgtccgcgaagtattggcgcgcgaacctcgccgagtggccggtatggcattgatcgcgccggtcgtggacccgcagcataccggccggcatgtggccgaacatgtggttgcacagcccaatcccaagctgacgcactccttgccacaggaacaggtgttcgatttcattaccatgggcgtcaaccagtcattcgacgcgtggcggcgctaccaacggttcatcctgcccggcgtggcgttgtgcgaccgtgcggcatgcgaacgactggatcagcgttattggctggccgataatcccgaggaaatgctcggcacatatgcgggtccggtgctcatcgtcaccggcaagcaagaccagatcgtcggatacgaagaccagcaagccctgttgccgcactatcccaacgccaccttcgtgactctggataatgccggtcacaacgcgcacatcgaccaacccgaagccgtcatcacgctcgtgcgcgaatgggtggctcatatggcgttcgttccgttgagctgacggtctgctgacagtctgccgaagcctatatgcatatgagtgaccaatgccggttgacgcaatacgccttgcaaggtatatcgtttttcgatatagtcatatcgatgttcgcggtgtcgccaaaaacgtcggcacctgaaaggaccgggctatgaaaaactacatgaaccgatgggtgttgctcgcgttgaaagccatcgtgattctggtctggctggcctgcctatggggccaactattcgccgtaccgggattgagcggcgcgctggccggcctctgcccgagacagacgtcgatgcactggtcatatctcattatgggcgtgctattcctgctctgcatcgaagcggcgttcgtggccgtatggaaactgttctccttgtccggatcgggcgcgaacttgagcaggtgatttgagatgacgattcgcatcaatctcgacgtcatgatggccaaacgcaagattggcgtcgacgagctcgccgaacaaattggcatcacgcccgccaacgtgtccattctgaagaacggacgtgccaaagccgtccgcttcaccacattggacgccatctgcaaggcactcgactgccaacccggagacatcctcgaatgggaagatgtcgattgatcgacacgccaccggctcgaactcatggttcaacttgtagtctctctcaaaatcaatgatgccctatcatcctgcaagacgatagggcatcagcatgtgattatgcgcagctgatatgtcgcgttgttatcactcggcgtccgcggccggtgcctccttgggcgcggagaggaagtgctcctcgctgggcagcacggcgttcaggattacggccaccacgaacgacacggcgatgcagttcgaggcgaagatttgttggaacagtgccgggaactgcgcgaagatgtcgctcacctgggtgaagccgatgccgatggtcagcgaaagcgccgcaatcgtgatgttgcgctgcgtgaagcccgcttcggcgatcatctggaagcccgaaagaatgatgttgccgaacatcatgatcgtgcagccgccgagcaccgcctgcggcagcgagttgaacacctcggcgatggccggcacgaagctcgccagcaccagaatcagtccgccggagagaatcaccttgcggttgacgaccttggtcatggccaccaatccgatgttctgtgcgaacgaggtcagcggcaggcatccgaacaggccggatacggtggagatcaggccgtcgccggcgatggcgcccgcggtctcgcgttcggtgggcgtacggttcaggcccaccttggtcagcgcggcggtgtcacccagcacctcgaccgaggagacgacgtagagcaggccgatggagatgatcgaaccccagtcgaactcaggcttgaacggcatgaactgcggcacggacacaatagcgaggttctggaaaccggagaaatcgaccttgcccatgcagatggccgccacatagccgaccaccaggccgaacagcacggacagctgcttggccgtgcccttcatcaacagctggaacgccaggcaggcgaccaaagatataagcccgagcgtcaggttctgccagcttccgaagtccttggctccgctgccgccgccgaagctcgtggcacccacgttgagcagcgagaagccgatcgacgtgaccacgatggcggagacgatgggcggcacgaaccgacgccaatacttggccgtcaaacccagcacgagttccagcaggccaccgaccattaccgcgccggccactgcgccatagcccttgtctgcgcagatcgccacggcggccgccacgtaggtgaaggagatgccggtgaccatcggcagacgcgagccgatgagccacgcgccgtacagttgcaggcaggtgcccaggcccgccaccagaaggccggcctggatgatggtggccgattgggccggggtcattttcgcggccgaggcgacgatgaagatcggggcgaggttcgccacgaacatggccatcacatgctgcaggccgaacggaatgcccttccagaaggatactggcgcgtccagcgaagacaacgcctcaaaggatacggaatgattggttttcttctctgacatgattctcttcttctctctgttgctcccgccggcgggagcagccaatgtgctcagtgcctaaatgtgatttcgccggtctcgggattcatggactcgacgatggccagcgaatccacatcgtagccttcggcacgcagcgcgtcaccgccgccctggaagcccttctccacggcgatgccaatgccctcgaccgtgacaccggccgcctcgcacaggtcaatcagaccgcgcaacgccttgccgttggccagaaaatcgtcaataagcagcacatggtcgccggcgttcagatacttcttggccacgatcaccgggaactccttctgcttggtgaaggaatagaccgtggtggtgtactggtcgccgtcaaggttgatggactgcgccttcttggcgaacaccaccggcacattgccgaaatgctgggccgccacacacgcaatgccgatgccggacgcctcgatggtcagaatcttggtgatgtgcttgccgacgaaatgagcggcccatgccgaacccatgcggtcgaacagacgcacgtcgcactggtggttcagaaacgcgtccaccttgagcacatcacccgccttcaccgttccctcgctctggattcgctcctcaagttcctgcattagacctcccattgctgtatgtcagtgaatgatatggatacttgtaagtgtacgttgtcctgcgctgacccgtgcatgtggtaaacatgaatgtcgcgattcaaagggaggcaacagtgtacgacgagccggaagtcatcgcacgcagcgcgcaggaactcgtaggcgatctgaacccgcagcaggcggaagccgtgcaataccgcggtcaggcgctactgatcggcgccggtgccggctccggcaaaacccgtgtgctgacccgccgcatcgcctggatcttgagccagttcggcgcatggccgagccagattctggccatcaccttcaccaacaaggccgccgccgaaatgcgcgaacgactcggctcgctgatcggcccggtggcccagcgcatgtgggtctccaccttccattccgcctgcgtgcgcattctgaggcgcgacggcaagtccatcgggctcaagtccggcttctccatttatgattccgccgactccgagcgactcgtcaaaatcatcgccaccgaattcaacctcgacatcaagcgctacactccacgctcgatcctcggccatatctccgacctcaagaacaatctgaccggttggaaggaaaacctcgccgttcacgcgcccgacttcacgcctggccagcgcggctaccagttcggcacggtgggcgaccttgaagccatctatgcggtgatctacgccgaatacgagcatcgcttggccctggccaacgccgtcgacttcgacgatctgatcggccgcacggtcgagttgctgcgcaccgacccggccgtcgccgagtactaccatcaccgcttccgttacatcctcgtcgacgagtatcaggacaccaaccacgcccagtacgtgcttgtgcgcgagctggccggcgtggacacgggggagaaggccatcccgggcgcgccaaacgccggcaagtccggccccgcctggatcaccgtggtgggcgattccgaccagtccatctacgcgttccgtggcgccgacatccgcaacatccaggacttcgagcaggacttcccgaacgccaagaccatcatgctcgaacagaactatcgttcgacgcagaccattctggacgcggccaacgcggtgatcagcaacaacgagggccgcaagcccaagaaactgtggaccgcgctcggcaagggcgagccgatcgtcggctacgcggcggacaacgcccagcaggaggcccagtgggtggccaccgaaatcgcgcgcctgcacgccgaagagggcatctcctactccgacatggcgatcatgtaccgcgccaacgcccaatcccgctcgctcgaagaggcgctgatcaacacgaatcagccgtatcagctcgtcggcggcaccaagttctacgaacgtcgcgaaatcaaggatgcgctggcctatttgcaggcgctcgtcaatccggacgacgatgtgaatctacgtcgtattctcaacgtgcccaagcgcgggcttggcgaccgcgccgaaggcgtgctgctcgcctacgcgcgcgagcatggcaccagcttcttctacgcactcatgcacttggatgagatcgaggtgccgacccgcaccgccacctcgctacgagcattccgcgatctgatgggcgcgctctcgcagttcacgcacgcgcacgactccaagcccagcgagatcgtggccgaagtattggagaagtcgggcttaagggccgaacttgagaaatccgtggatccgcaggacgcctcccgtctggagaacctctcccagctgcagtccaccgcagccgaattcgaacagaacacgcctgacgccacgttatccgcattcctggagaccactgcgctcgtggccgactccgaccagctgcccggtgaggcggaggactccggcaaggtgacgctcatgaccttgcacaccgccaagggcctcgaatacccggtggtgttcctgaccggcatggaacagggcaccttcccgcattcgcgttcgatggaagacaccactgaactgcaggaggaacgccgactcgcctatgtgggcatcacgcgtgccaagcagagactgtatgtcacgcgcgccgccgtccgctcccagtggggccaggccgccgatatgatgcccagtcaattcctcgacgaaattccggattcgctgattgattggaaacgccgtgaagccggcgtggagcgtatgcgcgccaactgggagaccgatggattcgccgacgatttgggcggctgggatgatgacgatttcggcggtgccacgtttggtgggtcgtcgacgttcggctcgcgtggttcgtccggttcgggttcgtcctatgggtcgcggtcgcggtatgggtcgtcgtatggctcgggttccggctcctcgtcgtatggttcccgttcaggttcttcgtacggttcccgttcatcatcatatgattcccgctccggctcgtcctcctacgggtctcgctcccgttcggggtcgtcttacgggtcgcgttcccgttccggttcttcatccggttcatatggcggcacccgtggcggcaaggtcaccacgcgccgcaccacaccgaaatccggttcgaccggctctgccgtgcccagctcgaagctcaccaaggacaatggcctgaatatcgccgacttcgccgtgggcgacatgatcagccacgaccagtacggtctcggcaaggtcaccgacgcgcaagacaagggccgcaattcggtaatcaccgtggacttcggctccgccggcgtcaaacgcctcatgctccgcgtagcacctattgagaagttgtagatagattggcccctctgacgaggggctgagttatataccaaataaattcacaaaaaacaagacttgtgttcttcatcactatctgggcataatgcggaggttgcgcctacgagccctgggaacaggggagaggaaaaagtagttatgaagaacaagctgtttgcatccgtgcccaatattctgttcggcgcgctgatcaccatcgcgccccagacctttgcgcacgcctgcaccggccatgacatgccgggtgcctgccactactcgcagcaggcggccaccggcatcggcgtcgtcatcctcgtgttgggcgtcgtggctttgttcgtcgccccgcagattcgcatcggcctcaatatcgccgccgcagccaacgccctgctactactcgccgtacccaccttcctgatcggcatctgcaagggcgcgatgatgcactgccgcatggttatgctgcccacgctcatcgtgctcggcgtgctcaccatcgtgttcgcggccatcgccatctggctcgactctcgcgccgccaagcgcaactgatcgagcagacggccggagcccagccattccgaacgctggactccggtctcgcttattgcaaccgcactataagcaacataaggactcatcgtgccatcccatatcgcattgcgcggccttccgattgaaaacctcaaacgcaagccgttccgcaccggcgcactgctctccgtcgtcaccatcctcgcgctgacgttcttcggcggcaccatgctgaccatgaacctcaacaccggaatgaccagtatggagaagcgcctgggcgccgaccttatggtcgtgccgcaaaacaccgcgcagaaggctgaagcgctgctcaccagcggcaatcccagcactttctatttcaccaaagacatcgccgacgaggtcatgcaggccgacggcatcgcacaggccaccgaacagacctatatatcatcgctggccgccgcctgctgtgccgaaaagctgcagatcatcggttacgacccggacactgacttcgtcatcgaaccatgggtcgcatcccagttcgaaggcccccttgaagacggtcagatgattgccggcgcaaacgtcaacgtgtccaccgacggcaccatcgaactctacggccataagtggccggtcgtcgcccagctcgccaacaccggcaccagcctcgacaattcggtgttcatcaaccaaaacaccgtgcctgatatggttgccgcctcggccaaggtctccaagcaggtcatgcccgccgaatatgcaggcgaagccgtctccaccgtgatgatcaagacgcagcggggttacgaagcgcagaccgtggctgaaaacatcaagcgtcttgactcccggttcgccgatttggggtacgtataccccggcggcatcaccgccaacaccagaacttcgctgaccgcgcttgtcacctacctcaagattttcgtggcggtgatctgggtaatgggcgtgattgtgctgctcgccgtattcgcctcgtcggtgaacgaacgcaaacgcgaattcgcgtccctgcgcatcatgggcgccacgcgcggcatgttgaatgccatcattctgaaggaatccgccatcatcggtctgatcggtggcgtaatcggcgtcggcgcggccagcctggtgattttcccattcagttcgctgatcggcaagcagcttcaattgccgtatctgcaagccagcccggttgcggtgatcggattcgttgccgtgaccattgtgtgctctacggtcatcggcatcatcggttcgctggccaccatgtggcgtctcggccggcccgaagcctacctgaccctgcgagagggggagtgatatgactgagacaactacgccgactcagctgaccacggttgagccgaccaagctccagccgaccacgccagctcagccgaacgcgccgactgcgccggattcgccgcacgtaaccgagacgccctccccggaccatctgctgaccttgacggacctgacccgccagttcgtccgccgcggcacgccgttcgacgccgtcagccacgtgaacctcaccgtcgatgccggcgaattcatcgccatcgtcggccggtcgggcaacggcaaaagcacgctgatcaacatggtcgccgggctgattcgcccgacctcgggaaccgtgagcgtggctggacgcaatgtggccgacttgggcgataaagcactgtccgtgctgaggaatcgcaccatcggattcgtgacccaaagccagaccctgctcggcaacctgaccgtgctcgacaacgtgattctgcccgcaacgatgtttccggagccgctgccgttcgcccaaaacgcagaagcaacggatgccgttgctcaggtggacgctgttgcgtcgaccgatgccgtggcacaagccgctgccaccaatgatgaagcagccgccgacccgttcatgccggatgtcattgcgccaatcacagaccgggaaaacacgccgtcaaacacggctgcgagccgtccggacctgttcgccacccgagctcgcatgctgctcacccagcttggtgtcgccgatctggcagacagctacccgcgcgagctgtccggcggtgaaatgcggcgcgtctccatcgcccgcgcgctgatgaaccagccgagcctgctcatcgccgacgagccgaccggcgacctcgaccaggagagcaccgacatcgtaatgcgtctgctcagagaccaagccaacaacggcacggcgattctcatggtcacccatgatcccgatgcactcgaatacgcagaccgggtgtatcgcatggacgccggagtgctgtccatagcctcggtgtaatatagtctgctggtgtctgccaacaggtagataccgtctggagtcatagcccatcagcgggtcggcggtaggtgatcgcaagaaaaccaacccgttcgtgttcgttcacgacgaagcgctggggaggcccggctcagcgcttgccaggcatatgcaaggcaagcgttccgttcagataacgacagaaggattaatccaatgacgaacgttcagcgttctcgccgtcaggtgcgtctgtctcgcgccctcggcatcgcactgacccccaaggctcagcgcatcttcgaaaagcgtccgtacgctcctggcgagcacggccgtgaccgccgccgcaccgagtccgattacgcggtgcgtatgcgcgaaaagcagcgtctgcgcgctcagtacggcatctccgagaagcagcttcgcgccgcttacgagaaggccacccgtactgccggccagaccggtaacgccatgctgaccgacctcgagacccgtctcgacaacctggtgctgcgtgccggcttcgcccgcaccaccgcccaggcccgtcagttcgtggtgcaccgtcacatcctcgttgacggcaacatcgtggaccgcccgtcctaccgcgtcaagcccggccagaccattcaggtgaaggccaagagccagaccatggttccgttccagatcgccgccgaaggcgtgcaccgtgacgtgctgcctgcggtccccggctacctcgacgtgaacctgccgtccctgaaggccactgtgacccgtaagccggaggtcgaagagatcccggtgcaggtcaacatccagtacgtggtcgaattctacgcccgctgatccgggccctctggtcaacaaatccaggacataccgctcgaaccccgcgcttctttcgagaagccgcggggttcctgcgttgtagggcgattactggccgcacaccgcctgacgaatcatcgtcgcgtacgcataggcaccggtcatattcggatgaatgccgtcatcgttgaggtattcgctatgaccttcgctatacccatgccaatcgatgatgcccacgttcttgttcttcttggcggcctcacgcagcatcgtattgttgttgttctcctgccacgggtatggcatacggatggtgatgaagtatgtcggcttgccgccggtcaggtcaatgagctgttgcacttcctgctcattcgaaatcacgccgttcgtgccgaggccaaacaccaccacactgccactgtggccggcagcggtgtcctgctgatacacatccaccgcctgcggcatctgacggttcggcaggccatcgataaaagcgttcgggaatgcggcctggatggcgtccgaagtacccgacgtcactgaatcgccgaccatcatcatatccgcgttgcagctttccgttgccggatcataggcgtacttcgaaatgtcaagattgtttggcaccttttccgcaatcggtttgatggtgggcggctgagaatccgaaccgttcttattcgcgtcagcggtattggtttcgccgttcgcggcattcgtggcagaagactcgggctcgggcttcgccggtttcttgaccggcttggcgggtgccgcgagttcggggcgcagctgaatggctcgcgcttgagcgatgccattccaatccaccggtgcccacgtcagcaccacaacggtcaccaatccgataaccgacatgacccacgcgcccgggcgcagctggtagccggctttcggcagcggcttggcatgttggctgcgaggcatctgcaccgatttacgggccgcctcgaccagctggtagaaggcttccgacgccgccaacaccacgatggcctcaagaacccaaccccaccacggcaacgcctgcgttcgtgtcgccgggttcatgaactgcagcagcggataatgcatgacgtacagcgagaacgatcgcgacccgatatagcgtaggggagcgcaacccagcacgcgcgaccagattgagtcattgttcacggcacaggccaaggcgcacaacgatatgaacgcggtaatcaggtacccgccttggtacatgtacgacagatacccgttggcgaaccagaatccggccagcagtgccgccaaagccgcggtgccaagaacattgcagacgatagtgagacgggcgcccgtcttgtcgccggcctgacgtccgatctgcactgtttgcgaagccgctccagcttccgcaacttccgtacctcgcgaggaaggcgcaatccagatagccaacagcgcgccggcggccagctcggcgagacgagtatcggtaccgtaatacacgcgggaggtattggccgggtcaaacagcagcaccatggcggcggtggaagcagccatgatgacaagaatcgccatggagcgcacccatttggacttggtgattttgccgagcaccaccatcagcaacggccaaatcagatagaactgcatcgtcacgcccaagaaccacagatgggtcagaggagaaggcaatccggccgcctcgaaatacggcaccttgcggaagatgtacacccaattgctggcgaacaaggcgctcggcagcgaatcggaaaccactttctgcaacaggctgggagcgaacatccaagtgagccaaggcaccacggcaatggtcgccagcatcaccggccataaacgagtaatgcggcggatcagatatcggccatatccaaaggacccggtgcggtccaccatgttcagtactgaacgtgtggcaagaaaaccggtgataacgaaaaacatcgtcacgccaatgaatccgccctgcaatagcgacgggcgggtgtggaatgctatgactccaagaatcgccagagcgcgcagtccatcgatacccctgaaatgggcaggctcagacgattgagatggtgcaggtttcgaggttatgctcatagtaccctaagtgtactctcaggaatcgtcaggtatactacccggattacgcatatctcaggtagtgacctatgccgttatgacttatgacttccggcagcccgcaccgaaaccgccggaatggtgacataatcggaaccatgattcttcatctgcatttggtccgtcacggacagacctatttcaaccgatacaaccgtctgcagggatggtcgaattcgccgctgaccgagtcgggcgtcgctgatgccgtcaaggccggtgagcgactgaaaggattgacgttcaccgccgcctactgttcggacaccacgcgtgcccggcagacggccgagaaaattctcgacatcaacgaagccgcgggtaacccgcgccccgcactcgtgacggacatgcacttccgcgagcagttctacggctactacgagggacttgacatggccatggcctggtacgccgcgggagcgcctcacggcgccaaaacctacaaccaaatcgtcgagaagttcgggttgggggcctcgcgtgattttctcaaggaagccgatcccttccacgatgcggaatccgatgaggaatattggacgcgcgtcgaaggcgcgttccgtcttatcgccgacaacccgaatctcaaggatggcgacgatgtgctgcagatttcgcatggcaacacactgcttagcctcggccaccggttcggcggccctgacctcgatctgaacgaacgcccggccaatggttcggtaaccgtgctcgacttcgacaccgacaagccgttcggcgaggccgtgaccatcgtttcgtacggcaagtagcaaatagcaagcaatacatatcgaatagcacgtacggtccacggcggcacgccgcaaacgaaagcgtcagcaggacacctttcgcctatagtcgcatgcatccacgcgcacggttttcgccctgcgcgtgcaatggtatgccaagaaatagggaaggagtgctacccttaggcgagtaagtgtgaccgcaaggaggaaacaatgggagtcggagagatcgctggcctgatcgcggccatcgcgttcgcagtattggccggtttcatgatctatccgctgatcaggctgggcaagatgtttgatcagatatcgcagacggtccgggagtccggcgaacacgccatccccgcgctggacgaaggcgtgaccaccgtcaagcaggtcaacaagtcgcttgaagacgtgaacaagatttccgccgcggcttccaccaccgccaacaacgttggtgcgttgactgatctgtatggctctttcctcggtaagcccatcatcaagatcgcttccaccttctacgcgctgaaaaccacgggtcagtccttccttgcgaagaacgccgcgaaaaccaccgtcaacgacaccgccgagaagggggagtgatgttcaaacgcatcttctgggtcggcgtcggcgtggccatcggaatcgttgccgtcaccaaggcacaggcctatgtcaaggccaatacgcctgatgcggcacgccagttcctgcttggccccgatcaggacaatgtgccgatgaaaacactcgaagggttggtcaacgagttcaatgccgcccgtcgagcccgcgaggctgagctcaaccgtcagtacatcgagcgcgccaactgacacgcgcatgccgccttgccatctagtcactgaaccagctagaacaaactagtcctcataatccagtctttttccaccaataccaggcgcaactgcgcccattacccaaacaaggagttcatccgctcatgcgcactgcggacatcgcaaagcgatacctcgattactttgccaaacatgatcatctcgtcatgccttcggcatccctgatttccccgaaccccaccacgctgttcaccatcgccggcatggtgccgttcattccctaccttcttggtgagcagaccccgccgaagcgccgcatgacatcgaaccagaagtgcgttcgtacgctggatatcgatgaggtcggcaagaccacccgccatggcaccttcttccagatgcttggcaacttctccatcggcgactacttcaaggaagaggccatccactacgcctgggagctgctgaccaccccgcagagcgagggcggttacggctttgacccggaaaagctgtgggtcaccacctttaccgacgatgaagaggcccgttccatctggaagaacgagggcttcgatcccgagcacatgcagattttcggcatggaagacaacttctggaccaccggtggccctggccctggtggcccctgctccgagatctacgtggaccgcggccccgaatacggtcgtgatggcggtcccgcggccgatgagacgcgcttcatcgagatctgggacctcgtgttcgagaactacgaggtcgacaatgtcaagtccaagaccgacctgcacatcgtcggcgagcttgcccagaagaacatcgataccggtgccggtctggaacgcttggcctacctgatgcagggcaagcagaacatctacgagaccgatgaggtcttcccggtcatcgaggccgccgagcgcttgtccggccgcaagtacggcgaggacgaggccgcggatgtcaagttccgtgtcgtggccgatcacgtgcgttccgcgctgatgattatgtccgatggcgtgcgcccgtccaacgtcggccgcggctacgtgctgcgtcgcctgctgcgtcgcaccgtgcaggccatgcgtgtactcggtgtgaccgatccggtgattcccgagctgctgcctgtctccaaggaggccatggtcgccagctacccggagcttaacgacaccttccacgatgtctccgaagcggcctacggcgaggaagatgcgttccgtcgtacgctggagaacggcatcgagattctcgacgtggctgtcaagaaggccaagaagaccgccgacccggtggtctctggctctgatgcgttcactctgcacgacacttacggcttcccgattgagctgaccctcgaaatggccgccgatcagggcgtgaaggtggacgaggccaagttccgcgaactcatggccgagcagaagtcccgcgcccgcgccgacgccctcaagaagcgtcacaacgtggatctttccgtttacgacgacttcaagaagacgctcgtcagcccgatcgacttcctcggctacacggatatgtccgcccgcgccaaggtcatcggcatcatgcaggaaggcaagggctccgtgcccgccgtcaccggcccggccaacgtcgaagtcattctcgaccgtaccccgttctatgcggaggccggcggccagcttgccgatcagggcgagatcctgtccgacgacggtgcagtgctcgaagtcgacgacgtgcagaagcccatcaaggacctcatcgtccaccagtgccgtctgaccgaaggcacgctggtcgtcggcgccgaagtcaacgccaacatcgacctggcccgccgtggcgccatcgcccgctcgcacaccgccacgcacatggtgcacaaggcgctgcgtgaggagctcggcccgcaggccacccagcgcggctccgaggacgccccgaaccgtctgcgcttcgacttccagtggtccaaggccccggccaagtccgtgatctccgcagtcgaggagcgcgtcaacgacaagctgcgcgacaacctcgccgtgaccaccaaggaaatgaagttcgacgacgccatcgccctcggtgccatgcacctgttcggcgagaagtacggcgacatcgtacgcgtggtctccatcggcgaagacggctggagccgcgagctgtgtggtggtacccacgtggaccacgtcggcaagatcggcatggtcaacatcctgtccgaagcctccatcggctccggcgtgcgtcgtgtcgacgccgtcgtgggccagggtgcctatgacttcaacgctcgtgagcacgcgttggtctcccagctgtccgacaagctcaacgctcgcccggacgagctcgccgagcgtgtgaacgccctgctcgccaagctcaaggaatccgatcgtcgcttggcctccatgtacgagtcccagctggctgcctcggttccggcgttggttgctgacaccaagaactccgcggccccggtcaaggtggccgtcaagaacgtgggccacttcggcgcggtcgacgccctgcgcaagaccgtactcgacgtgcgcgcccagctcggtgaagacgcccccgtggtggtggccctcgccggcgtgaacgaggatgacaagccgatggtcgccgtggccaccaacgaggccgcccgcaaggtcggcatcaaggccggtgatctggtgcgtggcgcagccaaggtcctcggcggcggtggcggcggcaagccggacttcgcccagggtggcggtgtcgatgcctccaagatcgacgaggccctcgaagcgctcgagcacgaggcgcagaaagcctgattccgccagtggtgtggttaggcgttgatttgggtaatgcccgggtcggactggcactgtccgacccggagcttacctttgcacaccctgctggcaacattcatgttgccggcgactatttctttgctattgacgaggtcctgaacgtcatcgaagacgaacatgtggaccatgtaatcgtcggactgcccctgcagatggacggtacagaaggcaaaagcgccaaaaaagcgcgcaggtgggcggccaatctggagaagaggctgcaagcagagagtgaagacagtgattctacggagtatcagattccgcaggtatcattgatagatgagagattgacaacagtcagtgcgcatcgtcaactgttcgaggcccataaagcttcgaacaagcacaggccggtggttgaccagcagtcggcagtggtgattttgcagacggcactcgaccgtacccgggagcagtgaggtatcggttatgaccgatgattttaacgagttctttgatgacaacacgcattgggtcgaacaggggtcagaaccaatgcgcgggaccgagccgccagaaccgccgaaatcccgcaaggagatgcgcaagcgacgtgcacagcgcaagcgcaagcgcgtcagtggcattatcatcgctatcgccatcgtcgccctgcttatcggcggcggctatttcggcgtaaccaagctcatcgcatggcgcgacagccggagcaaccagtcgacggccatcgcggactatcggggaccgggctatggcgaggtcgaattcaccgtgagcgagggccaaggcgcggcggagatcgccgataatctgctcaaggccgaagtcatcaagtccactgccgcgttcaccagcgtggtcaacgccaatagcgcgacactctatccgggaacgttcacattgaagaagcatatggccgcatccgatgtgatcgccgttctctccgacaccaaccaggcggcgggcttccttgaggttcatcccggtgaacgtgctaccgatgtgttcgccgacgccgcgaagctttccggcgttgcccaaagcgaattcgacacgattatcaagaacaagggtaaggatattctgcccaatgaagcgggcggtagctttgagggatggctggagccgggaacctacaacgtcaagagcatgaagagcgcttcggaaatcctcaaggccatggtcgataagcgtatcgccaagttggatgaattgggcgtgccgaccggcagtgaccgcgaacgggtgatgatcatcgcctctatcgccgaggccgaggtcaacaaagccgattactacggcaaagtgacgcgagtcatcgagaaccgtttggagcagggcatgtcgttgggcatggattccaccgtggcctatggcaataacgtcaagcccgcgcaggtgaccaccgagatgacccaagacgagtccaacccgtacaacacgtacaagatctccggcctgccgcctacgccgatcagcaatcccggcgatagcgccattcaagcggcactgcaccccgaaagcggcaattggctgtacttctgcacggtcaatctggacaccggcgaaaccaagttcgccgcaaccgccgatgaacatgaccagaacgtggccgaactacgcaagtggcaagccgaaaaccagtagtcgcctcattggctcccctcgccgaggggagctgtccgcaaagcggactgaggggagtaacgggattaagccccaacaaccaccgccacaatcgcgcccgccaatatcaccggcacatacggcaccttgcccgcatgtgccggtgatgtgcgttgtgggtcgaatcgcgtccacagggcaatccatgtgatgccggcaacgcccatcgccagccaccagaccaccacaggcaacaggccaaacagtccgacagacaatcccataggtatcaaggcggtcacatcgccgaatcccaatgaccgcggcaccagcaacgccaacgcgaactggatcaggcaacatagcacggtgaacaacagcgcctgcaacagcacgaacaggtcgttcgccaccactccatgcgcgaaatcggcggccaactggattaacgcgcccacggccacccatgcgatcggcacccgccgatgacgaacatcctcaatggacagtgcaagcccacatagcagaccgggtagcgtgaacaggtatggcatggcttaacattaacccctagttagacgtacacatagacgtacacacatgaaacgagggaagttatgctgcgttggcagacggcaggggagtctcacggagaagcattggtggccatgattgaagggttgccggccggcgtgcgcattagcacggacgatatcgtttccgcactggcacgccgtcgacttggatatggccgtggtgcccgcatgaagttcgagcaagacaaggtccgtctgctgaccggtgtacgccacggcctgaccctcggctcgccggtggccatcgaaatcgccaacaccgaatggccgaagtggaccgaggtcatgagcgccgatgcactcgaccatgacctgccgcgcgaaggccgcaatgcgccgctgagccgcccgcgcccgggccacgccgatctgaccggcatgcgcaagtatggttttgacgacgcccgcccggtactggagcgctccagcgcccgtgagaccgcctcccgtgtggccttgggcgaggtggccaagcagttcctggatcaggcgttcggcattcgcaccgtagcccacgtggtggcgctcggtggcgtgcagaccaaccctgatttgccgttgcccacacctgacgatctggaagcgttggatgcctctcccgtgcgtacgttggataaagaggccgaggcccgcatcatcgaacgcatcaacgaggccaagaaggccgccgacacgttgggcggcgtgattgaagtgctggcttacggcgtgcctgccggcatcggcacgtatgtggaatccgaccgtcgtctggacgcggctctggcctccgcgattatgggcattcaggcgttcaagggtgtggagatcggcgacggcttcctggaagcctcccgccccggttcgcaggcgcacgatgagatcgtggtcaacgccgacggccgcatcgaccgtctgtccaaccgcgcaggcggcattgaaggcggtatgtccaatggccaggtgattcgcgtacgcggtgccatgaagccgattccgtccatccccaaggccctgcgtacggtcgacgtgctgaccggcgaatccgcacaagccatcaaccagcgttccgacagcaccgccgtgcctgcggcatccgtggtggccgaggccatggtgcgtctgactttggcgaagtacgcgctggataagttcggtggagacagtgttgccgaaacacggcgcaaccttgagtcgtatctcgcctcgtggccggagcacatgcgctgaacgaagtggagtatggttccgagacgactgccgcggaaccatcagcaactgtacccaccaatcgtcgagaggattcgtagattatgaccgcacgcccccgcgccgtcatcatcggcatgatgggagccggcaaaacacgtgtcggtaaggaagtggcgcatatgttgcgtctgccgttcgccgatgccgatgtggagatcgaacgtgaagtgggcatgaagattcccgcctacttcgatgaatacggtgagccggcattccgcgaggtcgaggccgatctcatcgccgatatgcttgaggatttcgacggtatcttttcgctgggcggtggcgctcccatgacgccatccacccagcatgccctcgcctc

SEQ ID NO: 190 - DNA, 60683 bp, Unknown
  R101_18m  MAG No. k141_13819
caactcaacggagaaaccccacccacgaaaacagcaatagcgccctatttagaagtgcaacatccttgttgtttcgttaatgatggcagttcgtcggcgaatgcctcggccggggtgcggtagccgagcacgcgcatgggacggttgtcgatctcgtccacgatggtctgtatctcgttggccatggacgggtcgatgcgcgtgcgtttgggcaggtagcggcggatcgcgctgttgcggttctcgttgccgccgcgccggcacgacgagtacgggtcggcgaagtaggtggccatgccgagccgttcgcgcagttccgcgtggcgggcgaactcggtgccgttgtcgtgcgtgacgccggtcctggccccggccaggcagcgcggagaacatgaggaaccgcgctccgacgctttcgcgggcggtcttgtcgggcacgatgcgcgccataaggaaacgcgtgcgcctttcgacctcggtgtgcgggttgcatcccacgccgatgacgctgtcggcctgccgctcgccgaaccgggaacggtcggatggcccgcagggcctctcgtggatggatgtcctgagcggtatgcggctcccggccgcgccccggcccttcgccctgcgcctgcggcgatggcccctcggcggatggcgtgaccagcgttcgcggcgcgccttgtcggcgtagacccaccggtatatggtctccgggcggcagcgcatcgattcgtcgccggggtgctccggcctcagccggctgctgaccggcagcggcgaccagcccctacgcagccgttcggccgcccacgcccacaggcgttccgaggcgagccggtacggcttgcgggtcctggcgcggcggcgttcggccttccggcgcgcggggccggcgatgtgacaccggccggtccacggcctcgtcttgagacgctccggccggtacggccggtaggattcgttctcgttggacgggaaccctgtgttgcgtttgatttcgcggctgaccgtggaggcgtgtctgccgatcaggccggcgatccgccgtatgctcgtcccgttgccgatctctatctggatgatctgccgttcctcttccgacaggtgcgaatgcacttgacccaaggtgcgacgccctttcactggttatctggacaatctccaatttaaagggtgttgcactttcatctagacaacggaggcaagcgtcgttcggcagggttgctagtagggtagtactactaccatgacactgcttcaggcctgttgcaggaggaggaacattgaagctgttcagcaagaggaaccgtgtgctgctgcatgagctgacggtcaccgatttcaagctgcgctaccagcagtcagcgcttggctacctgtggtcgattctcaagccgctcatgttgttcgcggtgatgtacatcgtgttcgccaagttcctggcgatgggtggagacattccgaactatgccgtctacttgttggccggcatctcgttctggaccttcttcgccgaagcgactacgcaaggtctgcaggcgatcgtatcgcgtggcgacctcatccgtaagatcaacttccccaagtacatcatcgttctttctggaacgatctccgcgctcatcaacctgttcttcaacttgctggtggtgcttgtgttcgctttgctgaccggagtgaagttccgttggacagtcctgttgctgccgctgaacattcttgaaatgtacctgctggcgttgggcattggtctgatgctgggatcgctgttcgtcaaatatcgtgacgtcggctacctctgggaagtcgctctgcagctcttcttctacggtacgcccatcatttacccgattacgatggtgagtgcgacgcatccgtttatggcgaagctgatgatgctgagtcctatggcacaggtcattcaggatatccgatacaacttggttacggactacacgcagaccttgtggtccatgtgggggactcctctgatcggcttggtcccgctaggtatcgtgctggtggttttggcgttcggagcttggtacttcggaaagagttccaagaagtttgctgaggtgatgtgacgatgtctgattccaagaagaccaaagaagttgccattcaggtttcccatgtctccaaaagcttcaaactgcctttggagaaggcctccagtctgaagcaggccatcttcaatacgttaagcggtaagaaaggatacgaggaacatcaggttctccgggacatcaccttcaccatcaacaagggcgatttcatcggtatcgtcggtaggaacggtagcggtaagagcacgctgctgaagctgatggctcagatttattacccggagacaggcgatatcaccgttaacggtgtcctcgtgcctttcatcgagctgggtgtcggtttcagtcccgaactcacaggacatgacaacgtgtaccttaatggcgcgttgatgggattctccgccaaagaaatcgatgcgatgtacgatgacatcgtcgatttcgctgaacttggcgagttcatggagcagaagatcaagaactactccagcggcatgctggtgcgtttggccttctccatggcgattcgtgcacagtcggacatccttctcctcgacgagattcttgccgtcggtgacgaagcgttccagcgtaagtgttatgcatacttcgccaaactccgccgtgagaagaagacggttattctagtgacacattccatggactccgtgcagcgtttctgcaatcgcgcgattctgattcacgacggtgacctgaagatcgatggttccccgctggaagtcgcccaggcatatcaggaactcaacaaccagcgcttggatctggctagcctggaagagcagttcgccggcacgagcgccgatgccgaacgcaagcaagagcaggaagaggctgcgcgccagcgccgagagaacgtggacgtcgctgtaactcacagcgtgagccaggacaagctgaccttcgatattgatctcgagccgaagcgcactttggaggatgccgtcttcacgttcgtcatcaacagtgaagtcggcgagattgtgttccgtgtggcttcagacgacaagaacgtcaatcagaccattgacttcaccgaagggcataagtcgcatatccacttggagatagacaacatcttccccaacggcatcttctcggtgcaggtcgccgttaagaagtccgatcgtagcgacaactacctcatggccaataatgtgctgctcttcgaggtgcacgctcccgttgatgtcagccagaactggaagcctccgttcgatttcatcgtcacctcgcagaaaggttaatgatgcagtacggccttttctcatacgagaccgaaaatatcggtgatgagattcagagcatcgctgccagacgtttcctcccggcagtggacacgtacgtagatcgtgactatgtcggacaatgggagccgcagggcgatacgaaaatcatcatgaacggatggttcatgcatcccccgtatgcatggccgccgaaaagcgagtcgattcatccgctgctggtctccatgtatgtggatcaggctgattcacgagttggcgaagcgttcttctcttctgaaagcgtggcgtacctcaacagccatggacctgtcggggcaagggatatgtctacgttggagtttctgcgcaagcacggggtcgaatcatatttctcggggtgtatgaccctgacacttcaagctgacccgacgattgagaagcaggactacattcttgctgtcgatcttcctgaagccgtggtcgaaatgctgcgtcagaagacgaagcgtcctgtaatcgagtcctctccttacttcgacacgaacatgagccgggaagaccggttccagatggccgagtacttcctgttcctctaccagtcagcgcatgcggtcgtggccacacgtctgcatgccatgctgccgtctctcgccttaggaactccagtgttccttgtcatggatcatctgaagtacgattcccgcaggtatgcaggtctggatgatttggtgaacaaagcaacggatgttgattatttgaacgactataatttgttcgatgttgacaaccccccggctaatccggataagtatctgtcgattcgtgaaaagctgattgctgatgtttctgcttttaccggatacaacaatgataaaacgttccgcacagtcgatttctcacgtatcgcgatgaacgaagcttatgtgcgtcttttcacgcgaggcttccattccctgaatagggcgttgctgttggctggggataaagcctggctgcaggagaaatacgacgatttgtatctccattacgcggacctgcaaaagaattacgcggacctgcaaaagaactatgaacagctggttgctgtctgtaacctgcagaaccaagagaaagagcggctgtcggctcagctcgatgcggtttatcattccaggacttggaaagccggtagggcagtgtccgcgcctgttcgtctgattaagagaattatcgggaagtgattatgggatacattgcggcattcttccagtacgttcgccataacggtctgaaaacagctattggtcgtacccttggcttcatcaagcgtaagatcaagcgtgcgcctgttgttcagaacgttgtggtcaagcgtcccattgacgtgatgacatccgcggaagatgttgtcgcggctgattttgtcgctcatccgtataagacaccggcgaaggtgaacaaggccaagctcaatatcggctgggttctgtctcccatcagtgtcggtagcggcggtcagcataccattgcacgctttgctaagtccttgcaggaacgcggtcataatgttacattcttcatttatgaaagcactgtgcagcagccggcggaatactcgcataaattgcttaaggatcatttcgacatcgacgtgaagtgcgtgccagtcaaggacattgacaagagtgatttggatgttctcttcgctactggttgggaaaccgcgtacccggtgttcaatatgaaggccaaggtccataagatgtattttgtgcaggattatgagccgttgttctatggtatgggttccaagtccgtgctcgccgagaacacttaccgattcggtttctacggtgtcactgctggacgttggctcaccaagaaggtaggcgagttcagtatgcccgctgactactttgattttggcgctgaccttgatatctataaaccgaagaccaaggagcctaagaaaaagcagatctgtttctacggccgtcctgtgacggaacgtagggcttttgaaatcggtgtgcttgcgttgacaaagttccaccagatgcaccccgactacagcattgtgttctttggttgggatgtgtcggactttgatatcccgttcccctacgagaaccgaggtatcgtgagtccggctcagctcgcggaaatctaccatgagtctcaagcgtgtctggtgctttccctcaccaatgcgtccttgcttccgttggagttgttggcggctggatgtgtaccggtgatgaatgacggcgacaacaaccgcatggtcatcggagagaacccggacatcgtgtacacgctcgattctccgatcgaacttgcccacgggcttgacaaggtcgtcaacgattcggacatcgaagcgcgctgccaacgcatctccaagagagcggaaagctcttcctgggatgcctcctatgagaagttcgaacgtatcattcttagagaggccaccgtacagaatcatgactgacatcaaagccaccgtcttcattcccacctattacggcgaggataatctggatgagttgttcactgcattgcataagcagaaggtggacttcgaatacgagattctcgtcattgacaccagctccaaggatcgcacgcccgagatcatcagatcttgggcaccgaaattccggcatttccggtacgagaccatcaccaaaccggaattttcccacggcagggtgcgtcagcaggctgcggagaaggcgcgtggcgaatatgtcatctacctcacgcaggatgccactcccgcccatgatcgttggctgtacgagatcattcagccgctggagcgtttcccacaggtcgtgggcgtgatgggtaagcaggatccgcgtgccaccgcgctaccgctgctgaaggaggagatcatccgcacgttcaagcagttcggcccggacttcggtaccacactgttctatgatgatgactttattgactcgcaacagctcttcgacctcgtcacgttctactcggacgtgaactcggccgcgcgcaaatccgtgctgttgtgcgacgtcccctatcaggatattccctatgccgaggaccagaagttcggcgaggacctcatccgtcatgggtacatgaaggcctatgcccctcgtgcgaatgtgtggcacaccaacgagattaagctacgtgactacaggaagcgtatgttcgacgaaatcgtgggagttcgtcgcgtaggcaaaaccatggatccgatttccatcgcgttcgttgtcaagcaggtcgtgcgtgccttcacgttgggttcgttgttcattctgcgtgaccggcaatacacatggaagcgcaagttgtattggcttgctctcaatccgttgttcgttatcgagaaatggaaaggcgttcgtgccgccatcgccgtcaatttggaggacgaacaggcgattgctgcgcagtcgctggaaagcagcgaacagcagaagcacgaaagctgagcggtgagtatgctgcaatgcatggggtacgaactgcattgcagcatgcacagatcagcatgggatgaatgaagaattcggattgatagggaaacgatgcgtgacaccataaatatgggcttggctcgattgggcgtctatctgacctgcacagtatatgctatctacagcgttattgccgttatgatattgttcctggtgtcgttcgggtactcatcgctggaaaatccctatggattgcgaccgaagtatgccttgcctatgcccgtgtttttcgttgtcgcgttgctttttgttgtattgctgacatatgcattgctgaagtattcctgtaaaggtggcaatagctactgctatgtgcttcccctgttgagtgtcgcggtattggtattccaaaatgcggttatcagatatacgccatatgttgccaattgggatcctgacacgatattcaattatgctgtagccgccgtaagtggaggggatttaggggcatttcaatcgtattttgatatgttccccaacaattatgggctggctgtcctgatgcagtttcttgtgcgcgtgagcttcgtccttaagctggatccagcgatgtttacagcgtctgtgggagcactgggtgtcaacttgggatgtcttatcctagctttagggataggcagtgctctcggcaaggcatgcatagtctatgcatcttggattattgcaacaatattaggttctctttcgttttggatcggaacaccttatacggatacgttcctgttccccttcgtagccaccgtcgtattgctatatcttatttatcggaattctgccgcacctattacctatattgtgcttgtggtaatggtgttttccgcgttcgtcggcagcttgttcaagccgacggtattggtccttgtagttgcgttagtcattgattgcatactccgttatgccagaagggaaggcgtcctgaaagacattctctgcatattcctttcgattcttgtgtcggctgcccttatctacggtgttgcttctcctctgttaaagaaacaccttcatgtcaatccaaatccagaaatggcgttttcctatcaacattatttgatgatgggggcgaacccgcagtcatatggtgcgttcaatttgaacgatgtgaagatttctgcgggcattccagataaaaccgatcgtcaagcggaagatcttgatgtagcattacggcgtttgcaggcaatgaacgctgattccgcaattcatttttatgccgtaaaactcgtcactacatatggtgatggaacatttggcatcggacatgagggtaagggattccctgaggtgcccagtgagaggaatctgcccaattcgctgaaaaagctgtactacatggaaaacaatacgccttccgtttttgggtcactgcagcagctgctgtggatgattctgttgttgtgcgccgctttattgctaccaaggaaaaatactgatgattatgcggtgtttcttcgcctatcccttatcggattgacatgcttcctgatgctattcgagactagggcgcgctacctgtattccttccttcccatttttgttgtcatctttgccgtatcgctggatcgtatcgttctccaggtggatgcagtgctagtcaagagaggaatcgttctgtccggtggaatgggcgacgaatagtctgcatctattccacaaccagttaaatactccgtctcccatcgatataagttgaaacatcttgcgagcagcctcaagggccagtcctgctgtgaataccagcatggatattgccagcataataataactgggaagtgtgattggtagtacttgatatgaactgatttttgttccgtatttcctctaactcgatgggagatgatggaaccatggcaaagggcactcgatatacgccggagttcagggcgaaggcggtcaggctgctggcggaatcgcgttcctcgtattcgtcggagacgaacgcgatctccgcggtggcgaaggatccggggatagcgccggaatcgctgcggcgttggcgcgaccagtcggacgcgacggtcgcggaggagacgaggcagtcggccgaggacgcgatggcggagctgaggaggctgcgggccgaggacgcggaattgcgtcgggcgaacgagattttgacgacggcgtcggcttttttcgcggccgggctcgatccgacacggcgttgatggccgcgtacgtcgacgagcatgaaagccgtttcaaggtcgggccgatccgcggggtcctttccgaatcgttggactgcgggtttctcacgccgcgcggctgccgcatgctcgaaacgcgtcccgtcagccgcatgcgggcggggcatggggcgctggcccgcgacatcctccagatccactcggatttcttcatggccgtgtacggttacgggaagatgcacgcgcagctggtcgcccagggctgggatccggccggggccggccgcgaccaggtgatgaacatcatgcgcgagcttggcatccggggcgtgcgccgcggcagaaccccggtgacgacggaacccgccaagggcacgggcggcaggccggatccggtggacgggaggttcgaggcttgtgcgccgaaccgcctgcacgtggccgacatcacctacgtgcgcatggccaacggctcgttcggctacacggcgttcgtcaccgacgtgtacgcccgtcggatcgtgggatgggcgtgcgccatgaccatgaacacgcaggagctgccgttgcaggcgttgaagcaggtggtctcatgggccgcgtcccgcggcggcgcggatggtcttatccaccacagtgaccatggcacgcagtacaccggcacggtgtacaccaccagggtcatggaatatgggatgctgccgtcgaccggcaccgtcggcgactcgtgtgacaacgccatggccgaaagcgccgacggcgcgtacaagaccgagctggtatggcggcgcaaacccttcgcggatctgaaggacctggaattggcgacgttccggtgggtctcgtggcggggactcgaagcgcctgcgccggtccctgggctacaggacacccgaagcggtggaaaccgagtattatcaacatcaagcggcacaagctgcctcactgtaagggcggaacaaaaatcaggccacttcagcttgtcgaaggcgaaccactgggtccacagtaagtctcgtatgtaattgtggtctgtgatgagatatacacctaacgtccatgaagcgatcgtgttgattatccgggagcggaactgcaggcgggaaaatatgatgaacatacccaagctcaagccgagtatcggcagcgaccactctctgtccatgatgtacatcagagtctgatactctccggcgtgcttatcggtgtataacagctcagacgaaacgttccatgcgagcaacagcagagtgcaggcagtcgcgataatcagggcggtttttgttgatagcggttgcatataccagcgatagtaggtgatcaacgtatatacgtagatgaatccaatgatgttcaggtcgatattcaacgcctcgtagggaattaacgatggccccagaccataatcatgacaaatgccaggatgggggtgcggacgggcacgaatacacttgacccaaagtgcgacaccctttcactggttatctggacaatctccaatttaaagggtgtcgcacttccatctagacaacgggctctgttttattggccgaggaggactgtgcagtaaagaatgtttatcgcatattcttgattctgcggtcgtagatatacttctcaaacagacgaatgcactggatgacggcgcaccgcatgtgctgtgcgcgggtgagattggctagtagggtatcaatttcctgacggtcggtttcgtactgctgctggttttctggaatatggaagtcaggagctcctctctcggcttccagttcgccgatcagcgtgtagtagctacgcatggggaggacgcctcggtcaagacagagacggaaattatctgatgccgcagtgatgtggtcgtggtggaacgcgaagtcacgcttttggtgtgttacggattccgggcgctgaagccagttgtacaggttcacgtcaatatccgccactttgttcatacgcacgtacaggtgtcctgcgatagctgtgtcctgcgcgtacatgccctccgggaatcgcacgccgtcccacagctcgcgcctgtacaggcggcaccagttcgcctcgttgaaatagcgggcctccgtgttgtggccaagcttgtcgccgatcaggcgcaggctcttgcagaatacggtctggtaagcgttcagcggattcgtgaacacgctcacatgttcaggttcggcggcgccttcactggcttccatcgcgacttcctcgatctgggagacgccgaactgcctccagcgggccttgctcatatccgcgccggtagaaatcagcgcgtgcagcagcaactcgatgttgcgacggtcgaggatatcgtcgttgtcggcgaatgcgatgtactcgccatgcgccgcatccaatccggcgttctgagccttcgcgatgccgccgttcgtctggtggatgacgcgcacgcgattgtctcgccgctggtattcgtccagaatcatcgggctggaatcggtggcgccgtcgtccacgaggatgatctccagatgctcatacgactgctgaagaatcgagtccacgcagtaacgtaggtatttctcggcgttgtacaccggcacgacgatcgagacaagcggcgaaacctgcgtcatggcgaatccttcttcacgtgtctgcgccctgcggtcgtagccggcaggccgccctgtttatgcggacatgaacagtatgccacagggtaggcgcacgtcgcgcgtgcaccaagtaaagccgaaaacccagcctgcacaagccggaagcctataggagccgctgaattcggaatcgcatatgtacataggtgcttctcgctatactggtggacaatgaaacgcgtgtggaattgcacatggaatcatgaaaggttttgagtcatggcaaatgcggcggagaatacgcagcacggcccgtcggagggcgcgcagtaccccgatctcgtcattgtcggcgcgggcctgtttggcctgacggtggcgcagcaggcggtggagcatgcgggtgcccgtgtgcatatcatcgacatccgcgaccacatcggcggcaacgcctactcgtatatggatgaggagaccggcgcggagatccacaagtatggcgcgcacctgttccacacgtccaacaggcgggtgtgggattacgtgaatcgtttcacctcgttcaccgactacgtgcatcgcgtgtatgccacgcatgacggcgaggtctatccgctgccgatcaacctgggcaccatcaatcagttcttccacgcgcgttacacgccggccgaggcacagaagcttatcgccgagcaggcgggcgagctggccggcaccgatccgcagaacctcaacgacaagggcatccagctcatcggccgtcccctgtacgaggcgttcatcaagaactacacgggcaagcagtggcagaccgatcctgccgagctgcccgcgtcgatcgtcaagcgtctgccggtgcgcttcaactacgacaaccgctatttcaaggacacgtgggagggtctgcccgcggacggctacaccaagtggatggaacgcatgatcgacgatccgcgcatcacggtttcgctgggcgtggacttcttcgacgaatcccagccgtacaacaagaaggccctgcgggccgcgggcgtgccggtggtctacacgggtccggtcgaccgttacttcggttacgagcttggcgacctgaagtggcgcacggtggacttcaaggaggtccgttacgatgagggcgaccatttcggttgcccggtgatgaacttctcggacgcggacgtgccgtacacgagggcgatcgagttcaagaacttcaacccggagcgtcgcgagcggcagaacccggacaagacggtggtgtgggaggagtacagccgttttgccgagcgtggcgacgagccgtactatccgatcaacaccgatgcggacaaggccctgtacgcccagtacgaggccaaggccgcggccgagccgaagaccgtgttcggcgggcggctcggcacgtacaagtactacgacatgcatcaggtgatcgacaccgccctgaccgcctacgaggagcaggtggccccgctgctgtccaagtaggtgcggctgttggcggcctgatacgggcccagacaataaggggcgggacggaatcctgtatgtggattccaccccgccccttgctgattcaacggtgacctatcacttgacgtcaaagaacttggtgtcgttgaggtatcccttgccggcggtcaggtcgtactgcacgagcttgtattcctccagcagtttcttggcctttgcggacatggggtcatacgagacggtggtgccgtctgccgcaagataggtcttgttattgtctccggtctggtcgctggtgctgggcaccgggcgggtcatcgccggaatctcttcgtgcaccgtatcaaggaattccaggtacggcgagaccttcgcgttcatgtgctctgcggccagcggcatgaagaagctggaggaggtgtagctggactccttggcttccaacttggtcccgttcgattccgatgcctggttggaccagatgaagtagtcggtctcgtgcaggttcacgccgttcttcgggtcactggccgcagtggagtagatgcccggcagatgatcgccatagaagatcacggtgacgggtttgttgacctgatcaagctggttcaggaagtccgtggtcgcctgatcggtgatgttgacgcccttggcataggtgtcgatgctcgagcgctcgtcgccgctgcgctgggatgtgtctgaatcctggaactggttgttcgcataccagttgttatagggcatgtggttctggatggtggccagctgaatgaactggggatgcttcgtgttggcgttcaccgcgtccagggcgtcctggtaggctgcggcatcgctgacgtagatgaagttgtcgatgcggtcctgatgcttgatctcaggcttgctgcccagggtcaggaacttgctgaatccgaacttcttgtagtccacatccctcagatacatgttcttgtaatacgggtgcagggcgatggagccgctggcgccatacgtctggttccatatctggttgaaggtgtaggcctgcttctggtgcggcaccagctcctggtacatggactgcatggagtcgtcgaacaatgccatgttcaggccggtcagggactggtattcgatgttggcggtgcctccgccatagcccgggacagcatgatgccggaggtcgtctattccttgaggttgcggatgttcggcatggggtcttcggagaacgagacgccggggacgcgggtcggggccgcgaacgattccgaaaggatcatgatcaccgtgctgtcggtggtgttggcggaacggttctggttggccgttttggcggccttggcggccagctgctccatggtgtccttgctgtagccttcgggcttgtccatgatcttcgtgtgggtcagccggatgaagttcatgatcgggccgttgttggaagcgtcgccgaaagcgttccagagctgcggggcatcgccgagcttggcggctcatacgctggaccatgatccgggggtgccgagggtccaggtgaacgagaacagggtgacgaagctgagcagcagcgcgaggatgcgcgagcagttgcccacaatggtcttggcgttccggaacggcttacgccagtggaaggggattacgtagttgcggcggtcgaggaactgcagcatgatgcagacgaccaccacgatgatcaatacggtgattgccgtgctgatgagccgtgcggcgtccttcggtatgaaggtgccgatttctccgccgttgccgccggtgatgaagctgagatcggaaggcaggataggttcgcctcgcagggtgatcttgatgcggttcgcgaccgagaacacaattgcgatcgccgagaagaccgccgtggcaatccagaaccggttgaagaggaagaccagcaccagatagaacagtccgaggaccaggaagctcaggaggaggtgtatctgcttcccagccacatctggctgacgaaactggtcagctggcccctgacgctgttgagcatcttcgtggtctcgtccacggcgttggggtcggcgtacgtcggctcgttgtatacgctccactggatgaagagcaccgcaacggcgttagtgatcacaaatgcgattgcatagaaagcgtatgagaagcgcatacgcttctgccatattgcgcggaaagccctgccgaagcgtgccagggcctgtgccggcttggacgaggtgacgggcgccagtgcggtcgagactcggctgcgcaactcttggaccttccggcgaagtgccgaaggctgcttgtccgtcgttttgcccttgtccggcgtgggggagccttcatggatttcgtctccggatactgcttccgagtccggctccgcgtcttgctgagagatttctgcggatgtctcttccgaaccctgctgtgcatcttgctgtgaagttgctgaatcctcgtcaactgccttgggattcagtcggtcgtcattctgctcgggcggtccagcatcccgagtttcgtcttcttgctgcgccatgtgtacccatctgcgtctacggacattcgacccgccattgtaataggaggttcaggacgaattcgccaaaagtggcgctattgctgttttcgtgggtggggtttctccgttgagttgttgagggagtaagagaagagcgctttccgggtaggatgttttcgaccaagataaacaaacaaccgcaaagcgcctgatgaacaggatattcaaccaacttctcaacgtcaaaaacacggtggtcgaggacgcgtgcatcgtcgactcgccgctacgtcccgagcccgtgctcgaggtccgcgtgcgcccgcgcaggggcatgctccggtgctcgaggtgcgggcgcaagtgctccgggtacgaccggggcggcggcgcgcgccgctggagacaccaggacttcggctgctggcgggtcgaactggtcgccgccataccgcgcgtggactgcccgaagtgcggcgtcgtggtcgcccgggtgccgtgggcggagcccggctcgaggttcacgcgcgacttcgaggcggagtgcgcgtggctgatgacggtcgccaaccagaagacggtcggcggtttcctgcatatcgcgtggaggaccgcgggagacatcgcccatagggtcgccgaacggctcggaacggtgatgccctcgccgttcgacggcctgacggcgatcggcgtggacgagaccggctacaggaagggccacacgtacctgaccgtcgtcgtcgaccacgagcggcatcgggtcatctgggcgcacgacggatacggcaaggacgtgctcagcctgttcctcaaggcgttgacgcccgaacagcgcgcctccatcaaggtcgtcaccggcgacggggcccgctggatcgactcgtgcgtcgccgagcaccgcccgaacgccgaacgcgtattggacgggttccacatcgtctcctggatgagcgacgcgctcgacaaggtcaggaaacgcctgtggaaccaggcgaggcacgatggggacgagaatgccgcgaagcgcatgcgcggcatcagatacgccgtcctgaagaaccccggcgacctgaccgacagacaggaggaggcgttcgaaagcctgcgggacacggaccccaagggccagctctaccgcgcatggcagctcaaggaactcctgcgcaccctgctcaagcacccgatcggccaagccacgacggaactgaaccgctgggtgttccgggcgtcccattcgcgcatacccgagatcgtcgaactcgccaagaagatcagacggcgccgccccgacatcctgcgcacgatccggctgggatactcgaacgcgcgcctcgaggcgtccgacaacaggatcaaggtcaccatccgcatggcctacggcttccaccacgtcgacaacctcatcgccctggtcatgctccgatgcggcggactcgacatacgactgccacaacccgcaatctaacccacgaaaacagcagaagcctcccaaaagtttaatttattggtctgtgcattgggtgttgtctgtcggtggctcctatcctgtcgaaatggtcgcagatgttcatgccttttgcagcaatggtccatacggcttgcagccgcagctgccgcctatacgcaggttgccttcgatcttgatcgaccgtctctgctgttgctgccctcctgtgtcgatgcggcgtataagctcgcttaccgctgagtgggctatttcgtcgacgggctgggcgtaggacgtcaacgtcggtgtgaagtgcctgctcaattgggtgccgtcgaatgaggctatcgccacctgccccggaacgtcgatgcccatgtccagcagcgcgtgcattgcgccgagagcttgcacgtcggcgtgtgtgaataacccgacatgttctcccctgcgcagtgcatctgcaatggtcttggatgtgaacagacgtttggcggcctcatacccatcttggggtgtgaacgatgcgtaagcgaccagattgcggttctccgcataacccatggcattttgttggatacgccatcctttggtgcgtttttcggtcactctggtctgtggtggtccagcaatgcagcctatgagttggatgtcatgcatctgcagatgctcgacgattcttctggctcccgtcatcgaatccgtttccacgctggatgcatgggggagcagcggtgttctatccagagtcacagtgggaacggcgtcacagagttcggtcatggcacgtccgacccgactggaaagtatcaggagaccatccacctttcgttccaggaaggttcttgcatattgcaactggcgggatggatcgtctttggtgatgcctacaagcagcagatagccgtcatcgaacagttcctgttctatggctttggcgagttcggcgaaaaacgggttctcggtatccggtgtcaggaggccgatcatcttcgtttcgctgcctcgaagcgcacgtgcgatggcattcggcttgtaattcaaggtatcgatggcccgttcgatccgggcccgtgcttcgggagacacgggtcttgggccgttgttcatcacatagctgaccagtgcaggggaaacgccggccaatctggcgacgtcggctcgtgtggctgtcatcccggcctttctgttggtgtgctgctcggctggtgtcctggtcatgaatcctatgaaatcactctaggctgctgccggctgccgtggtttcgccatatgtttggttttccgggcaattctcggcgacgagatatccggtgggattcatcgtatcccgtgcatgacgacacgcccaactttgcattcaacacgtgttgatgacatacttcattcaactcgtgttgagcagagaggcccagtccgagttggcatggatggagacgattcaatgacgaagataatcttggataccgatttggccatgggagaccttggcgctgatgtggatgacggtttcgcactcgccctcgcgatagcggatcccgatatcgatcttctggcggtgaccaccgtaaatggcaataccgatgtacacagcgcgaccaggttgtctcatcggctgctggacaagatagggtatgatgtgccggtctatcaaggagctgacaggccgttgctccggaagccgaatcatcccattcgggacagcgaatacgaggacgtgcctgccgcgatggccatcatcgatgcgattcggcggcatccgcatgaggtcactctggtgcttatcggtccattgaccaatattgcgcttgcgcttcggctggacccgggcatcgccccgttgatcaaggaagcggtgatcatgggaggcgtgttccttcggcataccaatgagtcgggtatgcctggtgagttcaacatctgggttgacccggaggccgcaagaatcgtggcggagtcggacatgcctctgaaattcgtggggctggacgtcacattgcaagtacgtatcgacttggatgatgccgccgcattggaacggtccgaaagcgcttttgcccaatatgcgggcgccagtacccgagcatggatcgatttcatggcaaaacgacatcccgattcggaacccgatcagacttcatgcgccatgcatgatccccttgcggtggctgctgtcactcagccggacattgtcacttggagcaaggcatatgtcacattcgcaacggaatccgaagttacacgaggcatggcggtggcggatctgctgcgtgaagagaaccctcccgagcccaattgcgtgatcgcgactgaggtcgatgcggatcgattccgcagcctgttcatcagccggcttcagatgatctgacggcttccgattttcgagtgttcaaggaagaacaacacaacaaaggagaacaccatgaagaaaacagccagaaccgttggaggcatagccatatgcgcatccatttcgatggtgctgtcgggctgtggcgggcccagtgccggtggtgcgccgacggcgctgacgtcgattccggacacggaccccacagccaccatccaggtcgtcagccacatgacgctcgataatgatggtatgcagaaggtcatagatgcgttcgagaaggaacatccgaccataaaggtcgagtggaaggcggtcccgttcaaggacatgaactctctgatcgattcgcgaatcagccagaagagcggcgccatggacgtgtattacgtcgatcagccgagactcgccgcgctggtctctcgaggctatcttgaggaattgaccgcggcattcagtgaccagacctccgaatgggataagtccgccaccgaagcgaacacctatgatggcaagctttgggccgtgccgttggctacttcgacccagcttctttactataacaaggacattctggacaaagccgggttaatggctccgtccgccgacccggacaagaggatctcctgggaggccttgaagtccgaagcagcgaaggcacagtccaatggcggtgcaaaatacgggttcatgttcggccagatggaccgctattaccagcttgagccgcttttcgtcgaggccggcggcggcacgggcatcagcggtgatgatggcctgactccggattttgaaagcaatgggtggaccaaggcgctggaatattacaagagcctgttcgccgatggcgtctctccgcggggccaggaagagatgcaggacgagttttatgcgggcaacgtcgcattcatgcaggacggcacatgggccatcgacaaggcatccaaaaccgacttcaattggggtgttgcggccagtccgactttcgagggaaccgatgccaagactccgacgggttcatggtcccttggcatgaacccatattcggattccaaagaggctgcggcgatttttatgaattggatggcctgccaagatggcggacagatttccgtatatcagccggctcctgaccttcccgcatcgaagaaggcgcgtgaacggtacttcactcgcgatgtattccaaaccgatgcgggaaagaacgctgtgaatctcatcaattatgagctggagaacacagcggtcatccggcctcagaccatcggctacgtggaattcgaggaggtcctgaaccgcgcattcgcggacgtccgcaatggcgccgatccgaccacctcattgaaaaatgccactacgcagctgaatacggcgtgggccgcctataagtgacatcaggaaagaaggacaccatgcgcagcgtcaaagaagacactcgaaaagcatcggcacagcaatcaaggaggaagagccattccgatgtgatatgggccatcgtgttccttgccccggcattgatagcgattttgaccatgcgcattgtaccgggaatctctgcggcgtattcgagcctgttcaaggcgttgcccggaggcctgtccgtaccgaagttcgacgggttggggaattatgtgaagttgttctccaacccggagttcatcgataccttggtgcgcacgattgtattcaatgtgattatcaatccggtgcaggtgatgatctcactggctcttgcggtgctgatgacgagacgcctcgccttgcaaggggtttggcgtacgttgctgttcattcctgcgaccattccgattgtcggctcatcaattgcctggggcgcgggaatgcggcaggatggtccgatcaatgcggtcattaaggctcttggcggcaaacctcagccatttttcactagcccatcccaggcgctgttctgtgtgggcgtggtggccacatgggttggcgtcggatattggatgattttcctcattgcaggtttggaagacattccgaccgagtattacgaagccgcaagcatcgaccgggccggtccgttcaggacattcttctcggttacggttccgctgctgaaacgacagttgctgtttgtgctcgtatccgacaccgttgcgaatttcgtcctgttcgtccctattcagatgctgaccaatggaggtccgcaaaacagttccacggtactcatgttcgatgcctatagaaccacattcacattcagcagcagaaaccttggatccgccgaagtggtgattctcatgatcgtcatgctggcggcggtgggcatacaattcctgctcttgagggagggcgatgaccgatgaagacatcaccgatgaaccgtagacggaagatcttccgtccttccaaatctatcatgctggctatcactgtggtcctcagtctggtgttcatgctgccggcggtgtggatgttctttggatcgttccgccccgccaatcagattctgtcctcgttgaatccgctgtcatggaacagcctgtttccctccgaatacagtatgaacaattacataacgctcctttttgaacgtggcttcgccaggaacctgctgaattccgcaatcgtgtgcataggttccgttgccttgggtcttgttctttctctgatggccgcatacgcactggctgtattgaagtttcccgggcggaatctgcttttcgcgatcgtcatcgtcggattcatggtgccgtttgaggcggtggccattcccctgtcctcattgttcacggattggggcctggccaacacgttccttggcctgatcctgcctggaataggcaatggcctggcgatcttcaacctgcggcaatttttcctgggcataccggtctcatatcgagaggccgcaaaaatcgatggtgcttcggaaatcagaattctattccagatatacgctccgatcagtgtgccggcactcatcaatactggtctgctgattttccttgcccagtggtcgtcctatttatggcctctgcttatggtgaacaccagcgatatgcaggtggccgcagtctcattggcaagtacgttcggagaacgaggcgtggattatggccagaactttgcgggcgcgctcatgctcgcattggtgccggcgatactcatgctcgtgtttcaaagatatttcgcggcaggttcctcaagcagtggagagaaatgatgattgacattcaagaagatgccgtttcaccgaattccgtatacgtggtggggtccgcgaatatcgacctgcgtctgggcatgaaaactcttccggagcccggccagacggttctggcttccacaagcgcgcggtatatcggaggcaaaggcgccaatcaggcagtcgcatccgcgcaatccggcgtaccgaccacgttcattggctgtgtgggcgatgacgaggacggaaaatccgtgttacgggccttgcgtgaaagtgggatctccacaggagaggtggaactcatgggcggcatctcgacgggcttggcaacggtgatggtttccgatgacggaaacaattccatcgtcgtggtgccgggggccaatagccgtctttcaccgttgcgcgcccggacagtgctgaatcggtcctgcgatgagcgctcagtagtggtgctgcaggcggaaatcccatatgagacggtgcagacagtcatatcagcgggcagagagagggattcgacggtggtgttcaacattgcgccgtatgcgggattcccgattgaaatcatcagacaagtggatttccttatcctgaacgaggtcgaggccagccaatttctgaaagacctgggcattgaacgcacctcgccaaaggaaaccgcttccgaagttgccaagcatgcgcgtaaaggcgcggtggtgacgtttggctcccaaggggcttactgggccaccaagacggaatccggacacgtccccgcggaaaaggtgcgtgtagtggataccaccggtgctggagactcgttcgtcggcgcgttttccgcggccatcgccgagggcaagggagtggaagaatccgttcggatcggtaccaggctggcaggcagaacggttcagtacgaaggcgcccagaaagtgctttgacggtcaggtgggttcaggggctgtcgctcctgaacccacctttgttttggggcccatatctcaccggatcctgccggttatgcttttatggcctgttgatggtgctccttgggagtagacgtggcggacaacgaaatggttttcggcagcagcagctgcagcaggatcgccaccgtgccgccgacggcgatgcccgatgccaggaagaactgcacgaactgaggcgcggcggacaccacgttgtccggcaggattatggtgcttacgccgcacatcacggaaactccgagaataagcgtggcacgatcgttgagcacggtgtccttgaccattttgactccgttggagatgagagtcatggccaccatggcgaatatgccgttgatgacgggcgtgggaagcgaggtgatgatggccatcagtttggggcagaatcccaacgccaccaatatcgcaccgcccgctatcatggccctgcggctggctgccttcgtgatggcgatgagcccagcattggacgagtacccggtcatgggggtaccaccgaagcacgcacccatcaagcatccaagtccctctccgatggtgccccggtcgatgcgcttgtcatcaagatcggccccggtgatggccttgacggtgaaccaggtgccggtcgtatcaagcatgacgaacaggtagaccacggccatgagcagacatgcgcccaaatcgaactttggcagaccgaagtggaagggctgcggcagcgagaaccatgcggctccgggaacggagctgaagtcggcacctcccatcgccacagcgaccagcgtgccgatgacgagggcaacgataacggaacacatatgaagcagaccgctgttcctgagccggtactgcaggaccatgcataccaacagcacgacgaatgtcacggagccgcttattgcgttgaccgtcagattgccggtgatgctgaacacgcaggtgaccgcggtcggcaccaaagtcagtccaacgatgaggatgatgattcctccgatgaacggcgggatggcccgacgtatgaatttggagaacagtttggttgcgccaagcagtatgacgatgatggccccagggatgaggctgccgatcatggttgggatgcccattgtggcaccgatcatgcacaatgctcccaagggaacataggagggtccctgagcgatggggaacttcatgagcaacccgctttgcagcagtgtggcgatgccgcaggcgaagaagctcatctgcagaagaaacgataggtctccgcctttgagcccaatcgcccctccgaggatgagcggcatgatgtataggtccatggacaggatatgctgcagttccaggatgatggacgggggtggtgccgttttgttggacttccttgttcctgccttctgattatgccacgaggccgagcttgcgccgccggtccatgatgcccgtgccgtactcggtcttgatccgcttgtcccggtaccagaccatgtagtcgttcagcatgtcgatgaacccgtccatcgaaacacccgcgaagcttctcttgtggaagaacttctgcctgggacggccgaagaacccctccgcggccgcgttgtccggagaacagcctttcgcgcccgtcgaacgtgtcaatctgttgtcctcgcagatgcggattcattccgcccgcctataatgacagccgcgatcactgtggatgaccggtttctcgtcctcgccgagcgtggagcacgcgtccgaaagcatgccgttggccagcgcggcgttggggctcgtgccgatcgtccaggcgaccggaagcccgtcgtggcagtcgatgatgggagacaggtacgccttgcccgccgggatggagaactccgtcaaatccgtgacccacggcatgttcggcctctcggcgtggaaatcgcggttcacgaggtcggctggcgccttggccggcccgcccttgcacgagccgtaccgcttcgcgctcttgcgcaacggcaccatgccatgcttggccatgagcctcatgacccgtttggccgacaccgtcatccccatgcccttcagttccagatggacgcgcttgcacccgtagcgcttctcgccgttcccgaacgcctcctcgaccaagggcagcagccacgcgtgcctgtcgggcccgttcatggcgtcgggctggtaatggtaggtgctatgcggaatgccgaccgcgtcgaacaggcttttggcggtcacgcccagcctctcaccggtccgcttggcgaggaatggccttctcccggctggtcgggttttccgggtctgcgcccggcccttttcccaacagctccagagttccgcggcgaatcgcgatctcgacgtcgagctccctcttctcccgccgctgccgttcgacgtcggcgtccagcgcgtccagacggtcctggagctccgccgccttcctctgcatcgacgccaacgcgtccgccggaccggccgcgtccgacgaattcggaaccgcgggccgcgcgccggccggattccccgctctcgcgacggccttccctctctctgtctcggacaccggttcctccctggacttcgcaagcatctgccgtttccggtttctcacgaccgccgcctgaacgcccagcccggcggccgcctctcgtgacttcatcctgccggacgcgacggccgccaccgccctccttttcggttcctcgggcaccggtccgtgacgcagcttgcgttggccggccgcgagttcgtcgatccgcgccatgagcggctccttgcttttggggtagcccggcatgcgcatggtgcggccgggccgtctgccgtactcgaggcagtggtccaccgcggcctgtttctgctcgtcgctatagcgccgatgccgttgcccgcgccccgagggaacgccggtacgctcctcctccagccgatcccggtaccacacatacagaatcgtcctgcttggataccccagctcatggatcacatccgcggcactgtgctcgtacttgatgtacaaatccaccgcccgctcgcgctgctgcctgctatacgtcatgccgacgctctccttgactcaacgagtccaagaaaacgtcaccacctcgcgacgcagatttatttgacgaaagacacctacgccatgcgccccagcgcgtccatgcggccggcctggttcctaccagcggtcagcggacgcccccgttcccgaccatcggagcctactaaacatggtaatgggtatgacgctgcttgaacatgatgcggcttccccagaatgaaaaactggcggaaaggcgtataaagtggcggtaaactagcggaaaggcgtataaagtggcgaattctgacgttattgagttgatttcttttgccggcctttccgagtcggatgtgaggctacttcgagaagataattgtattgaggcgaaaaaggccaaagacaaattaccagacagtctatgggtgactaccattgcgaccgggatgaagtcaaagcaatgtttcgcgatggcagtgacactcctcaggatcttcgtatcgtggaagatttgggtagtgctgcattggattcaggcacgattgtctcgtaccgttcttattttcagcggattcggccaaaccatccatggcgtaatttgaatgacgacgattttctcgtgcgtctacaggcgctcgttctaccaaagataatcagttgcatccaactattgctggattgctgatgtttgggcgcgaatatgatatcgtgcgggaattcgcaaattatttgactgaattggtaaagtgccacgtcgcgtcgatggcggggacaaatttcctggggtacttaaggctcgccacgaggagtacagttgtctgtaacgcacaatgtggcgcgtaagacgaggggcgtatctcgcaagtggggtgcgatgcagttgaaggagtgcatgtcatgactgatccgaatgccaatccgaacggccaggtgccggggcagcaagctgacgccaatccgactgagccgttaaatgcgatgacgggggaagcaggaaccgccgccaacaatgctccaacccaagcactcgcagcgggcgaacagcccactcaggcgttcactcctgttgagcagcctacgcaggcgtttacacctgccgagcagtccacccagcctcttgcgccggtcaatcagccggtaccgcctacgcaggctttgccaccagtgactcctgccgctgcgcccgcgcccgcaccggcagcgcccgcgcccgcaccagcagcacccaattcgccctatccggggacggctccggcaggcggatcggttcctccagtctacggcagcgtcagtgctccggtatatccgggcggcggggccgtgcctccgcaaacgccctataacccgtatatgcaaggcggccaaccgaacggccagccgggatggtctggttcttacggcagtgtgccgcctgaagcgaaccagaagtacaacggcctggctattgccggttttatctgctcgttccttgtctcactccccggtctgatcctgagcatcgtgggcctcaaccagattaagaaacagggcggcaagggcaagggcttggccatcgccggcatcatcatcagtgcggcgggcatggtgatacaggtaatactggtcatcgcgctgatcatcggcggtgcctcgtatgccagcaaggctatagatgaggcgaaaaccgattcctcctatagtcagtcctcttcgggcaacggtgatagcagcgataagagcaaagctcaagataatcttgacgatgcgctggacgacacgttgagcgaaacccatgacgatctaaccgacggcgattatgggctgtacgattcgattcaggatttcgtcgactattcggaattcaaggactccattgaatccgaagcggatacgtttgcagataccggcatcaccttcaactaccgtgtcgacggtgacaccttggtgtacgagtacgtgctcgacgacagctatgcctcgctaggcgataccgtcgcttcctcactggatgctatggacagcacctatcaatccaccgcgaatctgctgggctcgatgtgcaagacctccagcggcaaggcatcattgcgcgtcatcatgcacacgcaaagcggccagtcgctgtacgacaaaacctggaccgaaaagtagcaatcccagcgaacgtgcgttttggtcgattgaaggccggtctgcttgctccttggacggatgcttctgcggaaggaaccgccaaggagtaggcttacaggcatgagactcgcacgtttttctttgaatgattcgccgcgctacgccttcgtgcagaaggacgaaacggacggcaaggactacctcatcgaactggacggccatccgctggccggcgaccaggtcaagcccaccggcactcgttacccggtcgacggcgacggcatccgcctgctctccccggtcatcccctccaaggtttacggtctggccaagaactacgaggcccacgcccagttcatgcacgaggccggccactccgaaatcgcccacgcgccggaagacatggtgatcttcaccaagccgtccacctcggtgattggccccgacgatccgatcgtgtacccggcctgctccaaggacatgaacttcgagccggaagtggccgtggtgatgggccgtatcgccaagaacgtgtccgttgaaaacgcgatggattacgtgctcggcttcacctgcgtgaacgacgtgacgttgcgcgacctgcagggcatcgaccccacgtggacgcgcgccaagggcttcgatacttcctgcccgcttggcccgtggattgtgatgcgtgacgacctcgactggaaggacgccaagatttcctttacgctgaacggcgaggatgtgccgatggcgtctggcaccaccgcgaacctgattcacggcatccccgagcagattgccgcgatttcgtcgttctctacgctgctgcctggtgacgtcatcatgaccggcaccccgaacgcctccggccacctcgacccaggcgacgagaccatcgtgcacgtcgagggcatcggcgatctgcgcaacgtaatcgttcgggcgtgactcgttctggatcccctctctgaggggagccgtccaggcggagaagctgactgaggggaaccaagaacgcgccttacgctcccggcagaagtgcgtgcagggcggtcatcaccaccaagctgatgatggccgtcactgtcagcgagaagccggcgagcttggcgttgccggttagcgaatcggtgaacttggttgagaagatcgtgataggggcgaacgagcccaacacgatgatctcgcgaatcctcatgtcgaatggcagtaggaaccaggcggccacggcgataatcgcgccgaataccatgcgccagacaatcaccttgcccaactccaccttgtccttgcgattgttcggaatctccatcatcagtccgatcatggccatcgcgcagaaggcgttcgcattggcgaacggggtgatgagcgtaacgatgggctgtgggatcgtgatgtgcaggaacatgaacaccagcatcagcatgtagatgtcgaaggaaatcgagcttaggaagtccctggcaatattgcgcagacgcaggatgagcggtagcgacttgaaattgttatccatatgcagcagcgtgcgtgtgatggtcagtgacccggccgtggccacggtggcgttgccgatatcgagcatgatgatcggcagaccggcggacgggcccatgaacgtctgaaccacaggcaggcagaacgcgcccaggttcaggcccgaggcgttgagcatctggaaggcgcggtagttcttctcgtcgccgcgagaaccgaaatacacgatgaacagcggaatcgcgcaggcgaagaagccgaacaacacgatccacagcatgcgcatgtcgtgcttgttcgtggcgaacgacaggataatcgcacaaggaagcgtcagattgaataccagaccctgcacgattttgtaatcacgctcgccgaaaatgtggacatgtttgagtatgtagacaccgatgataacgagcagcagcgaaccggcctgaaaaatcatgttcttctcttatcccacaagcacccgccgcagcaccggcggcggtcaggcgcataacaaaccagccgtgagtataggagcgttcgcgcggcgctggcgcggggcggtgcatattgtggacagtcccgtaacgttgatatgccatgctggcgagatgaatatatccaataccaagtggagctcggcacgatagagaggtaggaaaacatggcagagcagacggtcaccgtaggcgttggggcattgagcatcgaggacgttatcgccgtagcgcgcggcggtgccaaagtggcgatttcggacgaatcgaagcatgagatggcgctaagtcgcgcggttatcgatcatttggccgacgacaccgtgccgcattacggtatctccaccggattcggcgcgctcgcctccacttccatccccaaggaacagcgcgcgcagctgcagaaaagtctgatccgctcgcatgccgccggtgccggaccggaagtggagcgtgaggtggtgcgcggcctgctggtgctgcgcctgagcgccctgtgcaccggacgcaccggtgtgcgcccggaaaccgcgcaggtctacgccgatatgctgaacgccggcatcaccccggtggtctacgaatacggttcgctcggatgctccggtgatttggcgccgctcgccgcctgcgctttggtggcgatgggcgaaggcgaggcccgcaacgctgacggccgcaagatcggcggcggcgaagcgctgcgtgcggccggcatcacgcccgtcgatttgaaagagaaggaaggcttggcgctggtcaacggcaccgacggcatgctcggcatgttgtgtatggccatcaccgatctgcgcctgctactcaagacggcggacatcgccgccgcgatgagcgtggaaggcatgctcggcaacgaccgcgtgttcgccgccgacttgcaggcgctgcgtccgcatcgcggccaaggcgattccgccgcgaacatcgtccgcatgctcaagggctctggtctgatcgaagccggccgcccgggctccaccgtgcgtgtgcaggacgcctactcgctgcgctgcaccccgcaggtgcacggcgccgcccgcgacaccgtggaatacgcggcctccgtggcgggcgtggaactcgcctccgccatcgacaacccgtgcgtcacgctggacggccgtgtggagtccaacggcaacttccatggcgcgccgctggcctatgtgctcgatttcctggcgattccgactgccgacgtagcctctatctccgagcgtcgtaccgaccgcttccttgacgtggcgcgcaaccgcggcctgccggcgttcctggctggtgacccgggcgtggactccggtttcatgatcgcccagtacaccgccgccggcatcgtctccgaaatgaagcgcaacgccgtgcccgcctcggtcgattcgattccgagctccgccatgcaggaagatcacgtgtcgatgggctgggccgccgcccgcaagctgcgccggtcgattccggcctttgcgcgcgtgctggccgtggaactgctgtgctcctgccgctccttcgacttccgcaagccgtaccgtccgggtgcggcgggcgccgccgtataccgcgtggtgcgccagtacgccaacgaaatcggccccgacgtacgcgatacctggaccaccccgcaaatcgaaggcgtagccaacgccatcctctccggcgaaatcctatccgccgccgaagctgccgtcggcctcctgaaatagatgtgagctccctcatcagagggggctactgttcaccctccccaccaaaatccaaaacttgagtcacctgcactcaagttttgggaatagaatgggttctaggtcggttgaccatatcagataacgacaagttgtggtctgcggtggcgcttgcggggctttcgaagcccgcgagccgctccgcgcgggccgcatgatatggaggaatacgatatggaacagaagttcaccactatggcccaggaggccgtcggcgacgcgattcagagtgcgtccgccgcaggaaacgcgcaggttgagaccctgcacgtcatggatgcgttgctgcgtcaggaaaacggcgtggtgcgctccctcatcgaggccgcgggcggagacccacaggccatcggcgccgccgtgcgtaacgctttggtcgcactgccgagcgcatccggctccagcacttcgcagccgcaagccagccgccagctgaccgccgccatcgcccaggctgagaaggaaatgcagcagatgggcgacgaatacgtctccaccgagcacctgcttatcggcatcgcggccagcaagccgaaccagtcggccgaaatcctggagaagaacggcgtcaccgcagcctccctgcgcaaggccgtacccggcgtgcgtggcggcgcgaaggtcaccagcccggacgcggaaggctcgtacaaggccctggagaagtactccaccgacctgacggccgccgccaaggaaggcaagctcgatccggtgatcggccgtgatcaggaaatccgccgcgtgattcagatcctctcccgtcgtaccaagaacaacccggtgctgatcggcgagcccggcgtcggcaagaccgccgtcgtggaaggcctggcccagcgtatcgtggcgggcgacgtgcccaccaccctgcaaggcaagaagctcatctcccttgacctaggctccatggtggccggctcgaagtaccgtggcgagttcgaggagcgcctgaagagcgtcctcaacgaaatcaagaacgcggacggccagatcatcaccttcatcgacgagattcacaccatcgtcggcgcgggtgcggccgaaggctcgatggacgccggcaatatgctgaagcctatgctggcccgtggcgagctgcgcctgatcggcgcgaccacgctggacgagtaccgcgagaacatcgaaaaggatccggcattggaacgccgtttccaacaggtgttcgtgggcgagccgagcgtggaagacaccatcgccatcctgcgtggcctgaagcagcgttacgaggcgcaccacaaggtgacaatcggcgatgacgcgctggttgccgccgcgaccctctcgaaccgttatattccgggccgtcagctgccggacaaggccatcgacctggtcgatgaggcggctgcccacctgcgtatggagctcgactcctcgcctgaggagatcgatgaactgcagcgcaaggtgacccgtcttgaaatggaggaaatgcagctcaagaaggctgaggatcctgcatccaaggagcgtctgggcaagctgcaagccgaactcgcggacacccgtgagaagctcagcggcctcaaggcgcgttgggatgcggagcaggccggccacaacaaggtcggtgacctgcgtgccaagctcgatgacctgcgtgtgcaggcggacaagttcacccgtgagggaaatctggctgaggcctcgaagattctgtacggagagattccggctattcagaaggaactcgccgccgcggaaagcgcggatgccgaatctgccgatgccggcgcggccaacccggccgatgagccgatggtcccggaccgtgtggacgccgactcggtggccgagatcgtctccgactggaccggcattcccgttggccgcctgatgcagggcgagaacgagaagctgctgcacatggaggactacctgggcaagcgtgtgatcggccagaaggaagccatcgccgccgtgtccgacgcggtgcgtcgttcgcgtgccggtatctccgacccgaaccgtccgaccggatcgttcctgttcctcggtcccaccggtgtgggcaagaccgaactggccaaggcgctcgccgacttcctgttcgacgacgagaaggccatggtccgcatcgacatgtccgaatacatggagaaggcttcagtctcgcgcctgatcggtgcggctccgggctacgtgggctacgagcagggcggccagctgaccgaggccgtgcgccgccgcccgtattccgtggtgctgttcgacgaggtcgagaaggccaatccggagatcttcgacgtgctgctgcaggtgctcgacgatggccgcctgaccgatggccagggcaggaccgtggacttcaagaacacgatcctgatcatgacctccaacctcggctcacagttcctcgtgaacgaggacatggacgccgacgccaagatggaggccgtgatggacgccgtccacatgaacttcaagccggagttcctgaaccgtctggacgacatcgtcatgttccacccgctcacgcgtgaggagcttggcggcatcgtggatatccaggtggctggcgtggcccagcgtctgaccgatcgccgcatcacgctggacgtcaccgactcggctcgcgaatggctggccaacaccggttacgacccggcttatggcgctcgtccgctgcgccgcctggtacagaccgaagtgggcgaccagctggcccgcatgctgctggccggcaaggtccacgatggcgacaccgtgctcgtcgaccagaccggcggcgagcatctggagctttccgcctgggccagcgaccagatcgtctccgacgacccggatgtgagcgtggacaacgttaccgaagataagtgacaatcactggctcccctctctgaggggagctgtcagcgaagctgactgaggggagttcgggcggtttcgcaacagtgatttttctctgcaaaatctcttaaacaggtgggtatggtagcagtcatacccactttttcgtctttgtgggtctatctcgatttcgaggggctgatttgccccctttcggaggtctacttccgtttcgaggggctgctcttctgccgaaccgcgagtatcagcggctttatggcaacgccattccgccattgttgcgccgtgtctacttggctaccagccccttgaaatggaagtagacctcctgcaacatcgaaatcagccccttgaaacggaagtatctgtccgatccgtctcaattgtgttccccaagagtggaagaaccgtggcatcaaggtgttcactgtcgcatatggtaggaaagtgagtgttaacggacgaagggagagccagtgaccggacgattggcgccgacgccgtcggggcgcatgcatatcggcaacgtgtacgccatgttgggtgcatggctttcggcccgttcgcgtggcgaccgcatgctgatgcgtatcgaagacgtggacaagccgcgcgtggttgccggtgcgggccagctcatgatggacgacctgcattggctcggcctcgactgggatggcgaaccgatgttccaatcccagcacactgaacgatatgaatacgctctcgaatgcctgcgctcgcaaggtgtgctgtacccctgtttctgctcgcgtgccgacattcgcgccgcctcggcccccaacgagggcgacggcttcatggtgtaccccggcacgtgccgccgcctgctgcacgaccatcccgacgaggtccgtgcccgtctgtctcgcggcgaccagcattccatccgtatcgccatgccgaaaccggcagcgggagaaaagcaacgtacagtgcctggcgattccgctgcgctgtcgggagccgtgccgccggaacagcagggcgatgccggaatcgttgatggtgtcgcatgctttaacgaccgtgtctatagtccacagcactacgatttggcccgcgaggtaggcgattccgtgattcgccgagccgatggactgttcggctatcaactggtcgtggtcgtggatgacctcgatatggatgttgatgatatcgtgcgcggccgtgatctgctgcgctccaccgcgctgcaaatgtggattcgccagtgtctgttggctggcggctttgagccggaatgcggcaacacggaaaagcctctcgccgagcaccccgagtatgcgcacctgccgctcatcgacaatgcggccggtcggcgtttagccaagcgcgaacgttcgctggatatgggagccttgcgcgcccgcaacgtaacccccgagcaaatcatcggatactgcgcctggttgctgcgtctgcaacccactccaatcccttgcaaacccgccgatctgctggcagatttcagctgggagccgctgcgtgccaaccacctggaccgcgcgctgaaaccggacgatccaaccactccacaatggctggcagaagcgttaggctagaggcagcccaacaggaaggattccaatgtcgtcgaagctctggagaaacgtggcgctggcaggcgtggccgccgccggtgctgccgtgtgggccgtggccccgcgcacgttcaatgacaagcgtcgtaatttcgtgccctccattccgaaggtatggtatgcccatcgtggcttgcacgatgcgggttctggtttggtcggctataccgatatcgctgattatggtggggataattcggtcagcgcccaagccgataccactgagcgatccatcgccgaaaacgatgattatgtgtcgcttgcccgtcgcatggctgtcaaggccggctacggcagtgcggatatgaccggtccgatcgctcctgaaaactcgctggccgcattcgccgccgcctgcgaggctggctatggcatcgaactcgacgtgcagcttacgctcgacggtcaagtggtcgtggtccatgacgccgatttgctgcgcgtggccggcgaccctcgtcgcgtcgaagacctgacgtacgacgaactgacccgtattccgctgttcccgaacggcaagtccggtgacttgaaggccgaaccgttgccgggtgccgacgcgaacccgccgctggtggtcacgccgtccgccgcgccgaaggggtactaccagcatgtgccgctgttctccgatgtgctggacgtggtggccggccaggctccgctgattgtggaatacaagttcagcgacaacaaggcttgggatgagcgtagcgaagagctcatggaaaagggccacgccttgcttgaggcgtatgacggcccgtacgtgatcgaatccttccatccgggcgcggtgaattggtacaaggagcatcaccctgaggtgtgccgcggtcagctgagctggccggcgaagctgagcaagaatggtgcggctgaatgggccgccggcttactggcgttcgactggctgtctcgtcctgatttcgtggcctatgactggaccggtggcgctacgccgcaagtcaagctcgctcgttcgatgggtgcgatgccggtttcatggaccgtgcgcagcagcgacgagctcgcccagtgcgcgccctacttcgaccgccacatcttcgaagcgttcgtccccgacgcagtgtgaggttgagggcgttattgatgtgctcatggggcggttacaggctcatcgggcggtaacttgcccatggggcggtttgaagaatatgtgaaaccgcggaattaagccattttggcataccgccccatgagggttttaccgccccatgaggcaattaccgccccatgggggatttcccgccccatgaggtatggcgttttacttgtgatatggctcgccagcgttgatcttataagcgcgatagatctgctccagcagaatcacgcgcatgagctgatgcgggaacgtcatcttcgagaaactcagcagaaaatcagcacgacgcagaatcgcgtcgtcaaggccgattgagccgccgatgaccagctgaatatggctggtgccacgcaatccaaggtcgttgattttggcggccaattcttcgctggacagctgcttgccattgatggcaagggcaataacaaacgcgccgtccttcagatgcttggcgatgcgttcgccttctttggccttgatctgtcggtcaacgccttcggaggcgtggtcaggcgttttctcatctgccacttcaatgatgttgagcctgcagtagcgcgaaagtcgcttggaatactcgtcgatggcgtcgcgaagatatcgttccttcacgcgtcccggcgcaataatgtcgatttgcataaaaagcccatcacattggctcccctctctgaggggagccaggaaaatcagtcaattacgccatagagacggtcgccggcatcgcccaaccccggcacgatgtagcacttgtcgttgagcttctcgtcgaccgcgcacactacgaccttgaagtcgatggacggatcgatgtgctcttccacgaacttgatgccttcaggcgccgcgatgatgttgatcgcggtcacgtccttggcaccgcgctcggccagatagtgcgtggcagcaaccagcgtgccaccggtggcgagcatcgggtcgatcaggaagcactgacgaccggacaggtcctccggtagacggttcgcataggtgacctgctgagtggggtgttcctcgtcgcgcttcataccaaggaagccgacttcggcggtcggcataagacgggtcatgccatcgagcatacccagacctgcacgcagcaccggcacaatgatcggacgcggtttggccagcttcttaccggtcatcggagcgaccggtgtttcgattggtgcggcaactacggacaggttgcgggtggcctcataggcctcgagcatcacaagctccgagacgagctcgcggaaagtggaggaaggagtgttcttgtcgcgcagcacggtgagcttgtgctcgaccagcggatgattcaaaacgtgaagttccatactctccagcctacccgtagttcgcggggaagtcacttgggcggcagtcgcgcgcgtatcgcacaccaatgtaaacagcgttcgacggcgggccgcgtaacaccgttgattttgtaacgtgagcgttatgtatgagacgcatatgaaatattcaggcaacggaaattcacgcaggcactgccatcgtatagtgcagtcggccggaagccagccgtcgatatacggcaagtggttcagcacgatatcaggcatcagggcacggtacggcaatcagcgtagacattccgcgggcgggcaacgttcgcggaatgtagtcgtatgtggggaggaagagtcatatgactcgattgcaaagactgaagatgggtgctgcggtgtgcattgttgccgcagtgcttgccaccagcggttgtggctggggtcgcaccgtggccgagaaagaggcccaagagaacaacgcgactgcggcaagcgacacctcatcatgtgtggacacctcaggcaacaccatcaaaatcggtttcgtgaattcgctgtctggcacgatggccatttccgaacagacggtgagtgattcgctgcacatggccgttgatgagattaacgcaaagggcggcgtgctgggcaagcagctcaaggtagtgcagcaggacggcaagtccgagccggctgtgttcgccgaaaaagccaagaccctcatcgaaaaggaatgcgtggccgcggtgttcggcggctggacgtcctcttcgcgtaaggccatgctgcctgtgttcgaggcggataacgcgctgctgttctacccgctgcaatacgagggcatggaagccagcccgaacatcttctactcgggtgctgcaccgaaccagcagattgtgcctgcgcttgattaccttaaggagcaaggctacaagaagctgttcttggttggctccgattatgtgttcccgcagaccgcaaatcgcgtggtcaaggcgtacgccgagggcaatggcatggaagtggtcggcgaggaatataccccaatgggctccaccgacttcaccaccatcgtcaacaagctcaagttctccggcgcggatgcggtggtgaacacgctgaacggtgattccaacgtcgcattcttcaaggaatacaaggcttccggcctgaaagccgccaccacgccggtgatttccatgtctatcgccgaggaagaggtttccgctatcggcgttgacaacgtcaaggaccagctcactgcttggaactactaccagacgctgaacaatgcgcaaaacaagacgttcgtgaagaacttcaaggcgcgctacggagccaatcgccccacctccgacccgatggaatcggcgtacacatctgtgtacctgtggaagggcatggtcgagaaggccaagtcgttcgatgtggacaaggtcaaggctgcagcagacggtgtcaccttcaatgcaccggaaggcaaggtcaaggtggacggcgaaaaccaccacatctacaagacctcatacatcggcaagatcggctcagacaagctcatccacaccgtctggaagtcggacggtcccatcaagccggacccgtacctgaagacctacagctgggccaagagcctgagcgccagcgtcgagagcaactgagagaagaggacacaacaacatgggtatgttatttccacaaattgtggcaggtctgtccaacggatcgattctgctgctcgcagccctcgggttgtcgttgaccttcggccagatgggcgttatcaacaacgcccacggcgaattcatgatggccggcgcatacaccgcatacgtcatgagcatggtcatcggcaataaaacagtgtccctggccgtggcgctggtggtcggtttcgtagtagccggtttgcttggtttactgctggacgtgttgctgctggagcgtatgcgcaatcgtccgcttgatacgctgctggttaccttcggtgtatcgctggtattgcagcagctcgcacgcgatattttcggtgccactccggtctacgcttcggctcctgaagcgctgaccaatccggtgaccatctttggctacagcttctctgcaggccgactgttcatctttattctgtcgattatctgcgtggctgcgctgtacgcgatcctgaagctcacgccgctgggtcgccagattcgcgccacttccgagaaccgcgacctcgctgaggtttccggcatctccaccaagatggtcgaccatgtgacgttcttcctgggctccggcatcgccggtatcgctggcgtggcgctgagcctgctgaactcgattagcttcaacttcggtacgaccttcatcgtgcaggccttcctggttgttgtggccggcggcgttggccagctcaagggcgcggttatcgcctcgttcgtgctgggcttgtgccagtcgtccatcgaactgccgacctctgcctcgattggtcaggttgccgtgttcctgattgtggtggtgttcctgcagttcaggccgcagggcttggtctccatccgctccaggaacctcgcgtgagtgcttcagaagggtaaggaaacgacaatgaagatgactttgagcgaatacgccacgaaatataaggctttgatcggtgtgatcattgccgtggcgctgatcttcctttctccgactgtgctgagcgtgtacaacctcggcctgctgtccaaatacctgtgctacgcgatggtcgcggtcggcatcggcctggcttggggccaaggcggtatgctgacgctgggccaaggcctgttctttggtctcggcgcgtacgtgatggctatccacatgaagcttgaggacattggcgtgggccaagtgccggacttcatgtcccagtacggcatcaccaaggttcctggattctgggaactcttccgcaatccggtcatcgccgtgattggcgtggctgcggtaccgggcattatcgccgcaatcctcggtctggctgtgttcggccgtggcgtgcgtggcgcctacttcgcgattctttcgcaggcgctggttgccgcgttcgccgtgctgcttatcggccagtcgaaaaccaccggtggcaccaacggtctcaacgatttcaagggattctttggttacgacttgactgataacgccaacaagcagatgatcttctacatctgcgcgttcctgacgctggccatggtgcttatcgtctactggattcgcaaatcgtttatgggcgacctgattatcggcgtgcgcgaccaagagaaccgcatgaagttcttgggctataaccccgcctccatcaaggtgttcgccttctcggtggctgcaatgttcgccggcattggtggcgcaatgttcgtgccagtggtcggcatcatttcgccgtccgatatcggcgtgacgccgtccatcctgatgctcgccggcgtggtgatcggcggacgtgccactttgctcggcccggtggtcggcacgctgctggtgcgctttgcggaaacgcagctgtctgaggcgtatccgtccgcgtggacgtacatcgaaggcctgatcttcattctggtgattgcctttgtgccgaagggcttgggacagttcaagggcgtatggccttggattaaggagaagatcgggctcggaaagagttcggttggagcttcggctggtgctggtgctggtgctggtgccggtaccggtactgctactgcaaaggcggtgaacgcatgagtgaggagaagaacatgagctcgaatccatcggctcccgcacctgcatcgcaggccgatttggagcagttgcgcgccgaaatgattgagatgcgcgacgaagccaagcgtatgcgcgacgaagcggcccagatgaaggccgaaatcgttgaagagcgtacgaagctgcacgatcagcttgcggtgctggatgatcgcggcggccagtggagcgattatctggaagttcgtggactgcacgttgagttcgatggattcgtggccgtcaagaatcttgatttgactgtgcagcacggcgatttgcgattcctgatcggcccgaacggtgctggtaaaacgaccatcatcgacgcgattaccggactggtgccggccactggttccgcggaattccgtggcgagcagctgttgggccgcaagccgaacgacatcgtcaagctgggcgtcgggcgtaccttccagaccgcatcggtggttgaagagctgtccgtgttggagaatctgcagctggccgagggcttccgcaagaagggtcgtgagctgttccagccgatgggcggcgtttcgcagaacatcgaatacatgatggacgtgtgcaatctgactgtggatgcaaacaagcccgcaggcatcctgccgcacggcaagaaacagtggctggaaatcggtatgctgctcgtgcaggacgcgcacctgctgctgctcgacgagccggtggccggcatgactccggccgagcgtgtgcagaccggtgagctgctcaagcgatgcagcaagaaccgcacggtcatcatcgtggaacacgacatggatttcatgcgtcagttcgccgattcggtcacggtgctcaaccagggcgaaatccttgccgagggttcggtcgaagacatccaaaacaacgaagaagtagtccgcatctacctgggcggcggagaaaactaactccctgtctcccctccctgaggccgaggcgttaagcaaacagcccagtgggctgtttgtagccgaaggcgagacgatagtcgaaccagcaggttgcaggcaaggcccgtccttaattgcggacgagctgtcaccgaaggtgactgaggggagtaggtaagaggaagaagcgcaatatggaccgcactgacaacaaccatcgcatcccggaatgcgctttttcggtgcatattgagggtgatacaacgcgcctcaacatcaatatgcacgacgccgtagaaagtgaataatcatggcaatgcttgaagtaaaggatttgaacaccggttacggcaaagtgaccgtcgtcaacgacatcagtttcgacgtggccgccggcgaatgggtgagcatcgtcggcaacaacggtgccggtaagaccacgctgttgaaggcgattctgggcttgctgcccgtttcgtccggttcgattagtttcgagggcaaggacattaccaaggctgcaccgaaccaacgcatccgcaagggcatggcgttcgtgccgcagggccagcagtcctttggcaccatgaccgtggacgaaaacctgcacgtggtcgccgaccgctacggttcagaggccaaggcccgttacgacgaagccgtggaaatgttcccggtcttgaaggaatttgctggccgacgtgccggtctgctgtccggtggccagcgtcagcagctttcgattgcccgcgcgctgatcacccgccccaagctcatgattctcgatgagccgaccgaaggcatccagcccaatatcgtcgccgaaatccagaaggccattcgcatgatggccgaagacaagggtatcggtgtggtcttggttgagcagaaggtccaattcgccgtcgagcgcgccgaccgctactacgtcctggcctccggccgtttcatcgccaccggcgaaggcggccccgaccaagtagaagccgccaaggaatccatgagagtgtgattgattcgacccccgtttatggccatagagcgttatgagaaacgtcccgttcttataacgctcttattattgggcgatgttagggctcacattggtgtgcctgaaaaactccagtcaacaacagaggatgttatgagacttacaccacgagagactgacaagttgatgctgtacttggcggggcagcttgccaaagaccgcaaagccagaggcgtgaagctcaactatgtggaggcgattgcgttgatttccgccgaatgcgttgagcgggcgcgtgagggaagcactgtggcggagctcatggcatacggtcgcacgctgctcaagcctgaagatgtgatggatggcgtggccgagatgctggaagtggtggaggtcgaggccacgttcccggacggcaccaagctcgtctctattcataaccccatcgaatccaccgagaagttggtgccgggggaatatctgctggctgacgatgatttggaactcaatgaaggttccgaagacatcgagctggacgtggtgaacactgcggatcgaccgattcagattggttcgcacttccacttctttgaagttaataagtacctgaagttcgaccgtaaggcggcgtatggcaagcggttggatatcgcggctggtacggctgtgaggttcgagccgggtgaaacgcatcgagtgcggttgattgatattggtggcacgcgtgagattcacggcttcagcgcactggttgaggggaagttggatgaccctgaggtgcgggaggccgcgtttaagaaggcgcatgagcttggattctcgggaatctgagctaagggccaccctcagtcagcttcgctgacagctcccgccagcggggagcggactacctctcagtctcgcttcgcgagccagctcccctgacaaggggagctgaaaaacagcaaggacttttgacatgaagattattacgcgcaaggattatgcgggaatgttcgggccgaccacgggagaccgcgtgcgactcggtgacacgaacctcatcatcgaggtggaaaaggactacacgcactacggtgatgaactgaagttcggtggaggcaaatcattccgcgacggcatgggccaaagctccgtgcagctcgacgttgaatcgccggataccatcatcaccaacgccctcatcgtggactacaccggcatctacaaggcggacatcggcatcaaagacggcaaaatcagcgccatcggcaaggccggcagcccgcagaccatgagcggtatcacccccggtctcgaagcgggctccggcactgaagctctcgccggcgaaggcctcatcgtcaccgcaggcggactcgacacccacatccacttcatctccccgcagcagattcgcactgccctcgccggtggcgtgaccacgatggtcggcggcggcaccggtccggccgacggcaccaacgccaccacctgcaacccgggagccttccacctgacccgcatgatcgaggccgccgaagcgctgcccatcaacatcgcctaccttggcaagggcaacgactccagccccgaaccgttgcgtgagcagattcgcgccggtgccgcaggcctgaagatccacgaggactggggtgccaccccggccgtcatcgacactgcactcggcgtggccgacgaaaccgacacgcaggtggctatccacaccgatactctgaacgaaggcggttgtgtggaagacaccatcgccgcgttcaagggccgcaccatccacacctaccacaccgaaggcgctggaggcggccacgctccggacatcattcgtgccgctggcttcccaaacgtgctgccgagttccacgaacccgaccatgccgttcacgcgcaacaccatcgacgagcatctcgacatgatgatggtctgccaccacctcgaccgcaatgtgcccgaagacatctctttcgccgactcgcgcatccgccccgagaccatcggtgccgaagacgtgctacacgacatgggcatcatctccatgatgagctccgactcgcaggccatgggccgcgtgggcgaggtcatcacccgcaccatccagaccgccgacaaaatgaagaagcagcgcggtccgctccccgaagacgaacacgacaacaaccgcaacgacaacttccgtgtcaagcgctacgtctccaagttcaccatcaacccggccatcacccacggcatttccgaatacgtgggctccatcgaagtcggtaagatggcggatctcgtgctttggcagccgtccatgttcggcgcgaagccggaaatggtcatcaagggtggctccatcgcctactctcgtatgggtgacgcgaatgcttctatcccgaccccggaacctgtctactaccgcgatatgttcggcgcgctcggccgtgcgcttggcaagtcctgcgccacgtttgtttcgcaggctgccgtggatgacgatatcaagggcaagctggagctgcagcgccaggtgttaccagtgcatggctgccgcacggtaggcaagaaggatctgaagttcaacgacgtgctcgccgacattcaggtcaatcccgaaaccttccaagtgacggtggacggcgaaccggtccactctgacccggcgtacgagttgccgcttacccagcggtacttcctgttctgagagaactggtggctctcctcaaaggggagagccacttggttttagccttcggccacgaaatcggtcacgaaatcggccacatctcgaatgaggtcgaaggcgtcgtcgcctcgggtggtcagtacacgcaagcagatgccattgattacgcggctcacgccgagctcgccggtgaagccgatggcgtctgcgtgttcatggatgcgagtgatgagcgcgtcttcggcggcgatgcgggcagtctcgatgcgctcgcggatggcggcggaggatgcttctttagttgcggcatcttgtacagcgtcgctagggtcgagttctggcaggtgagcgtagagaacgccgcagtgggtgaattcgcgccacatgccgagttcggtgtagtcaaaagcatcaggttccaacagcatgcggtcagcaaaggccagatgttcgcgcggttgggcagcggcggcttccgccttggaaggccggcctcggcgatgtgcgtgctgttgcgccaattcggctgcggcggccttggtcacggcttcgggttcggccacatatacgcgcatacgattcgtaaaacgtttcatggcccaacgctcatccatcccaacgcggccacatgtcgccacatccgcatacacgaatgctgactcggcggaaatatgcgcggtggtcaggttcatgaatgagctgttcttgaacggaatcactgggaacggcaggaacacggctttggcattgccacgcgccctgagttcgatggtgcgttcggccgagccgtccgcggtgtcgaacaccttctcgtagctttgcgttttgatggtcgaatcggtgcctgggccgaagtcgatatcgatatgggcttcatcgcccctcaggaagccaggggaggcgagcatcacgacgaaatccgaatgacgtccgttggtgaacggggtcatcagtttgaacggcgcctcgaaataaatatcgtcgattttggtacgtccgtggcggaatgcagtggatagacgaaaagtgctactgcccatggacgaatcgctgccttcttatgattggtgcctgacgatgacatgggcaattatgccgcacttggtgcaacggtatgtttcggcccgtccgtttttggatacgggcgggccaaaacatcacatgtcctcgaacagcacgctcttcttgatccatgcgatgacgtcgtccactccggcaccgcccatcaggtcggtgaagatgaacgggcggtcgccgcgcatcttcttggagtcgcgggccatcacgtctagatcggcgtgaaccaacggggccaggtcggccttgttgatcaccagcaggtcggagcgggtgacgccggggccgcccttgcgtgggatcttgtcgccctcatcggtggcgatgacgtagattgtggcgtcggccaggtccgggctgaacgtggcggacagattatcgccgccggactccacgaacatgatctgcacgtccgggtgggtgcgggccatttcctcacaggcctcgaggttcatcgagcagtcctcgcggatggcggtgtgggggcagccaccggtctccacgccgacgatacggtccggcgcgaggcgtgagtgctcgataaggaactcggcgtcttccttggtgtagatatcgttggtgaccacgcagatgctgtattcgtcagccatcttgcgggtcaggcgttcgataagcgcggttttgccggaaccgaccggtccggcgacgccgatgcgtacgtatgacatggggtttctcctttatgtgggaattagttaggtatgtggtttgcgggtgaggttatcctggctcccctccttgaggggagccaggataattagctcatgtagagcctcgagtacaagatttcatgctgcatggcggcgatgtcgaggtaagctccggagatgccgagatcctcgggcttcaacgtcatcgcgatattcaccgcgcgcacgaggcgcgggaacgaatcatgcagggcgacttggccagcgtactggctgagcggaatcgccttcgcggcgcacatggtaagcgcgctcaacagcgaatatccatacatgatggccgcgtcgcgcacgtcgttcgcatggtcagccgcgtacaggcccatcgcgatcgaatgcaggccacggcagcggcgctcgcgaatcagcccggcatacaggtcgagcgacggcgagccgtacaggccgtcggcggcatcgtgcagctggtggcgttcggtgtgatgctcgtgcacggcgatgatgctgttttcgcgcgaatccgcagcggatgcggtggcattgtcggcaggacttggcttggcgaacccacgatgcccatccgaggtctgcgcctggccggcatccatctgctcggccagcttgaccaggcgggtacacatgcgctcgctgccttcacggatttcacgtgcggattgcagggccgaggccagctcgtcaagttcgatgagtcgctcggccagccctttgcgggagactcgcgaatcggtggcgtacttgccggccagcaccatctgcccgatttctttgtacggtgcgacttcgaggtagttcttcatatactcctcgaaatcggcgccacggcgcaagaagtcgcgctgtacgaaggtctccatgccgttggacagcgcgaacgcgcccacggggaagacgctgtcgcacacctgcagcatggccagacgtcgcgattcggtttcgttgatgttcatggggctatcagtgggtgtgccaggtgcggccgccgtcgtggctgtgggagccgtccgggcggtgcagcacgccgttcatctcatattcgccgggctcaccctcacctgcgtcgtgtgtatgcacatccagatggccggcggcctcctcggccgggaattccttgtcggcctcggcttcctgctcctcctcggccacgtcgcccgtggtcttgttggtgcccggaatcagtgtgccggtgccggcgtgggccttgacgatcaggaagccgtcaaacccaccctcgatgatatgcggttcataaccgatcttcttcgtgtattccatggtcggatggtcgtacggcaccagcacgcggtcgttctcgaccttgagactcaggtggcggttgcccagttcgaagcacaggcgtcccatttccgtcatcgagttaaccggaatctcaatcagctgtgcggttttaatgcgtgcgaaatagcgcttgtcttcggtttcggcgagcacatcgccatccttgatggtcttgccaaccatgatgccgaactcggtgccgtcctcggccaccttgcgcatgcgcttcttatcggtttcgaaccagtcgaaggcaatcgacacattaagtttgccgtcgctgtactgctgactgatgatgttgccggtgatttctttggcgatcatccgttctccttggagaaaattgcttgtggcgtgagaatccccacgtccttcatgccacagtgtagagagcctgttgcgtcactttgtaacgaatgatcgaaatatgcaaaaaatatagcggaaaaatatccgaaaacacggaaaccggatatatggtacacggtgtgtcgctagtaattgcaagctattttgcatggttgtgcattagacgaatcacagttgtgatattacatatcacgttcctggagcgggaggttgtggtcgagctccgaaatcaacaaaaagagggaagttggatataatcgaagtacctgacaccgtcacattggcgatgcacattccggataatttcatttcgccgtccaccggggcgttgttctacgtcatcatgattccggtgtgggtgctgtgcctacgctacgtgatccgcaacagcacgccggagaagatggcctacctgggcgccggcgcggcgttctcgttcctcatcatgatgttcaacgtgcccacgcccggcggcaccaccgcgcacggtgtcggcggcgcgctgatcgctctgctgctcggtccccagtacgcgacggtcgccgtgtcggtggccctgctgctgcaggcgctgctcttcggcgacggcggcctgatcacgctcggcgccaactgcttcaacatggcgttcgtgctgccgtttgtggcttacggactgtacgtgttgctacgtaaggtgctgcccgacggctggacggaacgcgtggccgaattcgtgtccggctatatcggcatcacgctcgccgcattctgcgtggcgctggaactcggcgtgcagccgctgctgttcaaagccgctgacggccaggcgctctacttcccgttcacctttaacgtgacgattcccgccatgctgatcccgcacctggccgtagccagcgtggtcgagggtctggtgaccgtggtggttgtcgaattcgtgcgccgcaccgcaccggagattatcgaagacaatgcccgtgtgaacttcgccgagaccgtcggtgctgacggcaaacaggtcgcgcacgccggactgcgcaagtctgcgtggattgcgctggccgtggtggcggtgctttccccgatcggcctgctcgccaccggcgacgcctggggcgagtggggcgccgaggacttcatgagtgccacggggctcaactacgtgccgcagtacatcgcccatggcttctcgtgggatgcgctgttgcctgactactcgctgcagggtctgccggacatcgccggctacattctctccgcagtgattggcatcgccgtgctcactattgtgttccgtctgctggcgctcgcggtgagcggcaacggcaagacatccgcgcgttgacgatacctgcatggatgcgtgagtcggaggattacgatcctccggctgacaagtcatccttcatcgaacacaacctggggcatttcggcagcgtactcgagcaggttggtcatgcgttgccgattgagtcgagcccggtcgacaaggtgctgggctcggtcaatccgggcgtgcggctgctgggcatactggccgcgattgtctgcgtcaacatcacatgcaacatgctgttctcgtacatcatgctggcggtggtgctgctgatgatggcgacccggccggcgcgcctgatgagggcgttgctcggcccggtgctggccgtatgcatcctgagcctggtcgtggcggtgccgagcctgctgattgggcagtacagtgcgccggtccggctggtggtgcgtgcgttcgtggcggtgtcgctggtgatcgcactggcgcgtacggtgccgtggaatcgcctgattgccggactgcgcgcagttggctaccctgattcggtgatttatatctgcgacgtgacgattcagttcatcgatattctcggtcgttcgatggtggagttgctggatgcgctgcggttgcgcagcgtgggccgcgaccggaccaagctgacgtccgccggccagttgatgggcgcgctgtttctgcgtgcgaatacgcaggcgcggcaaatggctgaatcgatggtgtgccgggggtttgacggtacgtatcatatccaccacgagcgtctgctgacgtggcgcaacggggtgtatgccgtgtgcattgctgcaatgattgcgctggcggtgtattcgggatgagggtggttcgaatgaatggagcccaataatgttcggattaaagcgtaatcataaacaaactgcagccatgcagccagataactcatggttccgcggcgacccgctggtcgaactgaatcacatcggcttttcctataaagattacggcgacgccgacgatgaaacctcgtcgcacgccgtgctacgtgatttttcgctgaccgtcgaacgcggtgagcgcgtggcgctgctcgggccgaacggcagcggcaagaccacgctgatgcgcatcatcaatgcgctggaatttccggactcaggcgagtatcggtttggcggtactccggtggttcgcgaggaagtcgaggcgaagaacagcctgttcgccaaagcgctgcatcagcgcatcggattcgtgttccaaagctccgacacccagctgttctgcccgtcggtggaagaggagattgcgttcggtccgttgcagatggggttgccggatgccgaagtacagcgcagagtcgatgacatggtgacgttgttcggcttggatcggatgcgggagcgggcgccataccgtctgtctggcggtgaaaaaaagcgtgtggcgattgcctgctgcatgtcgatgaatccggacctgcttgttctggacgaaccgaccgacggcttggacgagcgcaataccgacgtagtggttgaggtattgcgcgccttcactgatgccggcaagactgtactgttctccacgcatcaccacgacatcgtggagcggctcgacgctcgcatcgtgcgcgtgcatccgtcactatggcaatgacattcacgtggcgtctattggatatcttcatcgaaaaaagcagaaaggcatcggcgaggatcgcgagtccggcgagaactgcgatagtcgctttggtgatggttgccttcatgagagtttccccaaggtgttgacgttgatttcatgagattcgaaaaagagcgtatctaggccgaaccggacagtaagtcaacggtttctggaaaccagctgaaaaagctacggtattgtgaaatatgtctcatcggaatgggtcaagtttggcctagcgctcgcagtcgtgcgcgaagattcgttggattgattctcggtggattaagtcataggaagaaactagacaccttgcggtgtaaaaccgggaatcagaatggtgtaaaaccgggaatggaaatagtgtaaaatcgggaatgagaaaggtgtaaaatctatattgaggtgattgggtagctgagaaaggccggaaaatgaacgatttgaacaatcgtagtgataccttgactcaacctgattatcgtgctcgcgtggtcgatggcaggttaggtaagttacttaaagcattcggcgcggtggaaatcgtcgggccaaaatggtgtggaaagacatggacggcgctttcccgctcgcgaagtatggatcgtctggatgatgccgctacctttgcggccgcacagactgatccggcattggtactcatgggtaatgaaccgcatttggtggatgagtggcaagatgtgccgcaaatttgggatgccgctcgtcgtcatgtggatgacaatgcgaatcgcaaggggcagctgattcttacgggctcggccattccgaaggaccgagaaacaattcaccacagtggcacaggtcgaatttctcgcttgcgtatgtggcctatgagtctgtgcgagtcagggcaatctaccggtgtagtgagcttgtctggtttgtttgatggacaattcgagcctgccgaatgtgcaaccaacattgaagatattgccagatggtgctgtcgaggtgggtggcccgcaaatcttgatttggatgacgagtttgctctggaaattccgagtgaatatatcaagagtgtgcttgatatcagcgtgcccaagatgaacaagaaccctgaaaccgcgcgtgcactcatgcgtgcgctcgccgtgaacgtatcgcaggcaccaaaatatgcgacgctggctgcggatatggcctatggcgatgagcgccgtgaaccggatacgcagacagtaaagagctatttgggaatgctcaaggacttgtaccttctgacggatttggagggttgggagccgccactccgcgcaaagagtcgtgtgcgaaccaagcccaagcgatatttcgtggatccttcgttgcctgctgcggttttaggtgccgcgccgaatactctgatgcgcgatacacagatgctcggcgatctgtttgaaacgctgtgcattcgtgatttgaatgtatatctgtcggccatgccgggtgcgaacaatcgcatcgcctactaccgcgatgacaaggggcttgaagttgatgtcattatcgagttgtctgacggcaggtggggtgctatcgaaataaaactcagtgaccttaaggtgaacgatgacaatgcggataagctcaaatccttccgcgacaaaatctgtggcaaccccatggcccaagttcgcgaaccagagttcatgatgttccttaccggccgaggtgggaaggcctatcgccgcaatgacggcatactggtcgtgcccatcgcaacgttcggggcgtgaatcgggtaaaagaaaagaagcgccgaaccgcgaaagcgcctgtcggcgcaagggccgctcgcggcggcaaaaaatggagcccggggcttaagcacggtccgacgcggatacttagtatagcttgcgatggggctcgccgcgccgggggaggtgtggtgttggctggtagctgattgttggggtgcggttggtgggtctctccctcagtcacgggcatcgcccgtgacagctccctcatcagagggagcctggagcggggttactccaaccgtccgcgacgccagaggttggcaccgtgctggaaatccttggcggtggccatgaggctgccggcggtgtgcataaggcgggcggctttggtgcgcacggccttctcatcggcatccgaggagaaggcgccgttggcctcggcccgggtcaccatgcgccgcgcctccacgcgcaagcccaacgccaccacatcggtaaacgccgccgcacgctcaagcgccacggcaaaatcgcccacaaaagcaccggagagaatcgaatcggccaatcgcacgatgtcatcttcactgggagcctgatccacgccggcgatggcggaggcggtagtggccaccggctcacccaagcgccacagatgcgcgatcgagtcgcgattcgatcgcatccacgtacgcaacatatacagtcgccacagcacaccaggcagcgaatccggctcggcatcgctccatagttcggcgatttcatccacgccgaccgtctccaccaacgtgagcacccgctcaacaaccgccgggtcttcgctatggcgcacacgatccagcaatgcggcagcagacagatgactcatctcgctcaacgcctgcgggtccatgccaccggccaatccatcggccacagccgggtcgagctgagccgggcgcgaggggcgtgaagaacccatgcgagcaggtccgaatgccgctccggccgcacgcaacgagccgaagcccgggcccagactgccggcggcaccattgtgcgcggcatgagccgcggcggcagcggccgaggagttggatgaatcaggaaatgcgggtctagtagacaagcggttgaaccttctgaatatcgatgattttgggaccatgaggcgtcggagtgacgaacagcgccaccgccgtgccggtcggcatgaacggtgtcttggcgatcaggcgtttgctcaaagacggcgcaacgcacatgctgcgcaggtgtccgaacataccaccaatcaccggccggtgcatgcatatcgctatgggctgacggcgctcaagtgcgaactcgatttcgctgagtagacactcccatgcggtgtccggcgcagcggcgtatgcatcttcggtgagcggatcgagatgaaccatgtctcgtccggtctgccacgcgaacatctccaacgtctcctggcagcgcacccaaggcgacgtggccagtcgggtcggattgaaacacgccagctcgcggttcagcgcgtatgccgcagccgcgccgcgcggcgtgatcggacggttcgcgtccgaacccttccacagctttcgcgcttccgctttgccgtggcgcacgataatcaccggcaccgcgtccagtgcaccttcttcgacccgatcaacgaatagcgcgaggatgtccttatcggtggaatggctgagcttcttgcgggcctcggccggcgtcagccacaaaacttcgtcgatttcgccgatgtccgcccgatgcaccgggccaaacgcatgggtacgccgcaggttgtcgatggcgctgatcggcgtggccatccagaactggatatgtttggtatccgccgaccgatccttggtatggcgctgtttgctgccttcttcggacagcgggtactcgatgtcgcccagataagggccaagttccacggacaggcccgattcctcgccgatctcgcgtacggcggcatgccggtgcgattcgttcgggtcgaccttgcctttcggccagctccagtcgtcgtatttcgggcgatgcacgacgcacagttcgatgcggttgagtacgttgtccgccgcggccgggctgtcggcctgcgccgggtccggggtgggagccacgtccgatgcgccgtgtgctgccgtggccttgccgtcagaatccgcggtattcgcgatgatggtgccatcggtggcaatattggatttcgctgatggagacgatgcctgcgtcggctcggcatcatccttccaccggtacagaataccgccggcggcttccacgattcgtctcatactgttcgtacccatctcttgtattgtaggtcacgttggaccgctgctacgtagttttgcgcgctgaacgacgatgcccggcatcctctcgaaagaggagccgggcatcgtaaccaccctcagtcagcttgcgttgacagggagcatcgagtgaaatcagttgtgcgaattggggcggcgctggtgcttgcgaatcaggtattcctgactgtcgaccagcgggcggccctcgtcgtccttggtgtgcagcacatacgtgccgtcgggctgcatgtgccagctcatggtggagtcggccatctgcaggtccacgtacttgatgagcccgtcaatctgctccggggcggtgacacgcaccagagcctccacacggcggtcaaggttacggtgcatgaggtcagccgaaccgatgtagacctccgggccggaagccggaccctcgccgatctgcgggccgtccgcgttgcagaaggcgtagatgcgggagtgctccaggaagcggccgagaatcgaacgcacgcggatgttctcggacagaccgggaacgccgggcttcagagcgcagatgccgcgttcgacgatgtcgatcttcacgccggcctgagaggcacggtacaaggcgtcgatggtcttctcgtccacgatggagttgaccttgatcttgatccaggcctccttgccggcgcgggcggcgtcctcctcgcggcggatgcgctggattagaccggtgcgcacggtgcgaggggccaccagcagacggtggaagctggacttcggcgcgtaaccggagagctggttgaacagacgagtcagatcctggccgaccaccgggtcgcaggtcagcagacccagatcggtgtacagtcgcgcggtcttcgggttgtagttaccggtgcctacgtggcagtagcggcgtagaccgtccgcttcctgacgcacgacttcgatgagcttgcagtgggtcttcaagcccacgatgccgtacaccacgtgcacgccggcgcgttcgagcttgcgggcccacgcgatgttggcgtcctcgtcgaaacgagccttgatttccaccaaagccagcacctgcttgccggcatgagcggcgtcgatcagggcgtcgatgatcggcgagttggagctggtgcggtacagggtctgcttgatggccagcaccttcgggtccgcggcggcctgcgcaaggaaggcctgcacggaagtggagaaggagtcataggggtgatgcagcaggatgtcgcgctcgcggatggcggcgaaaatgtcctgcgcacgggaggactcgacctcggcgatctgacggttcgtggtcggcacgaacggacggttcttcagatccgggcggtccacgctgccgagctcaaagagcacggtcaggtccagcgggctgggcagacggtatacctcgtcctggcttacgccgagctggtcggcgagcagctgggagaggaacgggctcgtggtgtccgtgatctccagacggatcggcggtccgaagcggcggcgcagcagctccttctccatggcgttgagcaggttctcggcgtcatcctcttccacgtcgatgtcctcgttacgagtcacgcggaaggagcgggcttccttgatgatcatgcccgggaacagggattccagatgcgcggcgatgagcttttccatggcgatgaagccgtaacgctcgtccttggactcctcgtcggtcatgtcgtccaccggcaccaggcgcggcaggttgcccgggatcttgacacgggcgaagtgcgacttgccggaggccgggttctccacaatcacggctaggttgatggaaccgccggaaatgtaggggaacgggtgggccggatccacggcgagcggcgtcaggaccgggaacacctgctggcggtagtagcgcgagagacgctcctgctcggaggaggtgagcttgtcccacgtcagcaggacgatgcgctccttctccaattccggcagaatggtgtcgatcgcgtaatgtgcgtgctcgtcttgcagacggtgtgcggtctcgctgatcgcgcgcagctgctgacgcgggctcaggccggcggcagacggcacggcgatgcccgagtcgatacggcgcttcaggccggcgacgcggaccatgaagaactcgtcaaggttcgaggcgaagatcgcggcgaagttggcgcgctcgagcaggggcatgtcttcgttctccgcgcattcgagcacgcgctggttgaacttgagccagctgagctcgcggtcgaagaaacggtccttgggcagcggtgcctcgccttcctgatcgacgcggcggtcgttgttgtcgttttcggcaatatgctctgcgatttggctgcgcagaattgccttcgagggtgcgtcaaatatctgtgccatagcttatatcgtaagctttggcgtggccggaaaacgactgaacgcgccagaattcaacgggtgttcatgttagttcggtgttggttggttttgagtgtgctagcgtcgctcgcgacacgccgtgagcggcggtgaaacgaacgaaatcgaacatcggacgggttcgatgtgaacggttcagctcgttttccgatagccagaaagtgcgattgaacagttgtgataaaaaacgcacaacgactctctgcaggttgcgagaaacgggagtgatgaatagattatgaggtacaagaacaa

SEQ ID NO: 191 - DNA, 31400 bp, Unknown
  R101_18m  MAG No. k141_14037
aatcaggcgaggaatgaactggcaatcattgactataaagaagtagtacaaacacgctcttgagttctcaaaccaccaccactcacccacctcgcagctccccggaggagaaccactcgctgagcggcagcaaggaaataacttacacgcaaccacgccacaacgcaaatcaaagcgcacaagaacccaaggaatcggcataacagcgcggttccttcggcgtgtcgcacagagcccaatttgctctgatagggctagcgtaacccctcgaatgtttccggaaaacatcgaatccattattcgactggcgtgtcgcacgagttttcggactgtcagctccatgttcatcgttcggcaaccacaccaccggcgcacaatcaatgcatggcaacaacgctccatcatcggatttcgttcatgaatcacgggtatacctgtagttatgaccaagaagattgctgtattaaccggggcgggcatttccacgtccgctggcatccctgatttccgcggtccggacggtgtgtggaccaagcatcctgatcaaatgagcgtttacgacatcgatctgtttctgcgtaacaaagaagaccgtgagtactcctggcgctggcagaaggaatcaccagtatggaacgcacagcccggcaccgcgcataaggcgctggtcaagctggaacaagccggcatgttgacgctgctggccacgcagaacttcgatgcgctgcatgagaaggccggcaacagcgacagcgtcatcgtgaacctgcacggcaccatcggcacctcgcattgcatgaagtgccatcaggaatatgccacggcggacatcatggcccgtttggatgaagaacccgatccacattgccatcgcaaactgaagtatcgtggcgatatgccatgcaatggcattatcaaaaccgatgtggtgtatttcggtgaggcactgccggacggagcgatggagaagtcgtacagcttggccaccaaagccgacgaactatgggtaatcggatcgacccttgaggtgtacccggcagcgagcattgtgccggtggccgcgcaggcgggcgtgcccatcaccatcatgaatatgggtcacacgcaatatgaccatcttgcgagccgcttgattcatgaggatatcgccgtcgcgctgccgaagttggtggacgagacgattgcggagaacaagtagtcctcagcataacgaaagcgccggtgggtggttaagcaactgatgattgttggttaaccacccaccggcgctttcgcgccacctcccgctagcgggaggtattggagcacacttctgcgcggcctcccgccagcggtattggaatcagtagatgcgcttgggctggaatccagcttccctgagtgccacgaggatgcggtcgatgtgctcggggccgttggtctcgaccgtgacgccgagagacaccgcgttggtgtagtggccggatgccttgaactggtcgtggtcaagctgaatgacgttggcgcgctgctcggcaagcagggtggccaccttgacgagctggcccggagtatccggcagctcgacctcgaagttcatgatgcgaccgcgggcgatcatacctttctgaatcaccgcgcccatggtcaccgtgtcaatgttgccgccggacatgatcggcaccaccacgtgcgggccggtggcggcggcgaacttgcgcgaacgcagattcagatgctccaacgcggccagcgagacggcaccggccgcctcgaccaccagcttgtgcttctcgagcatgagcagaatcatttcgttgatgtcgcgctcggtgacggtgaccagatcatccaggaactcgttgatcagcgcaaacggcagatcgccgggatgcttgaccgcgacgccctcggcggaggtgaccacatggtcagccggagacacacgacccgcggccagcgagtccttccagtccggtgagccctccggaatcgcaccgattacgcgcacttcaggcttgaatgtcttgatggcgagcgccacgccggcacccaggccaccgccaccgagcggcacgaccacgtcagtgacgttcggcacgtcttcgaggatctccagaccgatggtgccttggccgcagatgacttcgtaatcgtcgaacggcggcacgtaaatcatgccttccttgtcggcgagctcagcagcgtgggcggcggattcgtcgaacacatcgccgtacagcaccacatcggcgccgtaggccttggtggcatcgaccttcagcggcggggtgatctgcggcatgcagatggtggccttcgcaccacgctcacgggccgcataggccacgccctgggcatggttgcctgcggatgcggtgacgatgccacgggcgatctgctcttcggtgagcgatgcgatcttgttgtacgcgccgcgaatcttgaaggaaccggtgacctgcaggttttccggcttcaggagaatctcatgaccggtcatctcgctcaataccggcgaagggataatttccgtatgacgggcagtccctttgagacgtttggcggccagcttcagttcggctgcatgatcacgctgcagcgccttcaaaacatccttttgttccatagctttccattgtatggcgcggggacaccgaaaacagtggcttatctcgctaacgagcgctcatttacggtaattcccgttcgtaatcagctttcgaggggctgatttggcttcgcggggaggtctatctcctcttcgaggggctgcccgatcgtgcaatgcgtgagtatgacacatcatttgcagcggtattatgcggttttcggagcccggctattcaggcaccaaccccctgaaacggagatagacctccccgcgaagccaaatcagccccttgaaatggagataccgcctagcaacacttataggctgacgacgacgccctcccatggtgcaagctcacggccggcaagagcggccacagcgtgcgcggcgtcatacgtgctgatcaccacgttcgactcggcaaggccatcggccactgccaacagttcggcggattcgcgaggcaaatcaacggttcggccggacatgttgaccacgaccagcagcttctcatcgccgagggtgcgggtgaaggcgtagacatgcgcgtcatccgcatcgagcagatgccagtcgccggccgccacgacaggcatgtcgtggcgcagcgcgatgagctgcttgtagaaggcatacaccgaatccggatcgtcgaattcgccggccgcgttgatcgccgcatggttgggattgacggagatccatggctccttagcggcatccggcgcagtgaaaccggcatagacagagccgtcccattgcatcggggtacgcgaattatcacgaccgcgcgcggcgatacccgccaacatcgattcgggcgactgcactttggcttcctcaaccctttgacggtaagcgttcagggactcgaggtcacggtactggtctaggcgcgtgaagtgggcgtcggtcatgcctagctcttcgccctgatatatgtacggggtgccgcgatgcatgtgcagcatcaggccaagtgccttggccgaacgcacacgagattcctccgaggagtcatcaccccaacgagaaacgacgcgaggctggtcgtggttaccagtaaacaggcttgcccagcctgcattcttcacggccgcttgataaccggccataatgctcttgagcttcggcaggtcaagtggcagtggcttccatttgacgccttcacagtcaaaatcaacgtgctcgaataggaagagcatgtccagctcgccgttggcggggtcggtgatgtattcgttgcgctgtgcggtaacgccgggagcctcgcccacggtgaggaagccctcacggccttcgaacacttcacggcgcatttcggccaggaattcgtcttggcgagggccgtccgcgcagaacggattcgggttggaatagccttcctcacccacgggcagatcgtccagctcggaaccgtactcgccgggcagcttgccagacaggtccgtgcgcttggaaatcagcgtaatcacatccatgcggaagccgtcaacgccgcggtcaagccaccagttcatcatgtcgtataccgcgcggcgcacagccggattttcccagttgaggtccggctgcttcttcgagaactgatgcaggtagtattcgccacgctcagggcaatactcccatgcagaaccgccaaagtaggagccccactggttgggctcggcgccgggctcgccgggcgtggtgccgggacgagccggacgccaccaataccagtcggcgtgttcgtcgtctttgttcttggatgcttcaaaccaggcgtgttcatcggaagtgtgattgacaacaagatccatcacgatcttgagcccacgcttgtgggcctcggccagcagctcgtccatatcgtcgagcgtgccgaacagaggatcaatgtcctgatagtcggaaatgtcatagccgttgtcgtcttgcggagacttatagaccggggatagccacagcacatccacgccaagatcagctaagtaatcaagacgcgacgtgatgcccttaagatcgccgaatccatcgccgttcgtgtcttggaaagagcgcgggtaaatctgatagaccaccgcgttggaccaccacggattgggggtggcgccgttggtgcggatggcgtcggggattattgcgcggttgaaagtagtcatcattggctccttattgatatctatattgctcgttgctcacagtctaaaaattggcgaattacattcccattggagaactgcgttggtgtgccggaaaataaatatcaatcggcatatgcgctttcatgattgcacccggaaaacacgcagtcggccgtactcgatctcgcaagtatgggtttctcccggattcatatcaatcgtcgcaccatggtcatcgatgatgcggcaagagcgaccgctagccgtaataatgccgatttgtggctgccggcgcaatccgacgaaagcgatgacctgttctgcgccgaatcttgctgtgacaccgagcgcatagtccgtatgttcggggtcattgagcagtgacgcaatgactggtcgggccggctcatcaggacgcggtaatgtaccatcttcggcaagtaaatcacgcaagacagccgcatcagtgtgaccgcaggcatcggaacaatacactggtccgccgctaagcaatcggagcacggcatggactcgcgcatggggatgctccgtccagaacatgtcccaatcacagtggtacagctcccccatcagcagtgcacagtatgcgttctggataaggtgttcgcccagcgaatcaggattgtgcggtagatagtcgtcgctactacgggtgattggcgatgaaggacgatgccaataatcctccggtgccatgcccatgcagttaatcaatgcgccgccgaatcgtcgtgaggtcacttcatcaagcgcctgatggcgtccccaggtggcttcaccgtaactttcggtgccacgaaccattactgacgtggaactttgcgaatccactttgacgaaatcgacgccggcttcggcgagttcgccgtcccaggcatcccagaactgtgcgggttgttcagcacgacttccaggaatcaggcaaccattcgccgtggtggttattgcggtcgggcagctggccgcggctacacccgattcgtccaaaccattccaatagccttggaacgcctgccacacgcctacgctgcgcacgccatagtgcgttttgagcagcgcaatggtgtgggcaagcccgtgggggaaacgttggcgatccgcgccaaagtcgatcagggtttcctttgtgcgatccgtgttggaccaaccgtcatcgataagcacccaggaaatgggcacatgcttggcttggaactcctccatcttgttgacgatggcctgctcgttgacatctcgccccaatgaatcccaagtacaccatcccaacccggtgagcgcatccgggaatggacgctccttacgggtgcgaatacccagctggcgtgctgccgtttgtgtggcagctcgaatggccatatacgggtcggatgcgcaagcgatatatgcggcagtgtcacatagagtcgtgcgaccaacccggttggaagacagcacgagccgcaaagccgtgtcatcagattctgttgcggtctgcccactgaaatcagcccgaatatccgtgccgcagatagcgaccaacactagccactcggcatcttcggcatcgttgttgcggcgtaacaataactgcgtgcgttcaggcagttcagatggtgtacgcacccaggtcgggcgcatccaccactccttgtgctggtatagcgccagcatggtgtcatcgttgccgctgtcgacgccggccatggtgagcgacacgtcaatcgcacggtggggctcaaacgcttgttgttcctgaaaggcagcggcgcggtccttgggctggggtgcatgcgcgttcacatcgatacgccagagtcgcacctgagcatcaccctggatacccgcactggacgtgcactcgtcttcgcatgattcgggaacgattgtgacggcttctaccggcagttcacagattgccgaagcctgttcgccatagacggcacgaccggtatcaagatgggccgttaccgtgcgaacggttattggacaggtttcggcaatcattggcgtaactccttggtgttcttcaatgagattatgctggcaaggcccagacggtagcagctggaggaacgctctcgacctgagtgttcgcctgcacagtcgcgtcagacacaagtagcacggtcatcggctgcggcaaggcgactggttgactgtcagagaagttcgccatcacaaccatgccggacggcaagcgccaaccaagcagcggcgccggacactcttcgttggtaagccacgagaactggaagtccgtgccgttggccacccactgtttgcgcaatgcgacagcagcacaatacaggtgcaggacggaagccccgtcaccaatctgacgattagtggcatactgcgcaaaccatgccggctggggcagccacgaagcaccggtggcattgaagccgaacgccgggccgtctgactgccacggcagcggtacgcggcaaccgtcgcgccccttgaaataatgaccggaacgttcccaattgggatcctgaatttcatcttcggtcaaatcaaagtcctccggcaaaccaagctcttcaccctgatacacaaaggcggtacctggcaggccgagcatcaccagcgctgctgcacgggcacgacgagcggcgagcgcggggtcaatcggcggattcgtgccgttggacgtcacccactgctcgatgtttgcaccgctcggcagtccgagacgcgaggcgatacgtggcacatcgtggttgccgagcacccaggtgggggcggtttcggcagcgagagcatagcgatgcgtgcgctcaatcgtggtgcggtattcttcgcgattccaggcggcctttgacatggagaagtcgaatacggcaccaagttcatcaggcttggcgtattggaaaatacgggtggtgaatggcgaccacgattcgccgaccgcatacttggctggcgtgtactgattgaacaggtcgcgccattcacggtagatatcatgcacggcgtcgcggtcccagagcggatcggagccatcggtagcctgtggagacatcagtgtcgggtcgatacggtcgcgcagcggctcacgcaggtctttggccagaccgtgcgagacatcgatgcggaaaccgtccacaccgcgatcgcaccagaatgtgagtacacgcaggaactcatgccgcacctcgggattgtcccaattgaggtccggctgctccttggcgaacagatgcaggtagtaccagccgtctccacacgactcccatgcggaaccgccgaagttactcagccagttggtaggcggcaattcgccgtgctcccccttgccctgccggaacacataccgttgtgccgcttccgattccggaccttgagccagggcctcttggaaccaacggtgctgatcggacgtgtggttcggcacgatgtccacgatgatgccgataccgcgttcgtgcgctttggccactaattcgtcgaactgatcgagtgtgccaaggcggggatccacatcgcaatagtcggcaacatcataacctccatccgccagcggcgatggatagaatggagaaagccagagcgcgtccaccccgagcgcctgcagatagtcgagacgatcgatcacgccttggagatcaccgttgccgtctccattggcatcgctgaatgagcgggggtaaatctggtagatgacggcgtcgcgccaccagtcattgttggtgaaagtcatatcgttcccctgtccgattgctcggtacgtatggttttaccagtatggccgcacgaaacactgttccggcggccataccctacatcctcttgccttcggatcagcccttaaccgagccggcaagcatggcgcggatgaagtagcgctggaggaagatgaacaggatcatcgtcggtgccatgatgagcagtgcgcccgcgttgagcagcaccacgtcggtctgatactggccaacgaacgactgtagggcacctgccatcgtgcgcttgttcgggtcgttctccaacaccacagccaacaggaactggttccaggtggccaggaaggtcagaataccgagcgaggagatggctggcagtgccaacggcagctgaatggaacggaacgtgcgcagatggcctgcaccatcgatggatgcggcttcgatcagatcacgcggcatctgctcgaagcaggagcgcatccacacaataccgaacggaatattcaggccgatgagcggcaggatcagggcaagacgggtattcagcaagcccatgccactgatctcgtagtacagcggagtgaccaaggtttcgaacggaatggtcagaccgacgaggaacagcacgtagatcaggcccttgcacggcaccttgagctgagcgaaggcataaccgccgagcgagcagaagatcaccacgcagggcacgaccacgatcaccagaatgcagctgttgagcagcagcggggtgatgtttgccatgttccaggcgtcgatgaagttctcccagtgcgggtgggcagtgaactggataccttcgggcatggaaccttgcggctgcaatgccgcggagagcatgctcaggaacggcagtacgcagaagaggacggtcagagcgagcatcgccgtgccggtgatgcgaacggctttggattgctgcatggtcactgctcctttccgttgaccagacgctgcagaggtccgacgaccagcagcacgagaatcatcagggtgacggcgagtgcggaggccaagccaacgctctgctgggtgaaggccaagcggtagacctgcacgccgggcaccatggtggaggtgccggggccgccctgagtggacatgtacaccacgtcgaagctggcgagcgcggagatgatggtcatggtcaggcatacgccgatttggccgcgcagaccgggcaacgtgatggagaagagctgacgccaccagccggcaccgtcaagacttgctgcctcgtacagggactggtcgatgccgccgatgcccgagagcaagagcaccacacagaagccgagctgcagccagaaaccaatcacgcctaccgcgttcagggaggtggattggtcgccgagccacacgtgggcgaagtcgccgaggcctactgcgcgcagcagctgattggcggtgcccttgtcagccagcatccaggtccaggccacaccggctgcagcgcctgggataacgcgcggcaggaacaggcaaacctgcgcgaaggaacgaccgaccttggacttcatgtctttgatgagcacggcaatgatcaggccgagcacaatcgggatgatggagaagaagatgatcaggtagaaggagtgcagaatcgatccgtacagatcggggtcggtgaacacggtgatgtagttttcgacaccgatgaaggtgctcgcatcgataccgttccactcgtagaacgagtaccagatggtctgaatgatcggccacaactcgaaggcgatgtagaacacaagcgccggagcgaggaaaagcaggctgaccagaccgagggacatattgcgcttgggcttgaccgccttggctgccttatgggaatccatgattgtcaccacgctttgctggtttggtgtgaactgggaatcgaacatcgcacacaacgtcgtgcgcgcgatgggaaggaaccaggcggagcgggaaaaagggaagaacactccgcccggtaagtgcaagggttacttgacctccttctcgtactgagcctgaatggattcgacgaatgccttgggggtcatcgtgccgtcaatcagggactggaagccggggataatggcgctggcctgcatacctgcggtggcgttgttgatgtagtcggtggtgttaccggtcttcaccagaccttcgtaggcggtaaggacctggccgagaagctggttatcggtgctcggagtctcgccttcgccgaccggcgggtagccgttgtcaactgcgatctggcgggcttcgtcggactggaggaagtcgaggaaggcggctgcagcgttcttgttcttggcgttggccgggataccgaaagcggtcacggcgttggctgcggcagaaccggaatcggccttttcgccggggaaggcgatccagccggcgtcatcgccaagtgcatcgttgatggaggcggagtaccagctgccggaggggaagaacagggcttcgccgttgcagaagcggctcagtgcagtggaaccgtcaagggcgagcgcgtcggaggagaagtaaccggcatcctgccagtccttgatcttctgtgcagccttcacggcaccgtcggtgttgaaggtggcgccatccttctggataatccaatcctgcacggtatcgcgaccctcatagttggtgagcaatgcctggtagatgtaggaagtgccgccttccttggccggcatcatcatggcgagcttgccagcgtcggaggccttcttcatatcggcctcgagctcttcgacagtggccggagcctcggtgatgccgagttccttggcgactttcttgttccagtacaggccggtcatcgagacaccgtccggcactgcgtagaggctgccggaaccgatcttaccgtcggagcccacgcggtagacctgagtctgggaatccggcagcttccaaccgtaagcatcggcgtaagcgtcaagattgacgacatggttgccacgcacagcggagttgatgtcggtgatacgggcaatgtccggggtgtcggcggcggagatgatgcgcgggccattctgctgggaggtgttgtccggatcgtaggtggccttgatggtgatgttcgggtacttcttctggaaggcttcgatcagctggtcatcaaaggtcttcaggccagcgccgtcccacagcttgagctcatacttggtatcgccaagatcagtgctcaccgcttcggtttcggtgttggctttgttgctggacgagcccgggccgcaagcggcgacggatgccaggcatgccacagacatcagaccggcaataacggttttggcggttcgttcgatcctcattgatcattcctttcttccttccgggcgatcccggctatgtcttccttggctatctcggcttagcgtatttgctaagcgcttatgcatgaggataacagatgtcgaaccggttcgtcaaatccgcaacacgcaaacaaatggccgattcccgaagaaatgaggaaggcttgacgttccccataggcaagcacttccttctcgcgaaattgcgacatcggtcccttaaatacctaagcgcttattcattcacctaggatgacgtttcgaaggctcgggcagctcgggaaaaattgaatgtggctcaatttgataccagtacgccacgctagacacatcatcctgacgctcaaatgcaccttcatatcctgaaccaatttgttgaagcgtgactctaagctcactatcaaacctgatgggatcaggaatatgccatcggtacaagccacgcataggtggacaataatcgtcatgatattggtttgctatagccccatcgcgcacagaataaaatggatatcctacatatggggcacaaaaagtacgctcgcgcgtatgaccatctcgctgctcagcgaagctccatgcaccgccaaaataatcttcggtgccggtactacacactgtgggataatcgttatcgccatctaggaaaaacttaatctctccctcaccccaccaatatcgttgcaacgtagaaatagcaagatatgtgccgacgtaatggccccgtccgctgactccatcgaggattacatagtcctcgcctaaagtagtgattggctgtctgcgccattgcgcatggaaataagccatttcacgggaggaatacgcattacccaatgcataatcaatctgataaaacaaagccggaatagcatgagcgtggtcattgcgcactacgatacgtgcccgtttacgaaacggcatcgtgaaataacaattcatacctcgtgtaggtgccaccacaataggctctgagaacacatcgcaactttgtccaaagccgcaacagaagaagtctcctaggggacattccacagaaggtcgcttttcatcatcccaatagatggcaagcaccgcatcgcgcagaacgtatcgatcagcgtcactggtgcgatccgtaacggtaaaccacatgtgccgaatacaaccggggccttcaatatctgccaatgtcacagactgcccgggagcaatgtcattcaaacacggttttcccttgcgcgacggccccaacggaccagtttcacggcaaccaaaacccttggctcccgttgggttctccgcattaatcgaacatgttacttcgtcgcggacagtcggcaaatccgataaagttcccgcgtacgggcctgccatcatcataggttaactctcctcaattcaagcgtcgctagcgaaaccggcatatagttgaagctgtttctactgcttcgcttctttgtcatattgcgcctgcacattctttgtgaattcctgaggcgtgatgctgttatccagcagtaactggaagttagggattagcccacttgactgcattcccgcagtagcattattaatgaaatcgctagtatgaccgctcatcagcacgtcggcataggcatcaaacatactctgctgcaatgcgctattcgccttgagatccgaagtagatgattttggcaaatagccagaattgtcaacaataatctgttgtgcttcggcactttgcgtataatcgaggaacgccgcagcagcatcacggttcttagcattcaccggaataccataaaatgcacctgcattagcagcaacgttcggctcatcttcactggtggcacccgggaaagcaaagaactgaacatcatcacccaacgctttggccacagtatccagattccaattaccgctcgggaaaaatagtccttcaccattgcagaacctgctcagagcagtagaggcatccactgcgttaacaccttcaggcatatatcccttgttattccaatcctgcaaggtggacgcagcgtcctgcgccgcctgattgtcgaaggtaccagatttctgcaaaatccagttctgcacatcttctgcagaactgttattagccattaacgcctgaaagacaaaagaggtaccgccatccttggcatatgtcatcatcggcagtatgccggcatccttggctgtctgcatatccgcctcaaactcctcgacagaggtaggagctgcatcaatacctagctgctcggcaagcttggtattgaaataaatgccagtcaccgaataggagttcggcaatgcgtacaaatcaccgctgccgagcttgccatttgaacccactcgatacaattcagtctgcgaatcgggaacatcccagccgtacgcatccacatatgcctctaaagacaccaaatggttgccacgaaccgctgaattcatgtcggtgacgcgggcgatatccggcgcatcttttgctgaaatcacacgcgggccattttgtccagagacattatccggatcatattgtcccgtgatggtgatgtttgggtatttcgcttcgaacccggcaatcagcgcctcatctacagccttcagacccgctccatcccacaaagtcagctcatattttttattacctaaatcagtgctgacctcagtaggatttgtatcacttcgtgagctacttgccgagccgggaccacatgcggtcagacttccagcgataaatatcgcagcaagcgccgcgccgctgttacgcataatcctattcatcggttacctccttgcatcctcatcatatgcaatcgatatttctctttactgtcaccatttttcggcggcaataaaatatatttgcgatatcgattacgcacatcgtacatctttttgcggaacccgtcaaccttgcatcacaccaatggtggccttaacttcaaaatccagatacaatacaatcgattacgcaatgcaggagatcccatgagcgaaccaacaatctatgaagtagccaaggaggctggagtctctgcggcgaccgtatctcgtgcaatcaacggacgtgaccgcatatcggaaactactaggcaaaaggtatttgatgcatgtgcaaagttggggttttcagcatcgaaaacagcctccatgctgcgaacaggaaagacaaatcgtatagcacttaccgtaggtaactcactggctggctggttcagttcacaactagccgaaggcgtatattccgtgctcgcatcccaaggatatgacttgctatcataccgacttgcaaacgccgatcaaagacgcgatttcttttcctcaatgccagtgaagcgcaacgcagacgcggtcatcatcgcctccttcgacatcagcgagacagagaggcgaaccttagaacaactcggtatgccagtcatcggtgtcaacaccatcgggcttacggaacagcgagatatgatttccatcggcgtagacgaaattatagcaatgcgacaaaccgttcatcagctcgcaggactgggacatcgcaatatcgcctttatctgcaagcagcaagccagtaacggattcatatgggaagctgaccaacgtatagaagggttccgtcttggcatggcggctgagggactcaacttgcccgacggatacatcatcgcagtacaggacaacgaatttgccggagcagaggcactcagtagcctgctcgcactctcccctcgcccaaccgccgtatgctgcatcagcgacgagaatgccattcctctagtccatgcgcttcgctcatacggattccgcgtacctgaggacatatccgtcatcggattcgatgactggccaatggcacaagcgctcaatatatcaaccgttcggcacgaccctcggtcctacggagcattagcggcagatgccgcaatccgattatcacgaggcgaaattctgacagaaagttgcatcgttgttcccacgacgctcatgttgcgcggcaccacaggcccagcacctcgagattaaacatcgacaacgtccgcatttgatgatgtgcatatcattattgcaacagcgaaacaacaggtaccagccagaggaaggacgaccgggtaacagccacaaggcggccacccattcaccatgaaacgcgcgaccatcaacgacgtagctctcacggccggagtctcaacttttaccgcatcccgcgctttgcgaggtaaggatcacgtggcagcagctacgcgggataaggtgctgaaagcggccaaagagctgaattacaccgcgtctcgctcggcggcggcgctggcaagcggacgcaccaatcgcattgccatgctggctcgcgaacggctggccggctggttcatgggcgaattattcgacgggctgtatgacgaactgagccgcgcacgctatgacttgaccgtataccgagccggcagcgtcgaggagcgtgcggaattctttactcggctgccagccaatcgtaacgccgacgccctcatcgtatccggattttccgccaccgatgaggaagccgacacgttggccagcatgggtatgcccatcgtctcggtgaattcgccgtatatcagctgctgccaagcctccgtggccattgatgacgaggcggccgaagccatggcagtgcgttatcttgcggccctcgggcatcgtcgtttctgctatgtggggcgcaccgatccgctgaccggcaaggaatggggattcgatgcacgcgcacgcggatacaaagatgagatagtctcgcttggcctcaccgactgcggcatccacttcatcgactcggaatcaccacgctcggccaaacaagtcatcgccaccatgctcgcgcagcctgagcggccgaccgctatctgcgtgtggtctgactactacgcattgcgcgtggtacatgagttgcaggcaatcggagtacgaatccccgaagacgtttcggtctttggctttgatgggtccgacgtggcggaatccattggattaagcaccatggtgccaactcccccgcgcgaaatcggacagattgccgcgcgcaaggcactgaatttggttgaggggaagaccttggacgaccctcatacgactgtacctgtggcggtcgagcccggcgcgaccagtgggccagtgcgggaataggcgatatgggaaaagcccccctcggcggaaaaccgaaggaggcttgggtggagctgcactacttcacagcgcctcgcatgactccaccgacgacccacttttgggcgaagatgtagacgatgaggatcggggccatggccatcaggtagctggagaaggccatcgggtagttggtggcgaactgcgagctgaagacgtactgggcgagcgggatggtctggttcgactggtcggtcaggatgatcaacggcaggaggaagtcgttccaggcccacagtgcggtcaggatggcgatggtggcgttaatcgggctcatcagcgggaagatgatggtccagaaaatgcgccacgtggatgcgccatcgattcgggccgcctcttccagcgaaaccggaatcgaacggatgaagccagtggcgatgaacaggttcgtgcccaggccgagcaccgtgtacaggatgatcaggccgacctggttgtccaggtgcagggagcccatctgcttcgcaatcggcagcatgacgaccgggaacggcacgaacatggcggcgatgaagaagtagtacaggaagcggaagaagcgcttatccatgttgcgggccacagcgtaggccacgaaggtgttggtcagcaaggtgagcaccacggcggccaccgtgatgatcgcggagttgagcgcggccttcgggtagttgaccttggcggaggcgtcggcgaagttgtgccactgccacgaggtgggcagggcgaaggtgccggcttcggccggagtcttcagcgcggtgacgatggtgaagtagagcgggatcagaatggtcaggctcagcacggccacggcggcggtcagccaccagttgatcttgtggtccctgcggaacttggcgggcttgccggacttggacggggtaactgttgcagtagtcatttcttatcctcccctaaatcagatctgttcctggctgcgggagatgcgcagctgtacgaaggcgatgatcgccagcacgatgaagaagagcacggcgtttgcggtctggtaggcgtactcgccaccggtcaggccacccttccagatgaggtaggtgacggtttcggtggaggagttcggaccgccctcggtcaaggcgacgacctgatcgaaggtgccgagcgcgttcttcatggacagcacgaggttgatggtgaagaacggtccgatcagcgggaatgtgatcttccagaacttctgccaagcgttgacgccgtcgatggcggcggcctcgtagatttcgtcgtcgatggtctgcaggccggcgaggtagatgagtaccgagtaggcgatgccctgccagacggcgaggaagacgattgggatccagctgagttgctcattggtcaacagcgaggtggacagccacttgatgcccagcgccttgccgagctcgggcagcgggttcatgaagatgtacttgaacacgtagccgatgaccagcacggagagggtgtaggggatgaagaagacggctcggaagccattcttgaaggcgatcttcgagttcagcagcaccgacaggaacagggcgatcacattaatcagcaccgtgatgagaatggcgatgaggaacgtgaacaggtaggcgtggcccacgcggttgtcttggaagagggcgatgtagttcttcaggccgatgaacttgtaatcgccgtagccctgcgagttggtgaaggaatactttacgccgtcaagaaatggcaggtacaggaagaaggcgaaaatgatagccgccggaaccaccatccagtagtaggcggggtccaccttgcgggtggagaaggcggagaccttcttcttggccggtttcttggcagcggtcttggttgcggttgcgtgtgacatgatgttctcctctcctaccgatcactcgaaggtcctggcttggaccttgtcccattcggtctgcatctggttcaggaagcggtcggtgttgccggaggtcaccatggtctgcaggtagccgccgatgttgatggacgaaggaatgtagtggtcgcagaagtcggccagtcggttttcctcgaagaacgggcgcacggtttccagcgcatcgttgccgaagtaggtgtccttcagcggcgtgatggcggactgggcgtcggcgtaggcgtcaagctgatccttctgcatgaggaactcgacgagcttcatcgcttccttggggtgcttggtgttcgcaccgatggtgagcatcacgtcgtcgccggcggtgaggatctgctcgctggcgtcatcggtggccggcatctgggcgaaaccaagttcgatatcggggttgatcagcaggatctgcgggatggcgtaggtgccgagcgggatgatcgcggccttgccttgggcgaagttctgcgtgccctgctggtaggtgacgccggtgtccgcagtggagtaggtgaagagctcggattccttctcgactgcggtcttccacagttcctggaacgtggtcttgccttgcttgagctcggtgtacttcgattcgggaaccagcgtgccggccagggaggcgagcggtgcctgggtggtccaggcatcggccacggaaccctgcagcgggttgatgccggcgtccttgaaggtgttgagcatatcggtgaactcgctccaggtggtcggcggattctccgggtcaaggccaaccttgcggaacagagccttgttgtagatgtagccggaggcgttacccgcgaagggcaggccatacaggcgcttcttggaggaatcggtggtctgcaccagattcttggcgatctgcaccatgccggggttgagggtgtccacaatgggttcatcggtgaagtcgtagaacacaccggaggcggcgaagttgccgaagctgatgtcgccgttgaaggtgatcacgtccggcacacgattcttgacgaaacgggtgcgcagatcggtctgggcgttggcggagttgttgatgttgaccttgatggtcgggttctgcttctcaaagtcggcgaccatggacttgaactggtcggcggcctcggacttgaactggaagaaatccagcgtgacggtgcctgcggtgctggagccgcagcctgccaggccgaacccgacggcgatcgcgcacatcacggcggcggtgcgcacggccagacgcttcagtctaggcgttgcatgtggggaatcggacagcataattgttgactcctttatctttcttttcctccggcttcggtgccggcggttcttccactttccaaggtaacggttcggccatttcattcccagcgccagcgagcccacttgcgcaagcaacaaaaagcgcggtattttgtgattaacgcaataaatacagcgaaggggcttgcatgtctgataccaacgcgattccacagtggttttccggatccgagcatacgcatcgcgtggcggcggcaattgcccaatacgggccgatagcccgcactacgttggcacagatgctgggactgagccaaggggccttgtcccgcatcaccagcgatctgatctacgccggggtgatcgaggagcttccggccgaggccggcccgtcaggcaagctgcccgagcgattcacgccaagggaaagttcggatcgtcgcggacgcccgcagacttcgctggtgttgtgttcgaacgcacgcaccttcattggtgtcaaggttcatgggatgtcgattgtggccgctgcggtgaacgcgcatggcgaggtggtgtccggccggcacgaggtgccgatcggggcggatcagtcggctgagtatgtggtgtcggccatcacgcggctggtgcgcgaatgttccgccgatatcgcctcttccggactgccctcccccactgcggtgggcgttgcggtaggtgggcatgtggtcgacgattcgattgtgacgttcgcgccgttcctgcattgggacggggccacggacttggggacgatggtcacagaggcgaccggcctgccgtgcggggtgttcaatgatatcgattctctgctggtggatgcctcctggttcgggccgggtgtcggcgtggatatgttcgccgtggtgaccatcggcgtgggtgttggttattcgctggccgtgaacggcaagccagtgcagtacccggataagagctatggtctggtgggccacgtgcttatcgatccggaggggccgcgctgcaccagcggacatatcggctgttcacaatgcttgactgacgattcgatcgccgaacagtactctgcgattgtgggtcgcgcggtcagttttgaggactttgcgcgcgatgccaagggacgcgtgccgcaggccacgcagttggtgaaccggacgtgtttccggttgggttcgctggtggctacggtggcgaacatcgcgatgcccggacatgtgatgattgccggggagtccgcgtttttggccaagctcggcaccgattcgctgcgcgatggcattcgtttctaccgtcacagccagacccagccggtcaagttcacgattatggaccacgactggcagctctgggccaaagccgccgccagtcgcgtaatcgtgaagcatattgggtaggccgttcttggctcccctcagagagggaagccaagaacgttgcttcgccacgaccagcaattacggacttgcctatcggcaaggctcaatcccaccttcgctcagctgtcgcttcgctcaggccgtggctattgacagcctactaggctgtcagcttaacgccacagccttgagcaatactgcctgctgggggtggagggacgggggacggatgccgtaacgctgcagggcttcgccggtcaggactacgccttcctcgttccaccagccgagagtgctctggccgttggccagaccggtcaaatccaagctcgggtcgagcgggctgacgcggtaggtgcgctcggggtcaagtccgggcaggtgcacgggcgcggccggataggtctggctggtggtcagctgggtgaagcggtagatggcggcgtcgcggttcggcatcaccatgccatccaagcgcacggccggatcgttggagtcggcgtgcacgcaggtgtcgatggcgaaccagtcgcggtgcttcttgaattcggccacccacacggccagcttggcgagcgcctcgtccggctccttcaacaggttccattcgatgcccatgtggccgaagaacgccatggccatgcgcagttcctggctggtggcacgctgggtggagtgcgcgggactggcacccacgtgctcgcccatcatcgccggcggcaccagcagcgaggtgtagcgctggatgtccgcgcgctcgaccgggtccacgcagtcggagacccagatacggtcagcgtgctctaggatgccgaggtccacgcggccaccgccggaggagcagctttcgatctcaaggcccggatgtgcggtcttgaggcccttgaagatgttgtagacggcgagggtctgcgcgtgcacggccgggcggccggagcggcgggaaccgggctcggtgacgagcttgttgtggtcccacttgatgtagtcgataccaagctcgccgacaagctggtccatgcagccgtagatgtagtcgaacgcatccggattggtcagatcgagcacctgctgagtgcggccctgcagcggcagtcggccggtggtgggcgaaagaatccaatcggggtggttgcgggccacgtcggaatcggggttgaccatttccggctcgaaccacaggccgaattccatacccttggcgtgcacgtagtcggcgagcgccttcagggacttcggaccatcgggccagacgtcctgcgcaatctgccagtcaccgaggccggaggtgtcgtcgcggcgggagccgaaccagccgtcgtccaccacgaatcgttccacgccggagtcggcggccttgtcggcgagcgccttcagcgtatcgaagttgtggtcgaagtacacggcttcccaggtgttgaggatcaccggacggccgtgcgagaacaggcgcggatgcagggagcgcacgtaggagtggaagcgggcggcgatctcgttgaggccatcgccataggagccgaacagccacggggtgtcgtaggagttctggccttcgccggggccggcgagcgtcacttcgccgccgaacaggagttcgccgccgccgatcacgccggtcgtgtagggcagacgttcggcggacagcacggagttgccgctccagcccacgtgcaccgaataggcgtcgccatgctcgaagccgaaaccgggcacgccggcggtcaggagcagggatgcgtcgaagtcagggcggccggcgagctgcggcttttcgaaacggccgacggtcagcggctggcgctgcggactgcgttcacgtagatggtgaccggtggtggtgaggatttcgcaggcggattcgggcagcgggaagccgagctcgatcttgccgatctcgagcggggctccggcgtctgcaccgaacaggttggttacggtggccttctgacggaccaggccgccggggagcagttcgaggtgccactcgacttccacgccctgctcctcatcgcgcgcggtgactatgacgccgggcacgcggaccggaccggtggcacgggcatggccggccacatcggtgtagctttcgccggacacggcatcgagggtggcttccagcacgccgccggtctcgatgttggtcacggtgaacttggggaagagctcgacgccggcgcggcgcagcaccacgcgctgctcgccgatccagctttcggcctgggtgggcaggatagacggccaggcggtgtcgtcgagcgcgccggacacgcgctgcggcttcagggcgtcataggcggccagcagggtgtcgggcttggccagcgggcggccccagtggacgatgtgcggcaggtcgctgccggcaaacaccagaccgatcgccacattggcggcgggctgggtcaggtagacggcggtgagtgcggtgccgtcagcggcggcgccggtgaaagtggaggtgttctcggccatattgtctccttcgacgtgtgtggatttgcattgcactactggcttcgatggtagaagaaatggaatatgttgccttggtgccgcgtgttggttgcgtgaggtaagtaatgcgtccgtgtctatcgccgctgggcgaagaaatcagtcaggatggactgacactcgccttccagcacgccgccgtgcacttcaggactatggccgatatgcggatcgcgcggaatatcccaaatcgaaccgcatgcaccgagcttgggatcccaggcaccgaacgcgatggtgccgatatgggtctggatgcaggcacccgcgcacatcgggcacggctcaagtgtgacggccagcgtgcaatcggcgagattccaagcgcccaaggcttgggccgcctgacgcatggcgatgatttcggcgtgggcaagcgggtcgccatcagcctcacgcgtgttgtatccgcgcccgacaatctggccggccgcatccagcaccaccgcaccaaccggtacgtcaccagcggctgcggcctgaccggccagttccagtgcgcagcgcatcgcctcgtcatattccataccaacgagtgtatgcctttttctcatatcgtctcatgatgtgcataatcggccgcaatcttaacgttttcttcatggttcccatatacttttggtggagaaaaaatacgagaaggcggcaacatggcggtatttgagctcatcctatgcatcattgcggcggtggtggtgagctcgtttgtcagtcgcttcgtgcccaaagtctccacgccgctggtccagattgtgctgggcgtgctggttacgtatctgccgtttttcccggatgcaacgctcgacccggaactgttcatggtgctgtttatcgcgccattgctgtatttggaagcccacgaaatcgataagtcggcgttgctgaaaacgctggatctgagcctatcgctggctatcggactggctatcgtcacgatggcggcggtcggattcactttgcatgccgtctggccgtccatcaccttagcctcagccttagcactcggcgcggcactcggcccgaccgatgcggtggccgtcagctccctcggtaaagaagcctcgctgacgcagcgtcagcgcagcgtgctgaaaggcgaatcactcttcaatgacgcttccggcatcgtcggcttccagttcgctctggccgccgccttcactggcgaattcgccgtggggcaggccgccggcgaattcgtgatctccttctttggcggcaccttatttggcctggtgatagcagcagcggccaactggctattcgagaccgtgcgatccctcggctgggaaaccactaccacacgtattctgatggaactgttcctgcccttcctgctgtatttgggcgcggaggaattcaatgtgtccggcattctgtcggtggtggccgctggcctgttcatccgattcgaccgtaccggcgtggggccgaatgtggcacgcacgaatatcgtttccacttcagtatggggtgtgctgagtttctcgctcaacggtgcggtgttcattcttctgggcatgcagctgccgcgcgccatgatggccagctggtctgacccgtatatcagcaataccgtgctgatcggcattattctgctggtcactctggtggtaatcgcgcttcgattcttctggattgcggccatgctgcgcgttgcgcgagatacaatcaccggccagcgccgcaaaatgacacccgaacgctggcgctcggccgcagtgatgacctttggcggccccaagggaaccatcacgctgtcattgatgtttaccatcccgtattacattgccggcggtgcgccgttcccgatgcgtgacgagctgattttcattgcgtcaggcgtgattatcgtgaccttgctgctggccaacttcctgttaccgctattggccccgaaccgtggcaaggatcccagcgcggaaatgattccggtgaccatcgatgtgttacgcgccacggtggaggaattgaccggacgcatcacgccagagaatcgtcgtgcgattctgatggcaatcgaccagtacaccaagcgcatcgggcgattgcagcagcgcatcggcgataccgatccccagggattcgagcaattgcagatcgaagcgctgcattgggaaaaggaattcgtgcgcgaccggcttgccgacaccaaagcacatccggcggcggatacggccacgcaagagctgaacgtcgaaacctgcgagcgcatgcttgaccagattatgaatacgttgcgtcacacttccactgatccgacttcggggcacgcggtatcgcagattcgcggtcgtgtacgcatgttccagcggcagatgagcaattacgccaaacgcacggtgtccaagattcgccacaccacaccattggtgagcgaggaccagattttcgcgcgcacccgcgaactgcaggtcgaggcgattcatcatgttatcggccggcttattgacgagatgggccaggatacgtacaacaccgagcattgttcggcactgttgctggattatcgtcgtgccgaggcttcattgcaggcacgtccgaccatgagcggcactacggaaaccatcacgcaggtcgaggacgtaaagcgcgagagctacggtatcgaactcggtatgattcaggacatgtacgaagccggcgacatcaaccgagcccaagcccgctccctgaggcgcaacatctacgttatgcaagtggacgctgattccggcatctagtttccctggctcccttctctgaggggagccaagttggggattgctatttccgtatgattctcttcagtatgtgcagtagtgcttgcagtgctcacttcgctcatgggagaacagtctatgaccgagtcagccacaagcgccctcgatgtccgattgctgcgacggccgcgccaattccagtgatggcggctgactacagcacgccagaggtaatgtcgttgtcaagtagccactggcgcaaatcggcgaactcctcaagactcacattgtgatccagaccgtggtagctcttggttttcagccacgtatgctcttccagccaagcggcggtggcgaacagttcgtattttgggattacgccatcgttcttgccgtacgtatagaacacggggatatcataatcggccaggcgagagtcggcgggggccgtgccgggcacctgaccgggtgcgttgaagccggacagggagacgacggcccggtaccgctcgggattgatacgcaacaaatgcacggcgaccagcccaccttgcgaaaacccaagcggcaccacgtcacggtcggcgggaatgttgtcggccacccatcggtcgactgctgtggcggcggcatacgcgtcgtagtcacgatcatcgccgataggcagggcatcgtggaaccacgcgtagttgccggggtcgagactgccctcacgggccggcgcgagtgtcagcggcccgcgcaatgccacgaaatcgttatatggagcgatgaggcgcatgatgtccgccatgtcttcttcgctggatccccatccgtgcaggcacaggaacagcggatgcgcggcatgctggtcgaagccgccgcgcgaggtgacgctgtgctccacggtgagtggctcgccaaaacgtccgggcacagtggtggattcgcggccgatcagaggctggctggcattcgcttctttgctcataccattccaatatagaggtcttgcgcgctgtgcggaaaacgatggaccatgatttcaatcacattgggtaatccgcgccgaatcgccttgggacttttcaagggataccggcaatctgtcaggcgttaccgctgtctgcggtatctgcggctgcggtgattgtctcaagttcgccgccccactgctgctgcagtgcggtcatcttgctggcctcgccgaacaccatccagcgtttgccgttcagcaatcgccaatcacctttcgtttgctcattatcagcgtattggctcagcagttcggaaatcttgctttcgataggtgcccggctgatggctgcggacgattccgattcaaaggatacgaaggccactctcggatcagtgcacatctgtacggtggtgatgcccggcaaaccgcccgtatcaagcccctgccatccttctttgcacgcgccggcagcttgttcgatgccttgctccatctgtgcggtatcttcgacgggtgccttgtcgttcgactgctgaatcagtccttccgggaacaatacgcccacggccacgccgataaccaagcaaactatggcgcacaccagtgcgatgatgccgcccgcgcccactcccccgtgagtggcgtaccgaggcatggtgactcgcgcagcgatgaccagaatcagggtgatgccgataagcaccgccgccatcaacgcaatgtatcgtcctggcactgccgtcataaaggaaatggcgtaaggcgcgatctcatgaaccgccgaggtggccgataccacgacggctagcagtccgctgacaacggcaagtctgcggcacaatatcgacgttgggctgctggcttttgtagcggcgaatcgccggccggcatcccgcctggatgggcgtcgattctgtgcacgacgtgagctgcgcgaatcgtcatactgaccatcgccgaagaaatcgtagtcctcatcgttgcgggccatcggtgcccccttcctgccgattacacagctagtgtaccgctatggcttgggaatggcggtcattcgggggaatgattcagggcacaaaaagaaccccggcggttgcccgccggggagagaaaggagagagaagaagaaagggggttcaattgtcgggaactgctgcggctcctgatcagctttccgctgacatcttttatataaccactgctttctgggtctacctctaagtttctctgagaaaaacctgagaatacttgcgattgatggaccgcggaagcgtgaggagcctctcacgtttccgcccaaggcgctagacttgaaggcagtatttatttgcccaaggagtttttcacatgctgctgtccgaccgcgacattctcgccgcacagtccgcaggtcatatctcacttgatccgtggacccccgaaatggtgcagcccgcttccatcgacgtgcgattggatcggtacttccgtttgttcaataaccacgcctacacctatgtcgatccggcggaaaaccaaggcgcgctcaccgaacagttcgaggtggctcccgacgaaccgtggattttgcaccccggcgagttcgcactgggttccacgtgggaatacgtcaagttggacccgtccattgccgcccgtctggaaggcaagagctcactgggccgattggggattctcacccattcgactgcgggcttcattgaccccggtttcgaggggcatattacgcttgagctgtctaatgtgtcgacgttgccagtcaaactatggcctggcatgaaaatcggccagatgtgcttcttccagctgagctcgcccgctgagcacccttatggctccaagggcaccggctcgcattatcagggccagcggggtccgacgccgagccgttcctacgagaatttctaccgcgcgcacatcgacgactgagcgttgcgacgtaccattcggccggcggatgccggccatttgcttaatcccaaggagatgtcatgaccaacagcgatggcgggttccagttcgacttccagcagcccgaaaagccggtcaggccaacggttcctccgattcccgggcaagagacagcagcatatggtgcgcagccagcggcacaggacataccggcgctgcagttcccgcagtctgtgtgggctgtgcagtctgcgcagcccacacagtttgtgcagcccgcgcaagcagcgtatgccgcacaacccacgcaagctgtgccgcccgtacaagccgctcagccgacgcagcccatcgatccggccatgacgcaaccgttctcgccgcaattcccggctgcggttgccgcacaagcaccacagccggcggcagccacgcagccagtagtatccgaaacaccaatcgccgctgcgcccggccagcagcaatacgtttgggatcagacgacgcaaagcttccgcccggtggaaccgacagcgccagtgacgccagcagcaccagccgtaccagcggcaccggcggcatcgcctgtttcggtagcttcaaacgccgcgacacaggcgttccaacccaatcaggccgagcagcctgcggtagatgccgaggcaacacaagcgttccagcctgatcaggtcatggcaacacagcctttcgaagctcaggccatgccgaatgccgaaaccgcggccacacaggcattccagcctgattcagctgcggccacacaggcatacggcgcatcatccaccgtatccggtgagaccgttaccatgccggcaacgcaagtagcgtctgccgatgatgctgcagccacacaggtgttccaaccggccgccctggccgcttcggcacaggctcagcctgctgtgatgcctccctccattccgttggatcaggtctccgatgaggacgattccgatggcgccgagcctcgtcacggcggtagcggcaaaaagaacacccgcaagatcatcagcattgccgtagcagtagtcgccgtgatagcgctggttgtcgccggcctgctctggtggcattccaacagcagcaaggcgagccaagccgtggcattggccgagtgcaaggtagcggccaagcagtacacgaatgctcagaagaagctcaccaccgccatatccaatggccaaaccagcgcgcaaacatccaccagcgatgtggccgatgccaatacgctcaccacgctgaatcaggcgttgcaagacgccggcaatccggctgacaccgccaagtgcgattccagcctcaacgccactgagttgaagtctcacactaaagagctgcagaatgatgccagcgacatggctgacaagacggatgccatcaacaatgcgatcaaggccgttaatacttcaaaggcgacggccgataccaacacactgaaatcgaacctgagctcggctatttcgcaggcgcagggcacgctggataattccgcgggcagtgtggccgatgaaaacacccgcaccgcgctgcaaaacgccatcaccgaggccaatacggtgatgaacgggaccagtccgtccgaatccgacgtcaacaatgcgatttctaaactgcagaaggccgagtccgacgtcaccgcctcgatgcaggccaagcagcaggcagatgccgccaagcaagctcaggaagaggctcagcagaaggctgaccaagaggcacagcagaagtctcaagacgagtccaacaatagcgacaacaataacggcggcgacaactccacctctactgacggcaccgacggcagccacaactgaggtctgcagcgttctcctgtttcccatggggcggtaacttccccatggggcggttagcacattttcctttttcgcgg

SEQ ID NO: 192 - DNA, 24826 bp, Unknown
  R101_18m  MAG No. k141_14237
catgaacggtctcatccggatgatgcgtgacatgcacgattgtggtgccgcgcgcctgcaaatcatccaaaatgcgcataacttcggcgcgtgcggattcgtccagcatggcggtcggttcgtccaataccagcatcgccgggttcatggccagcatgccggcgatggcggcgcgctgctgctgtccgccgctcatacgggtcgggtcggactgacgcaagttcgccaaccccacggcctgcaatgaatcaacgatgcgctcgccgatgagcccgcgctccagcccgagattctccgggccaaaagccacgtcatcctccaacacggtggtgaccagctgatcctcgggattctgaaacaccataccgatgccgcggcgggcagcgcgataggcgtcggcattcgggccggctgcgtacacgcgctgttccagtagcgtcacttcgccatcgtccggcgcggtcaatcccgcaatcagacgggccaacgtggacttgcccgacccgttcggaccgaccaagcataggcgctcgccggcatggaccgtgagcgaaacgccatccaaagcccatgaagtgccgcggtcatagctgaaacgaatgtccttgagtacggcggcggggggagcgggctcggcggaatcgtggaactcgtcggcgtcgaaggaatggggtgcaacggtcatgaaacagcaatccgtaactgataggcgaaaacgcagaatcccggcaagggccggagttctgcgttcttgttctttgagtggtcgttgagtggtcgttgagtggtcgttagtcgtggcgggcagcggcccatctcaggccggtcactgctgcttggacagcaggttggagaccggcttgtagatcaggaaggtgatcacggcgtgaatcgccatcttagccacgttgaacggcagcagaatcggcagaatcatcgcggccacagcctggtagggcatgtgcgcgtaaatcggcgtgatgatgaggttgcccaccagcgccactacgatggccagcaccgcacccaccagaatgccgatggcggcacccttgcgcgtacggatcttacggtagatgaacgcggccggcacagacaggaacagcgccaccagcacagccatcagcgaaccccacgggtcggcgaacatgtgcggcacaaagccgagcacagacacgattgcggcggcggccggaccgtacgcaaagccggcgatcaggcagacgatgccggacgggtcgtacttcagccaagtgaccggcgtaatcgggaattcaatgaagctggtgaccatcgccagcgccacgaacagtgcatacatggcgatacggcgcgtggaccagcggccggaatcggccacaccagtggtgtgcgagccgagtttggcgctggtgctggcggtggacgcgctggccgaaccctcggcctcgggcgccacagaacgaacaacttgcatgcggatacgcgaagatacgctcataatgagccctcgtttcttccatccggactataccgttggctccggaatctcaccggatcagccgcttgcgcgggtcgcgggcttcccgccatccccgttatgaaacccggggtacaggttaccgccagtaaggaattgcaccttccctgaaactgacaggcttattcatacgccatgcgccggacgtacgcaacccgcgtttcactgtgcagaaattcgtcttgtgccggtcaagtgcaacaatgggagccatggctgaagtgaagaaacccaacaacaccatcgacaagcttgccctgatcgtcaccacctacaaacgtcagcagctgctcgaggtactgttcgattcgattctggcgcttgagcaggcaccgtggcgcattgtcatcgtggacaatgagcagtccgatcagacggcggacatggtcgctgcgtttgccggcaaggtgaccggccaatggggcaccaccgtggccgaccagtccggcaacgaagagcgcgtggtctatgcgccgcagaccgagaacctgggtggcgcgggcggtttctccgccggcgtggccaaggcgtatgatctgggcgccgcatggttctgggtgatggatgacgatgtggccgtgctgccggacgccattgccaagctgtccaagtggaccgacaagcacgaggtgattcagggatcccgattcgattacgatggcggcccgttctactggcagtacgacttcattgtgccgctgggcatcccgaacccgatcgcgcccgccgcattcggcccggccggataccgagtgatggacacgctgtgcttcgaaggcggcctgttcaaccgccgtgtggtcacggaaatcggtctgccggacccgcgcttcttcatctactgggatgacacgatgtatggctaccgcgccagcaaggtcaccaacccgattgtggtgcccgacgtgattttgcgccgtacgcgcgaaatcggcaactgggatatcgccggcgtgcgccagctcaactccacgtccgacatgaaccggtaccacatcatgcgcaaccgcggctatatggcccggtacttcatgacctacggcgacttccgtccgctggtgtttggactgggcaccgtgctcaccgcggccaaggaagtcattcgcctagtgatggtggatcgcgaacacctcaagaccggtttggtgcagattgccaagggctggtgggactcgcgcaagctgatgcacgaccccacctggaagcccatgccgtcgctgaagtagccgtagtagtggctccctcatcagagggagcttatttacggtcacttatgaatgaacaggccaccgtcgccccaggcccactggccttggccggcaccgatctggaagtgcagcttggcgatgcccatgtcattgaacgcgtggtgcgcgtctcccgcactctggtcgatatgcgcggcggcggtatcgtcggccggattatacgagaaggtgatcggctgacggttcatcgcgcgcgacacagagtcaggccgccacagacgccgaattttcctagtatcgaaatcgcgcgcattgcccattggggggcttgaaaaacgatacggatagggtacgtagtgaccggcggcgatgcacacgtttgcacaattggtgtgtaatggtttcgtgttgagcacaattcgcgttagactgggcgcaaccctacgaactgatgaaaacgtatggaaaggaaggtcaacgatgattgaaactgcacaggctttcggtgttgacattggcggttccggcatcaaggccgcacctgtcgatctgaccaagggcgatttcgccgagccgcgattgaagattctcactcccgaggtctccacgcctcaggccgtggccaaaatcgtcaagcagcagctcgaccacttcgaagtgcctgaatccgcacccgttggcatcgccttccccgcgccgattaagcccggccagaagctcgacttcatggccaacctcgaccagtcttggattggcgtggacgttactgaagtgttctccgaagcctgcggccgcccggtcgtcgtggtgaacgacgccgacgccgccggcctggccgaagtccagttcggtgccgccaagggccaggatggtctggtcatcgccaccacactgggcaccggcatcggcaccgccttgatctacaacggcgtgctcatcccgaacaccgaactcggacacatcatcctgagcgccaagcatctggacgccgagaagtatgcctcctccgcgattcgcgagaacgaggaactgggctacaagaagtgggccaagcgtctgaccaagtactacggccttatggaaaagtacttcaacccggacctgttcaccgtcggcggcggcgtgagccgtcagagcgaaaagttcctgccgtacgtggatatcaagaccccgattgtgcccgccaagctgcgtaaccaggctggcatcgtcggtgccgcctactacgccagtaccaagcagcagtgagctgagttatttctgctggcgcaggagccgtattgaccatatgtaaggccgtccaagtatttcgggcggccttttttaatgagtaattcgttcattaggtcgattatgtgttcattaggtcactcccattccaaacctgaattgcaatgggctcggaatggcggcgtttcaagcatcaacaattgtgaggctcgactagcagtgacctaatgagcgcgaaaatgacctaatgaatgtagctaggccgttattcgatgtggattgaagtcatagtatgtctgacgactccgctgccgtgccgcacgattgtcgtagtgctggatgctggtggatatgaggcctcgatatacctggctcggcaggggtggttttatcgtggagggtatgagcgtgcatttctcttctcgtgtggatatttctgcgccgaatcccattgcggcggccgaggcggcagccaaggcaaacggcatcgcactcagcaaactcaacgattccaatccgacccgccacgggttggcacccgaattggtgccgagcgtgtatacggccgacccgcgtggaccgcgtgcggcacgagaatcattggccgcattcctcaatacggcaaacgtggtagacgcaagcagccctcagttggcttcgcccgccgccggcgaggacaggaacgagcgccatgccgctttcaccaatgtgaataccgccatcgagggcgccgacccggacgccctgtacctgctgagctccacgtccgaggcgtattcgtggctgattaagttactttgcgatgccggcgacgcggtgctggcacccaaacccggctatccgctgattgagtcgattgcacggcttgaatgcgtcgatacggtcgaataccagttgcaattcgacggctcctggttcatcgacatcgccgaactcgagcggctactcagcgagcccggtggcgaacgcgtcagagcattggtactcatcaacccgaacaatccgaccggttcgtacgtaaaaccaaccgagcgtgcacgtatcgtgacattgtgccgtgagcacggcatcgcccttatcgccgatgaagtgttcttcgattactctctcgaacctttccccggcgacgcacggctcgcgggggagcgcggcgtgctcaccttcgccctagacggattctccaaaatgctggccgcgccgcacgccaaagtcgggtggattcaggtgtccggacctgccgaggacgttgccgaggcccagcgtcgactggacgtcatcgccgacgattatctgccgatgggcgacatcatcgccgaacggattcccgcattattgaacgccgcgcccgcacagaccagacgggtgggggagcgcgtgcgcaataacctggccaagttgcacgagttgcttgacgccgatcccaacgggctggtcagcgtgctacgggccgaaggcggctggaacgtgctgttacgagtgccttccgtcatcgatgagaacgaactggtgttgcggctgattgacgagcaccaactcaccggacagcccggctacttcttcgacatgacctccaatggatacctggccgtttccctgctgcccgaaccggacgaattcgagcgtggcatccgcgccgtgctcaataccgtcgccgctttgctgcgataggccggtgtttgccggcaccacacctgtactccacgtacaatggcggcatgggattcttgtttagaccgaaagaactgccacacccggcatcgctgacgttcactttggaacaggccgggcatacgtatgatgatgggcacgtgggacttgctcccacggacatcaccatcagcgagcggcgggtggccgtgatcggactgaacggcgcaggcaaatccacattgctgggtctgctggacggttcgttgaaggccaacgccggcacggtgaccattgcgggcggtgaggaacgtcttgacccggctgtgaagaaggacgcgaagcgcatcgataatctggtcggcaaagttcgccgcgaggagattccgaacagtttctaccaagcggcgaatatttccgaggctgtttccgaagcgttgaaaaagcacaaggtgcccgagtcagaacgtcatgcgcgcatcggtaatctgttcgcgcattttgatttggcgcaggtctccaaggccaaggccggcgaattggactccgagaaacggcacctgctggctattgcggccgcgctgagctttgagccgagtgcgattgtggcggatgagccgagcaagggattggatgagattggcaccgcgcatgtggccaaggcgttgttcagctacaacaagcaggtgattttcgccacgcatgacacggatatgatccgccggcccgaatacgccatcgaccgcatactggtgctggacgagcacgcggtcgtgtttgacggagcgccggctgaggctgtggcgttttatgaggatctgattcgccgccgatacgagactagagcatcgtgaaccaagactgaacctgatgccagagcgtcggattgttgtcgatcatcgcatcgctgcgcgactgcacgaagcagctcagtatggctatgcccagcgcccacaatacggccagcaccacgacccagcgcatcagccaacgccacggagtgacgcgggcgatgccatcgcctgaagcggcgtcgttggcccccgccaatgaccggctcggttcgcgcccattgaccagccacagtagccccggtatggacgccagcgagatcagccagccgaaatcggcggaataccgccatcccaaaccgccgacgcggctgtcgaatacgaccagcaccgccgccacggccaagcaagacatcagccatggccgcatgccgtgtgtttccaatctgcgcagcaggggcagcgccaaagccatcaaggtcagtggcgtggccgtgaaaatcgcgccgaccatcacctcgtaataaccccattgcggcatcggggcgggagagcccgccagccacgggaaacgatccatgaagcgcagcggcaggaacaggtaataccagatgttggcgggcatatccgcggacggggtggtataccgggtcatatcggatacggagaactgatacgcattgccgaaattgaacggggaatcgaaccgaaccatgttccacgccatcagaggcgtcacgacgagaatggcgggaatgattaccgccagcggcgcgcgcaacgcctgcaacggcttgatgcggcgtgtgcgcagaccggtgcccagcgcgcgaatctgcggccagaacagggggaacgcaagcaatgcggccaaggtgaacgtcggtcggcatccgaaattcgccgcaatgcacaaggcgcccaaggccagtcgtggcagggagagaggcttggcatcgcccgcctgccatcggtccgatggtctcagcggacggcgggacgtgtccgcgccgagccatagccatagtcccagcgacgtcaacgtcagcgatgcggcgaacggtatctgatagaagttcgtgcgatacagcaaataccccacttgcgcgctcaccaacgatgagaccactactaacgacgcggccgccaccgaagtcttcggcatcacacgatggatgacgcgcagcaccagcaaggagaagaagatgatgaacagcagcacgagaatatactcggcggcggatgtcggcagattatgaccggccagcagacgataggggacgaacagcagcactgcgggcaacacgccaaaataggaataccagtgaccgtcataatacgcgtaatcccagtagagcggactggctccattggcgagtagctgggcacgtgtggctacgtcataggggtgctcggtggcggccagttgttcgggaaccggcaagtcgagccagggccggccggcgaccagcgcatcggccacatgcccatactggtcgaaatcataggtgtaatcgccggaaacgtggaagacgagcgaagacgcgtaccacagttcgtggatgatggatacgccgataagcagggtaggaatcgccagaagccccacgaaagcaagtcgttgccgagtgctggacgggtcaagcgtgatacgccacaggcgcgatcccggcctccagacggcaatcatcagcagcaccaaggccatggcgagcacgcgcatccaattgatgacgaacggtacgcgcacgttggcgcgggcgtcggtgaccggtacgatcgcgccgcgctcttcctgaatccaaatacgcacgatgccggcacccggcgccttgacataatggctgcgaatagcgtcgggattcatcgactgggccttgccggtgatgccatcgacatccgcgcgcacatgaatggtcgccagcggtttgaagacttccttatcgtcgttcgcttcggattcggcctcggcctgctcacgggccttatcgatgaccttgctgctcgcggtatcgatgcgtaggtaatccgacgtgccgtccgcggtcagttcaagataggccttggtcggatcggtgacggtcaacatgccatcattccggcgcgtgagacccgaacccagcgtgttatgcacggcgttcgtatccgtgctcgctccgagcgtacgccagaacggcaggttgaacacgatgcactccatggcggcgatggcggcgacggcggccagcaaggcgatcagcaggcgcaccaaacgcagccggtgccgggtatccgggcggctgggcaggtgccgttcatgattcgacggcatcggacggtctgcgcgagtgtggtctatggaatgcacgcatttattctataggctttattcgggcttgatgtcgggcaaacaagagacaatgtgaatcatgccaaaacgtacatcggaccatgggaagcacaaccgcacgccactgctgggcgggctgaaggattcgatgaacgcgctcgcggccgatctggggctgtccaagccgaagaagcacgatacgaatccgttcggcgatgccttgcgggagaccagtgagcgtaaaggcggcattatcgacgaactgactcgccatgcagtggcgctgagtccagtaatcaagcgacgcaccttccccgaattggagaacgtgccggaagggctggtgcttggatgggcgcagctgccctccaccagaggccgtggcttttcgcttggcattttccccgaccgcgatcattttgcgcaggtggcgttcgccgatacgcatggccgcgtattcgtgggcaccgaccccaacatggacgtgcaggatatgcaggcgcgattcatgttcggcaaggaaaaggaagtgactctgccggacggtgagcggctgggcgaaagcgacgagccgcgttcacgttccggtttctcccgtgcaggccatggcctgggaagtgcgctgcatcatgggcgtggtttggggcgtggccttggtcatggtgctgacggcgtgaaggccattaccggtggcgtggtggggcgtgacgacaccggacgcatgacgtggctcgcctcatggctcaaggccggcaaccggtacacgcttgagcagatgcgtgccaatctgccgcctgtgatgcgtcatgatttggaataccgcgatgccattaccatcgcgttcttcgccacgtatatgttgccgcagatcaatggtctgctcatcggattcggttccggcaatatcttccgccgtctcaaccgtgaggcgccaatcggtgcgattcgccgttcggtgcgtgacactttggcggcacgagcccacggcatgcgggcctccggtctggaggatcacttcgccgatctgatgcgcgaagccggcgccctcgacaccacgccgggactggaagcggtgcatggcgccgaaccgttgcacctgtacacctcgacgtattcgagcggctatttctttacgtgggataagtccttggcattcgggcaggcgctgaaatccttgaagatcgaaggcaacctcaaccgattcgctgcggtgagcgcttggctggagcgcaacgcttccttggggcgcaaccctacggaagatacggtgacccgtgccgaggccgcgcaaatcgacatgaaactcattgagaaccctgcgattatggcgcttgacccgtatgatggcgagcaggagcgtcgggccgtgctgagcctggtcgatatcgccgcacgcacggctgggcagattcgcagtgaattccctgatcctcgagatgtgctgacccagcagaacgtgccggattcgggtgtgacgaatgctgcgggcgctgaaagtactgagagtgttgagggcgctgtagagcggaccaataagagcgacaccaacactcaagccgctcggccttcgtattcgccggcgaggagcgacgaatgggtgtatcgtcagaccctctcctcactgttgcgccggttacggttgccgtatcggtttgatgtggagttccggtcgcgcttggattcgggtgaagtggccattggcttcaccactgccggcacctcgatgatgcccgatagccggtatgacaccactcgccgtacgtggcgtgcgctgagcagcgccgaacgcgcgtcgatgagcgccgcctacaacctgcgtgtcggcctgatgatggcagcgctgagtttcggcaccagcgaatccgtgcgccaggtgtcgttgcacatcgattccattggtcttgaagaggcgattgccgaacaggattccgccatcgaggcgatgatgagcgaggccctaagcgccttcgaacatctgcgcagtggcgatttggggcgtgtgggttccaaagccgaccccaaagatggtgatttccatggcgacccgacccgccccatcacccatgaggagacgttcgggcaggcggcgtccggtgacgaacgcggcacggccgggggaacaggcaacggtaccggaccgtctgcggatgctacggatcaggccgcggccgaatccgctgacgccgatggcgccgcgtccatcgattcgcagttcgaagacctgatgaagggcgtcgatatcgacgaaatggcgttcggcatgccggacgataccggcgcaggcgacgacctgggcggtatcggcggcgagggcgtcggcactgacgatgctgatggggccgccggcatggacgatgatccgatgagcgtgctgcgccgcaatcccaccgtgcgcaatatggtcaccgtcaccttcacccgtgatgccttcctcaagcgactggacaccgatgggcttgacaatcccgaggaaacctaccgcatgttcggtgccgtgatggacgtggacggcgaaggtggtctgaaacccatcagcgccgacttcgacttggcggacagccggttctctcccaccggatcccaggaggagcccgaactggccgaccgtcaattcagcccggcgaccgctcacgtgctgggcgcacagaatagtgccggactggctatccagcgagtggacttactgcagcatggcgtcaacgaattccacgatatcgccaggaacacgtcgctcggctccgtggaaaaggcccagcgagccatgcagatcatcgaatcgatatgcgatcccgaactgaccggtttggcctctcaggtcaccagtgcgttgatcgatggcaaggacaccccggacttcacgttcacgcttgccgacgatcttgacaaggagcgtctgcgcgcccgagacatgctgttctcgggccaagccgatcaggccatcgaagcggccgaagcggctgtggcccatttggatcaggtgtatgcggcaggccatggcgtacctcgatacttcaactcctatgccgagcgcgtggtctacaaccggctgttcgccacattggacgagcgtacggtgctcatcccggacaatctgttctacgcacacatggagctggctgacgtgttgagccagatcaagggtgccgaggcggccatcccgcacctcaaccgtatggtggcgtacgcgcccgcctacccgctctcacatctgaagctcgccatccaactggcccgcaatgaggattgggattcggcacgcgccgcctgcctgaatgctctgcgcgtggccttggaccgcgacgatgccgcgttcgcctactaccggttcgcgtacgccgaatggatgcttgaccggttcgacacagccgccgcagcctacattatgagcgatcacatcgctcccggggccattggttcgctggagagcgaactgcaggaactggtttcccgtgcggactcgcagtgcatgccggtgcctgaatcggtggagacggccgcccatgtgcttgccacgcatgatctgccggtctggccgcataacgaagtggccgacatcgtgcgtgacgccgcccgcgtgtgcgtggatgaaggcatgttcgtgccggcccgcacgctctcggtggccgtggcccgcatgaatgacggtgaaggcgacaacatcgacatcatccaagcccagttcctgcgctcgctatccgcatagccgcctgaggggagttgacggtatagccggccgaggggagccgagcccgctaggatagacaaccatgagcacgaatgaacaactggcatgggatttcgacgatggggatgtggccgaggtccggcctgataccggtattgcacgttttgcccctggctccgaacaatggatagccgcactgcagcccactgacgacgacgcgatacgcctcgaccatttcgacgtgaacacgatgaccgctgaggccgccgcccgcctgtgggctcgcgtggccgcatgggtggaatccgatcagatcgcctactacatcgacgactcacccgtcagctccgacgccgcctacgacgcgcgcatgcgttgcctcgaacgactcgaagcggcgttcccctcattggacaatccacagtcgcccacccatcgcgtcggcggctccttctccaacgacttcgcctccgtgcgccaccccagccgcatgatgagccttgatgacgtcttctccatcgaagagctcaaggattggtacgattcggtgattcgcgacctcgattggcccgaatccaagcccctgcccatgagctgcgaggtcaaaatcgacggcctcgccctgaacctcatctatcgcaacggcgtgcttgaacagggcttgacgcgcggcgacggcgttaccggcgaagacatcaccctgaatgtgcgaaccatcggctccattcccgccaacctcggcggccccaaggaagacgttccggacttcgtggaaatccgaggcgaagtgttcatgcgctgggatgacttccacaccctgaacaacgagcaggaggacgccggacgagcgcccttcgccaacccgcgcaacgccgccgccggctcgctgcgtcaaaaagaccctcgcatcaccgccacccgtcgcctgagcttctatgcgcatggtctggggcagctcacctggggggcggaccatccgcgcggcacccatgatgtggtcgccgaccagtcgcaagcctacgatctatacaccaggtggggcgtgccggtctccccgcacaatcgtgcggtgacctcattccaggagatcctggacatgatcgagtactacggcgagcatcgcggcgacatcgagcacgcgctcgacggcattgtcgtcaaggtcgatgacctgggcctgcagcgcgccctcggtgccacctcgcgcgcgccgcgctgggccatcgcctacaaatacccgcccgaagaggtcaacaccgaactgctcaacatcaccgtgcaggtggggcgtaccggccgtgtgacgccggtcgccgtgctcaaacctgtctacgtggccggctccaccgtggctcgtaccacgctgcacaacggatttgaagtcaaacgcaagggcatcctgatcggcgacaccgtggtggtgcgcaaggccggcgatgtgattcccgaactggtcggcccggtgcttgaacggcgcaaagggcgtgagggccagctgcgcgaattcgtcatgcccgagttctgcccttcatgcggcgcgaaactggcacccgccaaggagggtgacaaggacatccgctgcccgaatgtggaaagctgcccggcccagttgaccgagcgcgtgatttcgctggcctcacgcaaggcgttcgacatcgagcatctgggtgaacagtcggccatcgctctgaccaacccggaggagaaccggcctgattcggtggcgacctacgcgccgaacatcaccgaggtgctggtcgcccccggcgaagagcctgacccgtatgagccggtggaagggctggaattgccggccgcgcagaagccggtgttgtccaacgaatccgggttgttcgacctgacctccgccgatctgcgcgacgtgcgtgtgtggcgtgaggccgcaatcgtcgaagtgcatgagacggtcgatgcgaacggtaagaagaaaaaggtgcgtaagcgtgtcggcggctctggcctgtggcatcaggtgcctgccttctggaccgcgcccacgccggccaagaagctcacggccaagcagttggccgaacgcgcgcaagaagaggccgcaatcgaatccgccggaacacagggaggtgccgccagcgagacgaccggcgcacctaccggggctgaggctccacttggtactatgccgggctttgccgcagcctcctatcccgagtatgacgtgccggccgacgcggtcatcgtgcgcgtggaccacaagaccacgcgcaccggcgtcacggatgtgccggtgatcattcggcccggcgaaaacacgcgcaagatgttcgacgaaatggacaaggcccgtcacgccgacctgtggcgtgtgctggtcgcgttgtcgattcgccggctcggtccgcctaccgcacgcctgatcgcctcggcgatgggctcgctggcagccatcgaaaacgccacgattgaagatctgacggccatcgacggggtgggcccggaaatcgccgaatcggtggtgaactggttcgccgccgcccgcgagcccggcgactggcgcggcgcgactttgcgtgcttggcaggccgccggcgtgggcgtcgacgaggccgagaccagttcgctgccgcagacgctggccggcaaaaccgtggtggtcaccggttctctggagggctattcgcgcgactccgccaaagaggcgattatcgagcgcggcggcaaggcggccggttcggtgagcaagaagaccgattacgtggtgatcggcgcaaacgccggctccaaggccaccaaggctgaggaactcggcatccccatgctgggcgaagcccaattcgcccagctcctagccaccggtagcatcgactgacttggctcccctctctgaggggagctgtcgccttgcgcgactgagggaagtagtcgtccgcaaaacggatgcgggaatgggagaggtacatccgcagcgcgtgcgcagtgtgacttactccactccctctggcatgccgccgcatcacacgctagggtagaacaggccctaaaggaggatacggatttatgagcgacgcacgtcagatcgaagccgacatctacgaacgcctgagcaaggtcatcgaccccgagctcggtcgttcggtcaccgacctcggcatgattgccgctatcgaagccgcgcccgcatcgtcggacgccggcacttacgacgtcaccgtgcacgttgagctgacggttcccggatgcccactgagcgagaccatcaccaaccagatcaacggcgcggtcagctcctatccgggcgtacagctgctgcctcatatcgaagtcggttcaatgagtcgtgacaagctggccgatctggttgccgacctcaaggccgaacgcaagcggaaccccttcagcaagccgggcgtcaagacccgcatcttcgccatcgcctcgggcaagggcggcgtcggcaagtcttcggttaccgcgaacctggccgccacgtttgcggccctcggcttcgacacggccgccatcgacgcggacatctatggcttctcactgccgcgcctgttcggcgtgcacacgcagcccaccaatctgaacggtatgcttatgccggtcaccgcgtggggcgtgaaactgatctccatcggcatgttcgccggtgccgaccgggcaattctgtggcgcgggccgcgactgcagcgctccttggaacagttcctgtctgacgtatggtggggcgagccggacgtcctcttgctcgacttggctcccggcaccggcgacatggcgatttccgtggcccaggcgctgcccaacgccgaactcgtggtggtcaccaccccgcagccctccgcctccgacatcgccgtgcgctccggactcgtggccctgcaggtgccgatgaaggtgcgtggcgtggtggagaacatgagctactacgagcacaagggcgagaagctggagattttcggtgccggcggcggtcagcgcgtgtctgaacagttaagcgcggcgcttggctatgacgtgccgctgatggcccagctgccgctggaacccgaagtgcgcgagatcggcgaagcaggccgtcccgcggtgctggatgtcgatggtgccttgcgcacggatggcattggccagaccttccgagggttggctgaacggctgttggcagtgtgagcctgcgcagcctcacacttttgtaggcggcgctggcgtttaagtccggctcgctgctggtgggcgaatcgcttgaccacagcacccgcgacctggtggtcgaggcagtggagcgcactgccggcgtggataggctgcattaacctgcaggccattcacatggacgaggacgccgtgccgcgctgccttggtatgaatgggggatctacgtcgagcccgatgtctggcgggcacctcgcggtaaatagcggcatagcgcattatcggtgcgatgctaagaggtaatggcccatgagcggttccaatcggcgagattgcgttgccgggacaccacgacatgggccatctcgataaaacgatgccgcgtgtcggctgttctcaggtcatccgcagtgacgagaatggcgatccagccgagcagttgcaatgcgtttcgctttgccgcgtcaattcgcatttgtgccggatcggcgtgataggctccctgatattcgaacgcgacgcggcagtccggatatgccatatccaatatgacgtatgagttgccgatattcacgcgatagttggcggtggggcatcccaagcccgaatccttcagcatcccaaacagcgtgttttccggcggagaatccgtgttctctgtcatgtagggcagtgcctcgtggcatttgttacgacctatgaaccgcggactgatttccaagtaagtatcgaaatccttgcgagtggccattctgcgccgtttatcgcggctcatcaaagaggctccaatggccgcaagttcctccaatgtggagtattgggccatctgagcccacatcatgaccggcgaggcaatccagaaatgttcatagtcctttttgcggatatccagttttcccttaaacacatggaagaccacgcctttgattcgtctgcgtttgttggcactggaaacacaggcgtgcacggcatcaacagatagcgtgcaatgtcgggggatgggcgcgccgtagtagttggccgcattgatgtatcccaccagcaatggaccttttgaacggcgcgcagcatcattgcaacgttcacgttctgctcggcgtcggccgacaatatcctcatgcataaaagagctcatgatgcgaccgtaaagctgatttggacttgaatgcaagccaggcagggcaatgtggttccagcttatggagttatccacattgtctatttgcgcagagaacggttctcagtagtatctgtgcgctcaaatgaacaagaacataacaatctcacatcatcgcaaatggcgacatggcagtgattagggcatatcccatgtgcgcttcgggcgtagagaagtgcgcacagatattattgagaaccgttctctgcgcgcctactctccggtggagcctctggccacgacctcggtgggcaggaacaccgtgcgctggaacggtcggccctcgatctggtcaagcactagggtggccaagctgacgccgaatgcgtccattggctggtgcacggtggtcagctgcgggtgcatggctgtggcgtcggcgctgtcgtcgaagccggcaatggcaatatcgtcgggcacacgcacgccgcggtcgagcagataattcatggctccagcggcgatgcaatcactgccgcatatcagcgcgtcgatatgatgctcggcgaggagctcgggcacgctggcgtcggcgccggcaagtcggctacccgacggctcagccagcgagtccagcagccgcacgacggcgttgcggccatcgggccgggtccagccgtcggaccgaatgaccagtgccgggtcgaaatcgccggccatcgcatcctggaatccgagcagtcgttcgtcggaacatggcaagtacggcggtccgatgatataggcgattcgccgatacccgcgccccaacatatgctcggtgagcttgcgtgaagcgagtcgattgtcgatatcgacggtggggaaggggatggcgctgccatagccgacgccggaaatggcgaccggcacgctgatattggcgaatctctgaaatagcgggtcatctttatggaacgtgttgagaatccatccgtcggcgaatccgctggaggcgagtctggcgatgcgtgcgccggccgcaggggagtcggagatcagcgtgatgagttgataatcggcattgccgagcgtctggttggcgttgagcaggatggtgttgatattggggtcggcgattagcgaatccggctgcccgtgcaccacgaacgccacggtttgcgtgcgttggcgtaccaatgatcgggcggcgttgttcggcgtgtagttcacctgcttgacggcggcggcgatgcgctcggttgccttggccgagacatgcggattgccgttgagataacgggagacggtggcgtaggagacgccggatgccgcggcgacgtccatgatagtggccggcttacggggtatggccatgcccgtctccttcctgtcctaggaccgttcacagtgattgtaccgcgcgattttcctgatgattccgcatggcccatgtccggtgcctgtggattgccgtgccggcgtatgaaagtcggtaaacattctctgccgtaagggtgtacgaagtaaatagtaaaagagatttaccgatattaagtgaagtacgacacgcacatgatatttgtaaacctttacgtgagtgttatactccttttcgtaaacgtttacaagaaatcaccagtcaatggagacggccagatcaagcgagccgcaacggttcacaactggacgggaaggaacatcatgaagcagcagcacaacgtacgccccgccatccgcagggtgctccaggccacggccatcgtcacggcagcggcccttaccctcgccggatgctcgatgggcgcaccatcctcggacaccggttcgagcgatggcaagctcaccgtctgggtcatgcagggcgatcaaagcgaggccaccatcaaggccatcaacgaccagttcaccaaagagaccggcgtcgaggtcaacatccagaaccagcagtggaaggacatcagcaccaaaatcaccacggctctgtccaccagcacccccccccgacgtgctcgacctcggcaatacgcaggtcgccggcttcgcggccagcggcggcctcatggacctgaccgaccacgctgacgagttgcgccagggcgtcacctggctctccggtctggaagagcctgccaccatggacggcaagctgtacggcattccggccctcggtgccgcccgcgcagtggtctacaacaagaagacctgggccgcggccggcatcaacgagccgccgaccacctacgccgagcttgaagccgacctgcagattctcaaggacgcgcaccaaggcgaggacttcaccccgttctatgtgccgggtgccgattggaagaccgccatccagtgggtgtgggacgccggtggcgactacgccgtgcagaaggacggcaaatgggtcagctccctgtccaccaaggaatcggtgtccggccttgagcagtggcgtgaattccagcacaagtggtcatccgaagcctcccgcccgctcgacaccgatagccccgacaccagccagctcatggccgagggcaagatcggcgccgtaatcggcaacagcgcctccatccgcgtgattcaggaatacaacaaagacatcaccgccgacgaactcggctccttcccgatgcccggcctgagcggccagaaccagccgtcgatgatggccggctccgtgtggggcgtggcccagaaaagctccaagcaggatcttgccctgaagtggatcaagatcgcctccagccctgacatccagaacgactacgtgttcgccaaggacggctacctgcccaacaacgtcgaaggactggacaaggccatggcctccgacgacttcccgaccgccctgaccggcttcttcgaggccgccaagcgcaccaaggccacgcccgcctccccgcagtggaccaccatcgaaagcgacggctcgctgaccctattcaaggacatcgccaccgacaccagcaaggccgaggcctccgccaagaagttcgacgaacacgccaacgagctgtatgccaagtgacgggtcggaccatgacaagctcaacgcaactcgcgcacggcgaggccccggcctcacggccggctaagaaacgcggcaatcacactccggcgttcctgctgacgcccgccggcatcgtcatcatcgcactggtggtcatcccgctgggattcatgatcttcacgtccttcacggatttcagccagcgcacgctgttcaccggcgaattcgacttcgtcggcctcaagcaataccaatccgtactcaccgacccggccttctatgcggccctgctacgcaccttcggcttcaccgcagccctcgtggccggcagcgtgctggccggcatgggagtcgcccagctgatgaccaaactcggcggtgtgatgcgctacctggtcatcttcgtgctcatcttcgcgtgggccatgccgaacgtcgcatcctcggtggtctggaagtggctgttccagcccggttacggcgtcatcaactggctgctcacccagctgcacgtcttcggcgacatgaccaacacctcctggatcgacaacacctggctcgcatttctggagatctggctgctcgtggtctggcaggccgtgccatacatcgccatcacgctgtacgcggccaccacccaggtcgaccagtcctgcatcgaggccgcccagctggatggctgcagcaagctgcgctgctactggcagatcgtcgtgccgctgatctccccgagcatcatggtcatcaccatgctctcgattatctgggacttcaacgtgttcaaccagatctggctcatctcgcagggcggcccacaggacacgaccgccaccatcggcatcttcacctataagaaggcgttcgtcagcttcgaaatcggcaccggttcggccgcctccgtgctcgtgaccatcgtgctgctcgcgctgacctccgtgtacatccgttacctgctcaagtcaggagaggacctatgagtacgtcaatgagtgcaagtcctgcacaggccgtatcgcaggccgcagcgcagtccgcatcgccccgccgccgaaccaaccccggcaagatcgcgcgccgcgccggcaccactatcctcgccctgctgttctgcgtcgtatggttcttcccggtctactggatgattatcaccgccgtaaagcctcgcgatgagatcatgaccacgacccccgtgttctggcccacgcacctctcgttcgacaacttcatcgttgccgtgacccagacctcgttcctgaccaacctcaagaacagcgtggtcgtgaccgccatctcgatcgtcctgtcgatcatcgtcgcgttcttcgcgtgcgcggccctgaccctgtaccgcttccgcggccgcaagccgatcatggtgttcgtactggccatccagatgacctccggcggcatcatcccgcagttcatcatctacaaccagctcgggctgctcaacaaatacagcggtctgatcttggcgtacatcgccatggtgctgccgttcgcgatctggaacatgcgtgggttcttcctgaacatcccgaaggacatcttcgaatccgcggccgtggaaggcgcgaacgactggcagatcctgtggaagatcaccttcccgctggccgcgcccggcatcgtctcgacctcggtgttcgcgttcatcaacgcctggaacgactacatgattgcctatacgttcatgaaggaccagtcgaagtacacgctgccggtatggctgtcgtccttctcgacacccaccatgggcaccgatttcggcgggcagatggccgcttcggtgatcttctcgctgccggtggtggtgttcttcatgctcatccagcgtaacatcatgaagggcgtgacgaccggtgccgtgaaatagcgtatgccgccgtacctcaccaacgattcgtccgctgatggcggcgcgaccacgtgtcgcctgccattagcggacgaacgataataaaaacagtatgaaaggaacagctgtgcccacattcgaatatacagtcgatgccgcaacgctgtgtctcaccctgattcccgctccggtgacattggaatacacgcatggcacggctatgatcgggtccctggtgacgatcgagaaacgaattcccgaatatgccgccaccgaaggtgccgatgagacttgggaaacgctgccgattgagcagctgtccagcgagctcgagcgttactgcggcgtcaccgtccgtacgcgccgtgtccgtgcagccacaggtgaagacgacgccagcgcaaatgccgccgaagatgcgcgagatgcgcgtgcgggtgcgccggcggcgatgaacggcaccgtcatatccctgggcctggattcacgattggcgcatgacgaatacacgctggatgtgttcgcctcagataccatcgccgtgcgtggcggcggcgaaagcgggctgcggtacggtctgcagacgctgcggcagatcatcgggcagacctcgcgtgccattccctgcctgcatatccaagacaagcccgcgttcgcggtgcgcgcctacagtctcgacgtgacacgcggacgagtgccgacgatggagttcctcacctggttcgtcgaccagctggccttatataaatacaatcagttccagctgtatgtcgagcatgccttcgcgttcgtcgagctcagcgaggcgtggcgtggcaccgatccgctcacggccgccgacatcacgtatctggacgagtactgcgcgcgtcgcggcatcgagttggtgccgtcgttggccacgttcgggcacatgtacatgaatctgcgcacccgtgagcatcgcgggctgggtgagttccccgaagacgccgaccgcccgttcagcttcatcgaacgcatggagcatcacacgctgaacgccgccgatcccaaggcccatgatttcgcctcgcgcctgattgaggaatacgcgccgctgttccgttcgaagtccttcaatatcggcggcgatgagacgttcgacttgggacgtggcaggtccgcgcaggacgcgccggaagccggccgcgatgaactgtatgccggtttcgtcagggatttgtgcgaaacgctcgcccgccatggtcggcagccgatgttgtgggcggacatcgcgctcgaaagcccgcgcacgatggatctgctgcccggcgacatcacgatgctcaactggatgtacgagccgcagatcgacgagagcaacatccagaccatcgccgcgcagggccgtcgccagttcgtgtgccccgcggtgcgggcttggagccggttcttccccgattatgcgggtgcctggctgaacacgtatcacatggcattggcgggtgtcaagtatggcgcggaaggcatggtggtcaccgattggggcgattacggccacgtcaacgatccgcgtctgagcgtgccgggcctgtgttatggcgctcagaacgcgtggaatccgattgagatcgatgcgcatgagatgaaccgtcggatctccgttctggtgtatggcgacgagtccggtcgcatcatggattgcctcgtccgcatcgactccgatggggtgtcattcccctgggaccttgccgtgcaggtgctggagctggaatacggttccggcaccggcatgctgaatacggatgtggcatcgtatgtggaacggtcgtgcgggggagagctcgtgtttgaccgtacgctgggatgcgccgatgcgcgccgccggctgctcctgcggaaccatgcccgactcgaacgacgccgggattgcgaccgggcgttgatcgattgcggcagtgcggttgttgcggtgctcgatggctcggcacgaggaggattgaacccggaactgctgtgggtgatgctggatgggcagcggttgttcaatagactgggcgaggaactgctggtactggctggcggcgaggacgcctgtgacaccaaggatgtgaccggccgtgcgctggatgcctcgcgccgcgcccgtcttgccgccgatctggagttgtggttcgaacggtaccgtgtgcagtggctgtccatcggccgctacgccgaattggcgcgtatcgcccatgtggtgtggtcgtttgcggacatattgcgtaggggagcgctatagggagctcacagaaattcggtcctgctgagaacaaggtgaggcttacgcgccgtcaaacgcacatggtgatttca

SEQ ID NO: 193 - DNA, 28277 bp, Unknown
  R101_18m  MAG No. k141_15195
cgcttccctgcagcgaacaggtcaccgtcgaaaccgatcgcccccaatcttgagttatcaaacttccggcttttcggccggacttttcagtatacaccctatggcgctacgcgcgcaagtcgccggcagcgaacgccgccccggaaccaacgaagccaacggaatcgccgtcacttgatgatgggcttctgggatgcggaaacatcaatctgatgtttgccggcaaagccagccgtgccagcggtgatgttcttgtcgatttcctcgacttccgccagcttcagcttcagttgcgaggagtcgccccaaatgattacgcggtcaccgtcgttaagcgtggtggtcaccgaatcctgcgtctcagcggtgaccttggtaatggctttacgcatcgattccggcaatgcgcccagaatcgtcagcgcctccttcaccgaacggttcttgagactggcgtctatatccttgacctcgatcaccggaatgccatccacgttggcgttcttcaccgagttcaacacacgcgcctgggaatccaccgcggtcagggtatcgcctcttttcagcatggccgcaggccgttgcgccttgacttccacgctcatcgacttggggaactgtttggagaccttggcctcgctgacgccgggaatggacttgagttgctctgtgacctcatgggtggagaccaggaacaacgactttccagcctgcttatcggcgatggcatggatggtctgcgcgctcacccattcgttggcaccggatacgccgatctcgctggtttccagacgaaacaccgacgagaagagcagcagccacgttagccccgtcactacagccacgctgacgacagcaatcaacacgcgtaacgcaacgacacgtacgttcgcacgcttgcgttctttggcgcgttcggtgaaattcaccactttcgggcgtgatacgactcctagggagccggtggtctggtgcagcgtttcggcaacgtaatcctcgctgtgcagccgtcgtgcatcgacgaaggcaccggcctggcccttggctaccgtcacatcgtcgatgatctccggctcgtcgatctcatgcccggaagacacggaccggggagcgcgagacttcgacgagtgacccgtgtttccgcgtgaacctatggtgcgcggcttgcggggacttccggacgaacgacgtgagccgttgtcattgcccccggatctgaccgtgcgcccggacatcactcgcagctttcccgatgggcctcaagtgcggtgagcagcacctgatccatgtcggtgatgtcgcccgcgcccacggtgaagatcacgtcgccgtggtgggcacgcatggccatcatcttggcggccaggcacatatcctcgaccggctgaatccacgtgcctgcggaagcgtccttgagtcccgcagccgcgtccacgatggtggaggggctgatgtccgggaaatcggtctgcttttcacgggccgggaagatgccggtgataatgacgtcatcggctttggccaaggattcggcgaactggtgcgcgaagaacttggtgcgggagaacaggtgtggctggaagatcacacgaatggtcgaatcggggtaccggcgtcgggccgcatccagcagggccgcgatttcggtgggatggtgggcgtaatcgtccactacagtgacctgcttgaccgtgccgcgcacctggaaacggcgtgccgcaccgaggaatgtgccggccgccttggccgcgtctgcggggctcacgcccagcagcacggcagcgctgatggcggcggccgcattgcgcgcattgtgcacgccaggaaccttcagggcaacgctctgagacaccggctcccccgccgtcaccgcggccggcagatgcagggtgagctgttcgacgccgctgcctgcggtctcgctttccgaagcgatccagacatacgcggcaccgcccaaatcgggcagggattcacgcgcggtagtgccgtaggcaacggtatgggatttcacgtcggcgggcatggcctccagcacggcaagtccgtcggggtcgtcgatgctgatgatcacgtgaccggtggcccggccggcgtgggcaacgaacgcggcacggtagtgggcttcgtcgccgtaatggtcgagatgatcggcttcacagttggtgataatggcgatggtcggatgatatttggcaaagctgccgtccgattcatcggcttcggccaccaggatatcgcctttgcccgcgtgtccgccgtccagcgtggtgccgtccgggccttggatgaagccgccgacggcgtagcttggatcggaaccggcgttcaccagaatgtgggacagcatggagctggtggtggttttgccgtgcgctccggccacggtgacggctcgtttgccgttcatgagcagggcgaggatgtcactgcgatgcacaatgcgcttgcccgccgcgtgcgctgcgacgatttccggattgtccggtttgatggcgctggagtagaccacggtctcggcctgggcgacattttcggctcgctgcccaaactcaacggtgatgcccagcgtttcaagtcggtcggttttggcgctgtgtgcgcgatcggagccgtccaccgcgactccttcggcgtgcagcatttcggccagaacgctcataccggcaccgccgataccgatgaaatgggtggcgccgagatccgcggggcgggccgcagcatcgaatgaggcatacgtggggtcaagcacgatgggctgatcttgagacaattcaaaactcctttggggattccagcaccctatattatgaccgtatctcgtgttgcgggacgggattggcccgtatcgcgcacgggatgatatctgaatactatttggatggttcggcgaattgcagaacgtgccgggccatgatttcggcagcgtttctgatgccgtattcccatgccttgcggccgaattcggcaagtcgttcgtgatcggcgagcagatcgggcacatgctcatgcacccactgcggggtcaggtccttgtctgcgaccagaaggccgccgccggcgttcaccaccggttcggcgttgaaacgctgttcgccgttgccgatgggcagcggcacgtagatggccggcagacccagtgcagccagctcggataccgatccggctccggcgcggcaaatcaccaagtcggcacaggcgaaggccagatcgattcgttccagatattcggcggtatggtagtcaccttgtccggccgattcggggccgatgccggcaagcacgtccgcgccggccgaggccgtgaccagttcgcgtacttcgctgattttgcctcgcccggtcaagtggatgatttgtgcgtgggccaacaggtctgcggcggaggaggcgatggcgcggttcaggctttgcgctcccagcgatccgccagtgaccagcaccagcggacggttcgaatcgacgccaagctgcgcggccgattcacggcgtacggcggcacggtcgtcaccgatgcgtttggtcagggaggcgatggccgggcgcaacggcagaccgacgcgctcgacgtcggctccggcacgcggtttgagaccggtgccctcgtacacggtaccgatgaaatcggcccaacgagcgcccagtttattggccatgccggcacgcgcattctgctcatggatggcaatcggaatgcccatcttatgtgcggtggcgtagacgggggcggaagcatacccgccgaatccggccacgacatccgcatgccgcgtttcaagaatggagcgcaccttggcggtttctcgcttccattttgccgggaagcgcagcatgtacaggtcagggcgacgcgggaacggcactttttcgatggtgtcgagctcgtagccggcctcaggcaccaagtccttctccaaacccaccgcagtgccgatgacggtgacctgtgccatgggttcgatgtcgcgaatcgccccggcgaccgcgagcagcggattgacatgtccggcggtaccgccgccagcaagaacgatatgtggtgtgccttgattcatgattaccgagtctacttacgcgctctgacgcgactgttttatctgcggttgagagcgcataagtcccacaaccagtccggccgccgtcaagcacatgatcattgatgagccacctgcggagacgaacggcataggcacgcccaataccgggaacacacccacgaccacgccgatgttgaccatggcctggcccacaatccaaatggtgacgcacatcagcaccatggcaacataacgatcggtgacctgcaatgcgatgacgatcatgcaccaggcgagaatcgcgaagaacagcaatacgatggcgcaaccaacgaatccggtctcctcgccgatgatcgcgaaaatgaaatcgttatgggcggccggcaggtaattccatttctctcgcgaattgccgatgcccaatcccagaaagcctccggaggcgatggcgtacttggcgtgaatggactggtagcatacgctctgcgcgtcagcggccgagcaatcgccatatgtggccagaatacgacgcatgcggttcgggctggaaaccgccaatgcaccgaccataaccaccgcgcccaatacgccgactcccatccatttactggggaatccgacgatcaggaaggccacgcctccgatgaagaccagaatcatggccgtgccgaggtccttgccgcccatcaccagcgccacgcctatcgcatacaacaccaacggcgcggcatatgctttgattcccttcttgtggtacatcttgctgcaggcatgcaacgacgagggcagccatatgcatatcgcgaacttcatgaattcggccggctggatagtggtgaagccgaggttcagccaacctttgttgccgtagacgtcgagacccagcggagtaaaggtcagcgcctgcaacagacaggcacccaccacaaagaacacgccggtccgtttccagaacgtcaccggcatcgtcaatgccacgaagcccagcaccaagccgatcaggcaaaacgcgccctggttcagaagctgaaggaacggcgacttgcccagtgcggccatggtgaccgtggagctggagaacaccatgatcaggccgaagcatgtcagccccaccacggccatgcggaatccgtggtagcaccatagcgggttgagcaagcttcgccaacccgtgtagtcggtgatttcgagtgcgggcttgtcaggggctctgtatgccttacgcttatggatatcagtggaggccatgcacctcgctccacgtcttggctgcggcggcgaatcgattgcctcgatccgcataggacttgaactggtccatggaggcgcaggccggagccataagcacaatgtcgccggcggcggcatacgtgccgcaggcttcgacggcacgatccatgacggtatcgttgtcttcgggatcgatgatggtcaccgggatgtccggagcttggctggcaaacgcttcgatcatcggctgctggtctttgccgatgatgacggccgctttgatggtatgtgcctggtccttgaccaggtcctcgaatcgactgcccttggccagacctccggcaatccagatcacagacttggccgggaagctggacagcgaggcgcgtgccgcatggccgttggtggctttggaatcgtccacgaaacgaacggagccgccctcgactacggcctcagccacggtttcgatgcgatggccgcccggcttgaacgaggtaagcgccttcagcgcggtatcgcgatcagcgccaagtcccagcaccaacgccaatgccgtcaatgcatcggccaccagatgcgggtacagtgagccgtccggctctgccagatgcgtgaaatcggtgatggcggccagtctgaccggctcccccactgcgccgccggccacgccgctcctgtccacaatccagccatcttcaatgccgatctgaccggcctggggggcctcgagcgtgaatcccaccttgcggcatccttcggcggtttgggcctcggccgccagttcgctgactttggcgtcctgcgcattgtagacgatggcgtgtttggcgttgtggaacaccttggatttgtcggcggcgtaattctcgcgcccgccatgccagtcgaggtgatcgtcggcgatattggtgatcgccgcgcagtcaagtgccagcgaatcggtgaagtgcaattggaaggagctcagttccacgcacagtacgtcgtgctgaggattggtggcgcaacgagacaggctcatgctcatgtctccggaggcgatattgccggcggtcggcgcgtcgagtccgcaggcggtgagcatttccgaggtcatctcggtggtggaggttttgccgttggtgccggtgatgccgatccatggagccggagtaccggtgcgctcgttattcacacgcagttgccatgcgaattccacctcgctcatcacggggatgccacggcgttgggcttccagcacaaatggggtacgggggttgaacactggggacgacatgacgtagtccacgtggtcccagtccacgtcatcaaaggagcggagatcggcctcgggcttcctctcgtcgacgccaatcacgtgggcgccgcgttccctcaatacctccgccaacgaggtgccggatacccccagtccggcgatcgccactgtcttatccgctacttgcattgttcctcctgatataggaattccgtgggtgagcataatccacccagatttccgctagctgaacagcaggccggagcgggtgacccagtcgccgtagaaaatcgtcagggcgagcagcacgaagatgagttcgatcatccagaaccgcaccaccaccttggtttcggtccaacccttcagttcgaaatgatggtggatcggtgccattttgaatacacgtttgtgggtcatcttgaagtacccgacctggatgacgtcgctcatggcttccatgacgtacagtccacccagaaccaccgccaggaattcggtgtgcgtggcgatggacagggctgcgaacagaccacccaaggccagggaaccggtatcacccatgaaaatcgatgcggggttcgagttgtaccacaagaagccgaagcaggcgacggccgcgcatacggcgatgacggtcagatcgagaggatcggacacggcataggaatatccgccatggctgccgcccttgatgtggtagctttcccagaatgcgatgatgccaaaaccggtgaaggcgatcatcgacgaacctgccgccagaccgtcaagcccatccgtcagattcactgcgttggtccatgcggtcatcaggaagttcacccagatgacgaacaggatgatggccacggttcgaccggcgaagtcgaagttgaagaacggccgttcgatgaagctgatgcccgcctgcgcactggggaaacccgatttggtgggaatcagcagcgccagcaccgcgtagatggtggcgaagatgaactggccgatgaacttgccggtcaccgataggccttcgttctgcttcttacgcaccttggcgaagtcgtcgataaagcccagcagacccatcgacagcatggcgaacagtacgagcaccgcggaccaggagggcacgtcgtccgaacgcaggtatcggtacagtgcggaggatgcccaaccgagcagaatcgcgaagttgatgaccacgccgcccaacgtgggggtgccgcgcttgaccagatgcgactgcggcccatcctggcggatgtactggccatagtgcagcttgtggaccagccgaatcagcagcggggtgccgactaaggtgacgatgagcgacaccagcattccaatgatcagagcaatcacgtgcagcttctctttcttgtcggtttcttggggtggttatcgggtcagttctttgcccagcgttcagccaaagcgctcaggcctgacgcgtgcgatcccttgagcagtaccacagcgtcggaatggttgcgcgccaagtcgatgaccagctgttcggccgcatcgatgtcgtgtacgcaatccaccgacgcggattggctctgacgggcaccgtccgccagagcctgtgccagtgcatcgagatgttggtcttgggcggaaccgaccgcgatgatcgcgtcgatgcccaattcggccgcatacgtgccgatagaggtgtgcaatgccgtctcatcggcgccgagttccagcatggcacccagcagcgccacgcggaacggatccttgccgtcatttgagttccaagccttcaacccgttcaggccggctttcatggagtcgggattggcattgaaggaatcatcgatcagtgtgaaggaagtcccctcgcgattcaccgtggacaatgccatgcgatgagggctgatggtgtgctgcgaggccagaatccgcgccaccgtttcgggtgccataccgtaacgcatcgccacggttgcggcggccaacgcgttcatcacgttgtgacgtccaggaatgcccagatgcaccggcgtatggttgccgtccgcatcgaccaacgtgaattcagcatgatcggaccggtcggcagtgacatcaatggcccgcacctcgggctcctgcgacgatcccaagccgaaccacagcacatcgccgctggccaggccggccatgggaaccacgtgttcgtcatcggcgttcagtaccgcggtgcctccgggaagcagtccctgcacgatttcgcttttcgcctgtgcgatgcgttcgcgggagccgaattctccaaggtgagcgacgccgaccttcaatacgattgccgtgttcggcggtgcgatacgggtcagtcgcgcgatttcgccgatatggctggcacccatctcagccacgaagaaccgggtgtgctcatcgacccgcaacgcagtgagcggcaggccgatctcattgttgaacgatcccaccggagccacggtcgggcctacggtggcaagcagggaggagagcagatccttggtggtggtcttgcccaccgaaccggtcaatccgatgatgtcgaagtcgccgtccagctcgcggcggcgaacgatgttgtgtcgggcgagctcgccaagggcgtcgaccgtgtctttcactacgatctgcggcaggccatcggactccacctcatggtcgacgatggccaccgtggctccctgttcagcggttttcgccacaaagtcatgcccatcgacacgctcgcctcggatggccacaaacaccgatccggggccggcctgccgcgagtcgctgaccgtattggtggctcgagactcggaatcggcgtctccgatcaatcgaccatcgacggccttggcgatctcctccacactcatcggaaccatggtgtttcaaactcctttacgattacgcttcgtcccgcatccacggacttaattgagattgttggccacatgcagggcactgcgtatgttgtttttcctcacgccggcggccagtaccatggcgatggccaaggacatgtgcccgagtcggacgcggtcgtacattgccggtgaatccgcagccatttcatccgattcgggtgtcgacgaggtcatggacatgtcatgttccgcaacgaatgcgtagcgtgtcttcaattcgtccaagcttgcgcttgcgttgacatcttccgtgcccagcacatccacgttcaccgattccaacgcatgctcggccaatgtgcggtcatccatggcgatgatcacggccgccacaccgtcttcggcgcacacggacagcgcgcgctgcatatcgaggatgcccagaggatagttcaggttcatggtacgtgtcatcgacgtggacccggatgcggtgattaccgccaccggattgcccagcatgtgcaggaattcggagagctgggacacgcctgcgtcaacggcctgctcatccgcaccggtcaccgcgaacaccgccatggcgttggatggtccgccggccaggccgctggccagatcgccgagtacgcgatcgtcgaaatcgccgtagagcaacggtatatcggcattggcgatctgccctttggacgcgcgtggcagcaacgccgcataggcaccggcctgtgcggcatgcagcacatcgggttcctgctcatgcgtgcagatgaacagcgagccgggaatcacggtatccacggcatcgctgagtgaggtaatggtgacattggtggcgaagggtggatcgacttcaaaaccgtaccgttcgaccagcattcccaaggtcacccgctgggcgatggattcgctcactgcactcatgggctatcgcctttctcccctgatccttaccacgtgactggaatagcattttttcgtggactggagacaggcacctcgtatttctgcataaggaactcacaaatctgtgcggaaacagggccggccgtcagaccgccgaacacaccattcggatccttcagcaccacggtgaccgcatagcgcgggttgtccgcgggaatcaccacggaataatcggagataatggacgagagcgcgccatccgaaccctgcacctctgcggtaccggacttggcggccatgcggtaaccatcgaccttgacgaacttgttgtagctctccgccactgattccatcgcattcatcatgtccgatgcgaccttttcatccaccacgcgagtggcttcgcccttcttggtctcagtggtcttgccattggcatcggtggttgatctgatgatcgactgctgctgcttgacgcccttgttcgcgatggtggccaccacgttgttgagctgcagggcgttgacggtgtagccctgaccaaacaggatggtgttgcgcgtacgcagatcccatgccgaagggctggtgagcagaccgctcgattcaccgggcaggttcagtccggtcggttgtccgatgccgaatttggtcaggtactcgtagcgttgctcatccggatagttctccccggccataatcatgccgacgttcgatgagttctgcagaataccggcgagcgtccagcgctcagtgccatggtcgaatgagtccttgtaggtctggcccttctgtgtgatgtggtccgggaccgacaattgatcgctcatcttatgcagtcccgtctgcagatagccggacatggagatgaccttgcccaccgaaccaggctcgaaggtttcggacacggcccgagacgggctcatcttcgccgcatcggtaccagcctgtacttcatcgctatcggccagtgcgagaatctccccgctctggacatcctgcaccacggcgatcgcccacgctgcaccatacttggattcggcctccttcaaggcctttttgacataccattgcacatcacggtcaatggtcagggtgacatcgtcgccatttttggccgccaccgattcggtcatggtgccgggaatctcttcgccgccattaccacgctggtaggtttcatggccatcggttccggtaagcgtcttgttctcgacctgctcgatgccggcgacgccatcgccgttgtcgttcacgccgccaagcagcgcgcccatgagatcgccatccgcatacagtctttcactgctcagctcaccccagacaataccgcccaggtgcaacgcctcgatgctgcgcttgacctgtggggtcacgtctttcttcagaatcacatactgcccggtaccggacagatcagcgcccaattccatggcgttcatatccaggactttggccagcagtcggcccacggccgccgctccggtagcacccacgggtttgccgtcaatttcgtggcagtaatcacgggtgttgtcattgcaagtaatcggctcgaactcctgtgcagcctccggattggcgacgatagtataacgctccacgctttgagcgagcacggagccgttggcgtcgaggatacgcccacgcttggcgctcaacgtcacggtcagggtgcggttagccgtggccgcttgtgcggtttgacggccgccgatgagctgggtggaggccagctgaatcacgcatgccgacgccaccaacgccaatgcggcgccgatggcaatgcatttgaacgcgaaggtcttgaccttggcgaactctacgatgcgacgaatggtgttcactgggttccgcctttgttggactggtatccgcttaagtcgatggacactgatccctgttgcgggaccatgcccatgtcgctggccttgtcgggcaggttcgcgactaattgatcgagtttggcctgatcgtcttcgacatcttgggtaagtctgttgatattggtttcgatctgtgccgcctcaaacgagttctgcaccatctgggtacgcaacatcagcgcaccgaacaaggtgccgacgaggaagatcactgcgatggccacgtgcaccagcggtgcgcttcttgttctggtccattcgatgacccgtccgacgacattgccccgctcgtctccacgcgggttggagaccacccgcagctcaggtcgggaggaggactgatgcttggtgtgcggtcggttcgaggccggagccgcgttcgaccgaatgttacgtgcggttgccatatgccgttatcccctccttgtacgaattcgcgctgtgtttttggctctgcccggagacgcggagccttgtatcttgacgtcattcaggccctgcgcggtttgcgtaaagcgtttcctccatcgtgacggaatctcacggctgacttccaccgcccgcaaccgcaccgaagccgatctcgggttggctgcgatttcatgttcgccggccttgatggcacctcgcgtgagatccgtgaaaaacggttgggcatccggcggtatgacaggcagaccagccggaacatccactcgcagcccttgtgccatgaacgatttgacggttttgtcttcgagcgaatgataggactccaccaccagtcgtcccccgacatgcagtcggttcgcggcttgcggcaatgtggaggcgagcttgtccaattcgccgttgacttcaatgcgcaacgcctggaagacgcgtttggcgggattgcccgccgggcggtgggcttgcggcaccacttcatcgaccagacggttgagctgtgcggtggtggtaaacggctccttgtctcgacgtgccacgatggcgcgggcgatctgacgcgagaaacgctcttcaccgtattccttgaatatacggaccagttccgccgcatcataggtggcaagaatccgttcggccgtcaacggctggctgacgtccatgcgcatatccagcggcgcatcatgcgaataggagaagccacgatcggtttcgtcgatctgcaggctagataatcccagatccatgaatacggcgtccacacgttctatgcctcggtccgtcaacacctgatcgagctgatcgaaggcggcatgcaccgggatgaatcgatcggcgagcccctcccgttccatgcgttcggtggccagccccagcgcttcactgtcacggtcaatgccgatgagccgagcctgcggcgcggctttgaggaaggcgatggaatggccggcaaggcccagggtgcaatccgctgcgatggcgttctcatgttccagggcaggcgccatcaggttcacgcaatcgtccagcaataccggcagatgaatattcgccacatcaaccatcagaattccacctccggcaacacatcgtcagcaatatcggaatatccctcttccttctcggcgaggtaggactcccacgtgtccttattccacagttcggcacgggtgccaacgccgatcaccacgacgtcggaacccagattggcgtaatcgcgcagcatctgcggcaccagcacgcggccctgcttgtccggctgctgatcgacggcaccggaaaggaacacacgcaggtattcgcgggcggctttgtttcccaccgacacacgctgaatctgcgaggcgatacggcgaaattcatcgaacggcagcaggtacacgcaccgttcctggcctcgggccatgaccaggccctgccccagctgggagcggaatttggccgggagcgccatacggcctttggcgtcgatcttcggcgtatatgtgccgagaagcagcggcggcagaccagccatgagatcagccatagtggtggagccttgtacgttggcatcagcgtcgcgaatcgtctgatcggcaaccatggctccacctccttcatcgttacgtgggatacacttcggccaactggttcaccactctaccccacgattccccatttctccccactcatgcacgatttgctcacccttttagggcaattaccgatggattgcgcgtgtcggccacgactgtcgcacgaatgggcgctccgcacatccaatccacgttgcgcactccaccgaccgagcagcatggcgaattcacgctgaattcacctattccgggttgtccgcatcactgacgtagggggtgtgcggtaaatttgaatgccttaagttttttctgccccacggaaatggaacgaagagaacagcatgtcgagttacgcctcccagctgcatgaggagcagcaggccgtcgatcgcgcctatggacgattggatgatctgcgagccgaaatgtggcaacgcctggacaccgtacgcgccgccggctcccacggatcccccacgcaacgcagcgaacgagactcctttgccacaatgtacgaaaaccgcctcacgcaattgcgcagcgttgaggatcggctggtgtttggtcgtctcgacgccaagaacggcgaccgtcattacatcggccgcatcggcctgtcgagcccggaccatgagccgattctgaccgactggcgtgccgaagccgcacgtcctttctatgaggcgaccccctccaatcacggcgacatcgtgatgcgcaggcatatcaccttgagtttccgcgaagtcgtgggcgttgaggatgaggtgctcgacgtgcattccgaccaagtcggccaggcgtcttccgccggcacgttgaccggcgagggtgcgctgctggcttcgctgagctcacgccgcaccggcaagatgaccgatatcgtggccaccattcaggccgagcaggaccgcatcatccgctccgacatgaatcgtgccgtggtggtgcagggcggtcccggcaccggcaagacggccgtggcgctccatcgcgccgcctacctgctgtacacgcaccggcgcacgctggaacgttccggcgtgctggttgttggccccagctcggcgttcctgcactacatcgatcaggtgctgccctctttgggcgagaccggcgtggtctcacgcaccatcagcgatctgattcccggcatcaccgccacggcggtcgactccccttatgcagccaagctcaagggcgatcgacgcatgacctccgtagtggccaatgccatcgccgcgcgcgtgcgtgttcccgctgttctgccgacagtaaccattagcggcattcaggtaccaatgctggccactgatatcgagcaggcgcaggcggacgcgaagcgcacccggcaacctcataacaaggcccgcgagacctttatccgttcgatgctgaccagcatgcagaaccgttatgccgaacagcttgattacacgccggatcaggcggagctgaaccgcgcgatgtcgttgctgcgtatgaacgagcaggtgcgcaagaccctgaacctgtgctggctgccgatgaccgccccatggctcatcgatcagctgttcgcccatcccgaacgtctgaagtctctggctggttggctgaccgacaacgacatcgcggcacttgcccgccccaagggctccccgctgacccgctccgatattccgctgctcgacgaagcgatggatatgctgggccccgatcccaagacggtggcccgccagtccgccgccgacgcacgtcgtgccgccgaagagcagtatgccaaagacacgctggccgcgaccggtctgggtggaggcatcgtctccagtcagatgctgctcgaccagatgaacggggacgacgccgagctgaccgcgcagcgggccgcggccgaccgtgaatggacctacgggcacatcgtggtcgacgaagcgcaggaactgaccgccatggactggcgtatgttgatccgccgttgcccctcccgctcgttcaccatcgtgggcgatgtggcgcagacctcggcgctgggtggcacccgacgctggagcaaatcgatgaaccgcctgttcggcgaaagccactgggatctgaacgagttgaccatcaactaccgtaatccgcaggaagtttccgaactcgcctcacgatttgccgagaaggaaggcctctacatctccacggtcaatgcggtgcgcaccatccccgattcggtgtcccgcaatgtggtgcccgacatgtcgtccttgctggaaacgacggccgagcaggcggcgcagcttgccgaacaattcgtttcggcagacggcaccggccgcatcgccgtcatctgtccggatgatctcatcgccccggtgcgcgacgccgtgcgccgcaaactggccgccgttcttgacccggccgaatacgcaaggctcatcgagcagcccgaatgggatgagcaaatcagcgtctgcggcaccgaaacggtcaagggtctggagttcgatgccgtcgtggtggtcgagcccggtctcatcgaggatgacgcgccgagccgcctggtcgccgcctcggacctgtacgtggcaatgaccaggccgacccagaaactggttatagttcggacaagaacggacgaaaagtccctgaacatctaaggtatgaagcatgcccaaagcactgttattggaaaacattcaccccgacgcggccaaatcgctgcgtgatcacggtttcgaagtcgagaccatgaagggagccctgagcgaggacgaactcatcgacgcgctggatggcgtggacttggtgggcgtacgctccaagaccaacgtcacagcccgcgtgctggatgcgcgtcctacgctaagcgccatcggctgcttctgcatcggcaccaatcaggtcgatctggcacatgccggcaagcgtggcatcgccgtgttcaacgccccctactccaacacccgttccgtggtggaattggtgatttgcgacatcatctgcttgatgcgccgcattcccgcacacacgcatcacatcaagcatggcctgtgggacaagtccgcttccggctcgcatgaagtgcgcggcaagacccttggcatcatcggctacggcaacatcggctcccagctgtcggtactggccgaggccctcggcatgcgcgtggtgttctacgacatcgaggagaaactggcactgggcaacgcccaccgttgcgataccctcaacgaactgctggaacagtccgatgccgtgaccctgcacgtggatggccgcaagtcgaacaccggcttcttcggcgaagaccaattcgcccacatgaagcaggacgcgattttcattaacctttcgcgcggtttcgtcgccgatctgggagctctgaagcagcacctcgattccggccatctgtctggcgcggcggtcgacgtgttccccgttgagccgaagaagagcggagatccgttcgagacctcactggccaacgaagacaatatgattctgactcctcatattggcggctccaccttggaggctcaggaatccatcggccatttcgtctctcagcgtcttgaggattactggttcaagggttctacctcattgtccgtgaacctaccgcagatcaacctaggtgaacgcaagggcgtgtgccgtatcgcccatctgcacgacaatcttcctggtgtgctggctcatgtcaatcgcgtgctcggcgaagagaacatcaacgtttccttccagtcgttggccaccgaaggcgaacttggctatgtggtcaccgacgtggctcagaagcccagcgccgccacgcttgaagcactacgcaacatcgagggcaccgttcgcatgcgtgtcatcagctgacgcagctcatcctcgattgatatgaaagagacccgtcgctgacgggtctctttcataagtgcagggcttcatgattggttcgcaccatggtttgcgaatcactcgcatatcacggtgcatggcattcgcatattattcacgcaaaccatcaatggcgctttggaaatcctccagacctgcaaagttctggtacacactcgcgaatcgaaggtacgccaccacatccaagtcacgcaacggtttcaggatggctttgcccacttcatctgaggtgacttcggcaaggcctcgggagcgaagatcctcttcgactttctgtcccagcagcttcagatcctcttctctgaccggccgcccctggcaggctttacgtacgccggaaatcactttgtctctgctgaatggctccacgccacccgaacgtttagtgaccagcagcatactggtttccaccgtggtaaaacgcttgttgcatttcgggcatacgcgacgccgacggatggaatgaccgtcatcgctaatgcgcgtatcaataactttggtgtcggggttctggcaaaaagggcaatgcatgctctccagaataacgtgtacgggcggaaaaaccatgccgctcgggtttcatttactcaaccggaacaataatgcgctgcccggcctgcaatgttccggactcgagattgttcagcgtaatcagctcatccactgtttccgatacatcatggccagcaggtgtaatagccgaagcatatgaccagagcgtatcccccggccgcacgatatagctggtcacctgcgtggcacccgtatctgattgggcccgctgagcggtaagcgcgccgaaaccacaccaggccagcgccaaggcgatcatcactgcgataatccgcccacgcacattccggcgggacgttccagcatgctgcatagctacacgtgcgctacgggccggggccatcaccattgaaccagtcatcacgaccacctctctcgaacagatgttctatcgaacaactgttcttataatggcacaaatgttcgacacggtcaagtcgaaactcgaacagatgtttgatttcacacgaacaacacgttatgctggtgacataacgaaaggagccctgacgtgagcaccattcccctctcccccaagcagaagccggacgagtccaccctgaccgaccgccagcgcaaagtgttggacgccattcgcacgcatatcgacgaacaaggctttgctccctctttccgggagatcggaaatgccgccgggctcaaaagtccgtcttcggtcaagcatcagctacaagttttggaagacaagggcttcattcgcatgaacgcgaacaagggtcgcgccatcgaggtgatggcaggatccgccccgaatgccgaaaagccatcacaagccagcgaagaggcaaccagcgccagcaatgtggcggagatataccaattccccgccgaagccattgccgaatcacatgacgtaccgctcgttggccgtattgccgccggcgtgccgattaccgccgaacagcatgtggacgacgtcatgcgtctgcctgaacggctgaccggctccggcaccctgttcatgctggaagtccacggtgattccatggtggatgccgctatctgcgatggcgactatgtggtggtgcgcgaacagaattccgccgtcaacggagatatcgtcgccgctctgttggatgacgaggccacggtgaagaccttccgcaaggaaaacggccatgtctggctgatgccgcacaaccccgcatactcgcccatcgacggcacacatgccacgattatgggcaaggtggtcaccgtactgcgcaaattatagcctgttcgccaccagctgatcagcgtgcgctgaatcgcgctggtcgtgctatagtcgcacactgcttacgaaaccccggcctcgcgccggggtttcgtcgtattcagaccatatcgcaaatggtattgagaagcggtttcaactcgatagagcgaaggagtacacatggcccatacccatacacccgcaccatccacatccgtaaaccctgccgcgcaccagcgcaggctgattgccacgttgaccgtcactggttcggtcttcctcatcgaagtggtgtcggccgtcttaaccggctcactggccctgctggtggatgccggtcatatgctcaccgacatgtccgtgctggtggcatccacaatcaccgccatactgatgcgccgcaagcccaacaacactcgtacttggggctgggccaggcttgaggtgctcaccgctgccgcgggcgccgtagtattgcttatcgtcggcatctatgcgttggtagaggccggcatgcgtctgttcggcggctccaaagcggaaatcgacgatatcggcttgctgctgttcgtaggcattctgggtcttgtcgcaaatatcatctcgatcttcatccttgcctcgcagcgcgaagacaacatgaacatgaaggccgcgttcctcgaggtaatgaacgacgcacttggctcggtgtctgtggtggcctctgccctggtaatgatctccaccggatggaatggcttcgacgccgtggccggtgccgtcatcgcactgatgatgattccgcgcgccatcaagctgctgcacaacgcggtcaaggtgctgctggaggaaacaccggatggtcttgatctcgataaggtacgcgagcatctggaagacgtgccgcatgtgcttgccgtgcatgacctccatgccagcacggtgtccaccgacatgccgattcttatggcccacgtggtagtcgacaaagacctcaccatggaagatgccgccacaatcctcacccaactgcaggattgcctgcgcgagcacttcccggtctcggtcccccacaccaccttccagcttgagcccgagggctatagctccccctcctccaacgaattccacgaataaaaaatgctccctctggaagcattcagcagggtataaaaaatcgctgtacgtgtgcgatttttcgtgccgcacaaggtgaaggcctacaaaggtagttcgaaccttgtgcggtgtgaaaggcgctccgtacagcgattttttatcagaagccgaactgggcggcggtttccttcagcgtctcggcggagcgcttcagagcggcgagctccttgtcggagaccggggtgttgatggtgttgttgacgccctgacggttgaggagggtcggcacggacatgcagatgtcggagatgccgtggaagtccttgagcatggagctcacgggcaggatgcggttggtgtcgtgcaggacggcttcgatgatgtcgacgccggacatgccgatggcgtagttggtggcacccttaccgttgatgatcttgtaagcggcgttcttgacttcctggtggatctcctcgcgcttggcggcgtcgagcggatcgtggccgggcagcggggtccagtcgcacatggggacaccaccgatggtggcggactcccacagcgggacttcggagtcgccgtgctcgccggcgatgtaggcgtgcacgttcttgacgttgacgccggtctgctgggcaatcaggaagcgcagacgagcggagtccaggttggtgccggaaccgaagacctggttctcgggcagaccggtgagcttctgagccacgtgggtagcgatgtcgaccgggttggtgatgagcatgtagatggcgttcggagccaccttgaccaagttcggcatgatggccttgaggatgttgacggtagcgccaacgagctcaagacgagactgacccggcttctgacgcggaccagcggtgatgacgaccatgtcggcgtcgcggcagatctcaggatcgtcggaaccgtcgatggacacggtcgggtagaagctggagccgtgctgcatgtcgagcacttcggcttccacgcgctccttggcgatgtcttcaagcacgatctcgcgagcgacgccacgctgggcagcggcgaaggcgagggtggagccaacggcaccggcaccaataacagcaagcttcgtgggcttaacggtagtttccgccatgatggatgaacctctcttcaaaggcggtctgctgatgaatggcaggccttgtaactaacggttttcactctataaacccgctaagacgttttgctaccagcacaccaccctgtctgataacggtatggtaatgtttccaacggttgttagcgctcacaaacaaactgtgatgtttatcacgttagtcaatggactgttcgaccacctgagcggcaagatgggcgtcgacgtccgcttcaagctgtatgccatcatcgcggtactccaccttgtccaccttgccgtattcgcgtacacgagagatcagggagccagcggtatacggcagcagagcgttgacatgcacatgcgggaccggcagcagactttcgaccgcggtacgcagctcgtccaatccctcaccggtataggcggagacgatgaacgcatccggctgcagtgcggcgagtcgttcacgtgtcgcctcgtccgcctgatcggccttgttgaatacgagaatacgcggaatcgaggccgtgccttcgatgtccgccaacacgtcattgaccgcgtcgacctgagagaacgggtcagggtgggagccatcgaccacgtgcaggatcacgtcggcctcggccacctcttccagggtggatttgaacgcctcgatcagctgggtgggcaggcggcgcacgaagccgaccgtgtccacgtaggcgtaagcgcgtccgtcgcgggttttggcgcggcgcacggccgtgtccaatgtggcgaacagcgcgttttccaccagttcggccgaaccggtcagacggttggtcaacgaggatttgccggcgttcgtgtagccgaccacggccactgtgggcaggccgaagcgacggcgtgaaccgcgcttgacctcacgtgccggagccatctcacgaatctgacggcgcagtctggcgatacgcgtgcgaattacacgacggtccatttcgattttggtctcgcccgggcctcgcgatccgatgcccgcatccgcgcctgccgcgcgaccgccggcctgacgggacagcgaaccaccccaaccacgcagtcggggcagcatgtattcgagctgcgccaactccacctgcgccttaccttcacgcgaggtggcgtgctgggcgaagatgtccagaatcaccgcggtgcgatccaccaccttgactttggctgcgtcctccaatgcacggcgctgtgacggcggcaggtcgtcgtccacgataatcgtatcggcttcctcacgcgccacgatgtcggcaatctccttggctttgccggaaccaacgtacgtggctgcatccggcttggagcgatgctgcagcaaaccatcgcacaccaccgcaccggcggtttcggcgagcgccgccaactccctcaacgattcctcggccttggcttgcgtggtgacggcggacgaccagacgccgacgagcaccacacgttccagacgcaccttgcggtattcgacttcggtgacgtcctgcagctcgccgagaccggcgacatgcttgagctcgttgcgggcctcgcgctcctcccattcctggttggcgtcctcgtgccagccggtcgcgcgctggctgtcgtcgagcagcacttcggactgcccggccagcacaccttcaggggtaacgtcgttgttgccgcggtcgatgtcggtgtactgggtgttgtcggtcaagtgcgcctcgtttggttggaatggttcacgattcttctatggtcccttattatcatcacatgaggtgacatgctggcatagatcggcacgtaccggcataggccggctgatacaggtcggcatacgagagcggcgaatcccgcagaaatggagcgaccatggcagaacagtatttctctgcggaacccgcgtcgaaagatgtgcgccgcacattgaacgtaacgttgcgcggtcatgaggcgaccgctcaggtgtcgaacggcgtgttctccggctcgcgcgtggacctcggtacatcggtattgctgaagcatgcgcccgagccgccgcttaccggcgatttcctggatttgggctgcggctggggccctatcgccctgacattggcgtttgagtcgcccgaagcgaacgtgtgggcggtggatgtcaacgagcgcgcgctggacctgacccatgccaacgcacaggcgaacggccgcacgaacattcatgcggctcaggtggacgagtccagcactcccctgcccgccgagaaccagccggcgttctgcgagacggtgccgggcgacctcacgtttgatgcgatttggtcgaatccaccgattcgaatcggcaaggaagcgctgcatacattgcttatggcttggctgccgaagctcaaggtgggcggcgccgcctatctcgtagtgcagaagaatctcggctccgattcgctgatcccctggctggacgatgcgctcggcgaggggttcactgcgagcaaatacgcgagctccaagggcttccgtatcattgaagttcgtcatgaaatatgagtatcctgcagaacttcccgtatctgccgcgcgtgatgagatagccagcgcggtcaaacgttcccaagtcgttattgtgtccggccagaccggttcgggcaaaaccacacagctgccgaagatcctgcttgagcttggccgtggcacgcacggcaagcagatcgtgcacacccagcctcgccgtatcgccgcgcgcacggtggccgaacgtatcgcctcggagatgggcgtgaagctcggtgacgaggtcggctatcaggtgcgtttcaccgacgaaagctcgcccagcacgcgattgagagtcgtgaccgacggtattctgctcgcccagatccagcgcgatccgaaactcacccaatacgatacgatcatcatcgacgaggcgcatgagcgcagtcttaacatcgactttctgctcggctatctgacggcactgctgcctcagcgccgcgatctgaagctcatcatcacctccgcgaccatcgattcggtcaagttccaggagcatttcgagcacgccttgcatgagaaggtgccggtaatcgaggtttccggccgcaccttccccgtgcaggtggtctatgagccgcttggcaccgcgcccgcgttgatgcgcgaagtgccgggattcgcggtgggcgcccgccccggcgacgccgattacgacgagctggccagcgccatcgcggaatccgattccgaccggccccacggccggtccggcgactcctatgccgatgacggcatcaccgatatgcccacggccgtggctcgagcctgcgccgaactggtgatccactcctcccatgagcgcggtccccgcgatattctggtcttcgcttccggcgagcgcgacatccacgagttcgaggccgcactgcggcatcattacggtccgcgcgccgacgacatgcgccgaccggacgccatcgagatcatgccgctgttcgcgcgattgtccgccgccgaccagcacaaggtgttcgaatcgcatttgcatcagcgcatcgtcatcgccaccaatgtggctgagacctcgctgaccgtgcccggtatccgctacgtggtggaccccggttccgcccgtatctcccggtattcgaagaccgcaaaggtccagcgtctgccgatcgagccgatcagccaggccagtgccgaccagaggtccggccgatgcggccgcgtggccgacggcatcgcgatccgcctgtattcgcgtgaggattacgagacccgaccgcgcttcaccgagccggaaatcctgcgtacctcgctgggtgccgtggtgcttcacatgctgtcggtgggcgtggcccgcacggccgaggacgtcacgaacttcgggttcatcgatccgccggatatgaaggccgtgtcggacggtttcaatgagctcaccgagctcaaggccatcggccgaaagcgcggcgaggtgacgctcacccataccggccgtcagctggcgcgcatccccatcgacgtgcgtctgggacgtatggttatcgaggccgcgaaaaccggttcgccgaatcttctggcccaggtgctcgtggtcgtggcgttcttgagcttgcaggacccacgtgaacgcccggacgacaagcgtgaggatgccgaccgtatccacaaccgatatgcggatgagacttccgatttcctgacggccctgaacatctgggatcgcgtgttccaagcggacggcgacccgagcaacaacgcgctgcgccgtatctgcaaaaccgagtatctcagctggctgaggatacgccagtggaaagatctcgtctcccagctacgccagatgtgcaaggagctgaagttcaaggtcggcgacccgctgcccgcctcccgcccaggcttggagattcgccagctgccgttgaatcagcaggccgcgcattcgctgtgctgcgcgtgggatgcggacggcatccacaagtcgatgctcgccggattgctgtcgatgatgggcatgcaggtggtgcgtgagcccaaggcctccgatttcgcggggctgaccggtgcggcgcgcgcccgtgcgatgaaacgcgcccagaagcagtcgaagaacgattatcagggcgcgcgcggcacccgtttcgccctgttccccgcctccgccgtggccaagaagaccccgtcatgggtgatgagcaccgaactggtggagacctctcgcctgtgggcccgctattcggcggccatcgacccggcgtgggccgaaccgttggccggccaattgacccgcaccacgtatgcggagccgcactggtcgggttcgcgtggctcggctgtggccaccgcgcgcgtgctgctgtatggtctgccgatcgtacaggaccgtgccgtgcagtggggacgcatcaatccgcttgaggcgcgcgacttcctgattcgccagggtctggtcgagggcgatattcagcagcgcttcagttacgacgactttgtgggcaaaaaccgtgacattctcgaggatgccgccgatgacgcgagccgcacccgccagctggcggacaccgtgtccgacgaggatctgttcgacttctacaacgcggtcattcccaacgatgtgaccagcgtggccgatctggcgaaatggtggaagtccgagcatgaccgtcagccgaatctgcttgatttcgacccggccaaggtggagcgtctggcatccagcgattcggtgagtctggacgattaccccgaccattggcatacgaccggatcggacggccaacccatcgacctgcgtttgagctacgtatacgatccggccgacccggccgacggcgtcaccgtgcatgtgccgttgaaggcgctctcgcgtatcacgcccgaccagttcacatggaatgtgccgggcctgttggatgagctgattctgtcgatgatcaaggcgctgcccaagcagctgcgcgtccagttcgtgccggccccggatgccgcgcgtgcgattcgtgactggatcgacgagcattacccggatctgccgggctcgggctcgcagcagaagccgaatctgccgccggtggatgaggatggcacgaccgttggctggcctgatttggcacatgtgttcaccaaggcggccatcgccaccaagggtgcgcagattcatcccgaagtgttggggccggaactggtcgagcgtctttccccgtatctcagagtcacgttctcggtggagcagcaactgccggccggcaagcaccctcgtggacgccggcatgcgcgcggccccgtcaaggtgctgggtgtgtccaaggatctgaaggcgctgcaacgcaagttcgccgcgcaggcggaggcgtcggcccgtcaaatggtcaagaagcaggccgatcaggctggagaacagggcaagctggtcagtcaggcgaacctgttgcataaggcgggtgccaccaccgagtcccgggccacgatgctctggcgtggcgcattggatgcgctgcggttgccggccgaacgcatttcgtcgcgctggctgggtaccgaggcgttgatgctggcttctgctccgtacaagtccaccaaggatctggtcgaagacctgcagctggccacggtcaaacggctgatgccgaatgtcgacaggctctcggacgatgaggcgttggccaatgcggtgctcgatgtgcgcgaagtgtacgaggacaccgtctatcaggtggcgcatgacgtgatcgccgtgctcaaggcttatgccga

SEQ ID NO: 194 - DNA, 3634 bp, Unknown
  R101_18m  MAG No. k141_15459
accagaacaggctgttcgcgtcggccttcgccttcgcctcggccttcaggttgtcgacgtacacgcgggccgtctgtccgggctccgcgtggccgtttgcgacatccagcttcgcgtcggtctttgagggcagcgcctccgtcggcgtggccgtaggctcggccttcgtcgtgaaatcgggaacttgcttcaaatagttatcaccactcacgctcctcattgtattgactttagtgttgggatccttgtagatgggttgcgcatacaggataacctgacgaacgtccaccggggtcttcacgcgaacgcccttgcgccacagaacattctccatctgttggatggcttcctgatcgattattagggagtcaccgaactcgcattcgccaccccatgaacccacaccgcccttcaccgaaggttcgcagtacttcgcgttgttcgtgtacgttgtgcttggtgtcaaaccaatcaacggcacattcatgctaccggatgctttaccaccccatgaatccctcgtcattcggaagaaatgctggcccgaaaccttcgcgaacgtagcattcatatcagaccaataaccattaccatcctcacggtatacgcccttatactcctgatcattgtggaaaccgtagatagcatcgtatgatgcagcagtcaactcatcgtcaccagtagcagcatcacagttaaaggagtagaaagcgccctgcccgagagcgccttgataagcctcagccacaggggtgatatccgtgacccgctgcacctccacgctgaagcacacatccttgatctgactcacctgcgctggatcgatcgaatagtcgaacgacacgttcgccgtatgcgcgcccacatccgacaccctcacgttggacaacgtgatcggattgtccttatacgtgacaccgtcatgaacataatccgcgttcgcggtggcgactccgccgaacatcatgcacgcggccacggccaacgcggccatggcctttccgaaacgcctcatggcattcccttctcctagagattcttcaccgcaagagacgaagcgggtctcttgctcctcaaaaacgctaccccccccccggacttggcgcccgactttcgtcttgctagtagtcgaagcccgtttcggggatggcgtcggccatcatgtggccgtagcgctggagcgtgaaggcggcgtccttgtggccgagttcccgcgcgacgatgggcaacggcacccctgcttggattctgctcgaggccgcgtagtgtctgagcgcgtgatgggtccagcccttacgggtcttgctgttgacgcggttgatgggccattcgccgtggatctgcgccacgtagtcgtagatcagggcggactgcttcatgtagttggatggatgctggtagccgcctgtgccctcgggaatcgatgcgtcatacggccagttggggtctatggcgaactcgctcttggaggggatgcccctgctgaccgaggggaacagcaataggttcatgaacgcgtcgatctcctcctgcatggaaggcttgccggtacggggcatggtggtccagagttcgtctaggtgacgccagtagagccagccgagtggcgtgaaacccgcttgccagagggtgcgggcctcctcgtccgtggcggtccagagactggtctgggggtctttgaaccgtggtacgacctcggcgatttgggcgcggtgcgtcccgagcccgaaaccgttccagttgggtaggaaggcgggcatgtggacgattctatcgtggtcgtacttcggggtggtcaggcgcatctgtcccgccccgcctcgtgtgatctgctcgcacacgtgggtttccccacgccaggcggattcctcgcgtggctggccgagctggtagcgcagggcgacctgctctctggtgagaatgtgtctgactcgcagggcgaggacctcgccgatgcgcagtccgccaccggcacctaaagcggtgatgagtcccacgcggcggcagatcatggtcttgcggttcatgaaggccaatcgggtggcgtggcgattggcgtcatccttgatttcctccggtttttgataatccgggtagatggtctcgaacgggactccgttcctgaagcaggtgtcgtccggctgggtgaggccgagccccggagcgaacgccatgcgacgcgcggaccgtttgtgggtggcggattcgggatcccagacggccacggccgggtcgtccagcggattctgctgaagcgtgccgtaagcggtgatgatgagcgaggcgacgagcttggaactgggaatgtcaccacgggcgacgaaatccctgcgtttttcgttgcggctggatctgatgacgatgcagtcggcgtaatggtcggccggacgatgggtccagttttcggcctgttcgaagacgcccttgatgatgcgcttgacgagtattgggaactcgacgccgctgacttggatggcgcggatggatctttgcccgatggcggtgatggactgttcgccgatttccggcttgatgaagcgctggtagacgtagacgtagttggcggccgtctgttcggcgatctggggcttcttggcgtccatccacgaatggaagcactcatcgaaagtcggagggcgcacgccggactccgaatccggaacgtagtcgcccagtatctcggcggccttggccttggcgctgtcgaggctgtctccgccactggtctgccgacgcttgccggtaaccgggtcggtccatatcacgcgccatctcgggaatttctcggtaggcggcaacgcgttcgctctgccgctcaggattttgatgcttttccgtgccataccaaccgccatctgtgtaacatgaatgtgtaacacagccagaataacacagcaaaagccttgtatttcaacgattctagctattcttatgatagttttatcaaaacagcttcgattatcggcaccttcctcgttgcgactaccacgtcgctgaccggcaacgcttcggtgggcgtgctttcaatcgcaatcctgctgatcgtcgccctcatcttccttctcctgcagaaggacccaacgcaagcgtaatgtcacccatcaatcagcaacaggaacgccgaagcagcaataaaacggcagatcctaccgcccgagccgcgacctgaaacaatttagccctgcacaacgcacatattttgacagggcggtagttgttgcaaattctgcaacaactaccgttgataaatcgaacgttataatcagaaactttcagatgctgagttccatgcagtgccccctgtgaccgcaatgcgggcaggtaagcttgcgtgtcttgggcgtgtgtgcggcgaatacgaactctcgcatacccggctggaaggtctcatgacaagccggacataggtactgcacgcgggaacgatagtacttcgtcgccgcaacggcgagcgcaatcgccagcagaacggcgaccggcagcggccaccatacgtctgtcatcacaccgatgacgaggcatgcaatttgcaacaaagtcgcgggcaatccgattgccagcatgaccaaatatgtggtgcgcagggaatgagtggttgtggtgttcataacggttgccatgtcggttaatgttg

SEQ ID NO: 195 - DNA, 37239 bp, Unknown
  R101_18m  MAG No. k141_15691
cgaattggcgcgtatcgcccatgtggtgtggtcgtttgcggacatattgcgtaggggagcgctatagggagctcacagaaattcggtcctgctgagaacaaggtgaggcttacgcgccgtcaaacgcacatggtgatttcaaaaaatggcgaattgctgccattcttgcacctgtgcgtttgatgggaaatgtgcgtatgcctcacattttttgcataaagcatgaaaatgtggcccgttgtctatttgaaagtgcgacaccctttagattggagattgtccagataaccagtgaaggggtgtcgcgccttgggtcaagtgtattcgcacctgtcggaagaggaacggcggatcatccggatagagatcggcaacgggacgagcatacggcggatcgccggcctgatcggcagacacgcctccacggtcagccgcggaatcaaacgcaacacatggttcccgtccaacgagaacgaatcctaccggccgtaccggccggagcgtctcaagacggggccgtggaccggccggtgccacatcgccggccccgcgcaccggaaggccggacgccgccgcgccgggaccggcgtcacgcacgacaacggcgccgagttcgcccgccacgcggaactgcgcgaacggctcggcatggccacctacttcaccgccccgtacccgtcgtgccggcgcggcggcaacgagaaccgcaacggcgcgatccgccgctacctgcccaagcgcacgcgcgtcgacccgtccatggccgacgagatacaggccatcgtggacgggatcaacgaccgtcccatgcgcgtgctcggctaccgcaccccggccgaggcactcgccgacgaactactatcattaaccgaacaacaaggatgttgcacttctaaatagacaacgggcttttgtgctgatatagggatttgtgctagtcgaatccgcgaaatgttcagtaaatgttcacgtagcgaaatcggcatagaatgcgagcaaacgcataacggcacggtgctgttcctgcgtacgccaacgccaggcgaaccgccggaaagaaggggtctccatgattgagacagcggacgatatcaagacgattgcgaacgtcggcacgggaacaatgggccatgcgatcacgttgcagttcgcgctggccggatatccggtgcatctggtcggccgcagcgaggcctcgctggagaaggcgatgaaggcgatccgttctgatgccgaggacttcgccgaagccggactgctcaaggccggcgacaccgtggacacggtgctggcccgcatcaccggttacgccgactatgcgagcggcgtggcggacgtggacttcgtcatcgaatccgtggccgagaaccttgacatcaagaagtccgtctgggccgaagtggagcacgccgcccccaaggacgcgattctgtccacgaacacctccggcctgagccccaccgcgctgcagtcggtgatggggcaccccgagcgcttcgtggtggcgcacttctggaaccccgcgcagttgatgccgctggtcgaagtggtgccgggtgaaaagaccgatccgaaggtggtggacatcaccttcgacctcatggccaagatcggcaagaagccggcaaagatcaagaaggaatcgctgggctttgtgggcaaccgcctgcagctggccgtgttgcgcgaggcgttctacatcgtccagcagggcatagcggacgcggccaccgtggacgacgtgatgaagtacagcctcggccgccgctggaacctggtcggcccgatcgccagcatcgacctcggcggactcgacgtgttctacaacatcagcacctacctgttcgacgacatggacaacggcaccggcccgagcccgctgctcgccgaaaaggtcaaggaaggcaacctcggtgccaagaccggtcagggcttcttctcttggcagggcgaggacggcaagcgcatcatcgaaacccgcaacaaggccctgctgcgtgcgctgaaggacgatgccgcggaagcgtaaagcgcgagcgacgaattctcgcgtaacgtgtgctacgatggaaggctcccttcggggagccttcgttgtgcttgcgttgttcttcggtccaacttttcgacatgcgtatacgttgttgatagcgacaattgcggaaaacgcttacagtatgatgtgcacacggacaacaagccgatgattgcaaggagcggtgacgacgatgacatccacagaacacaatacgcgagccgacatgttggcccacatgggcagccttcagcaggccgcctacgtgcgcccgatcgagtaccaggagggccgtgcccacggtctcaaggccatcgaggtgaagaacggcccgctacgcttcgtatccatggccgaccgcgccctcgacgtctgccagttcgaataccgcggcgagaacctcaccttcctgtccaagccgggcctgaacggccgcaaccagttcgacaccaacgggctggaggcgcagcgctccatcatgggcggcctgttcttcacctgcggcttcgagaacatctgcgcgccgtacgtcacgcctgagggcggcaagtacccggccggcagcttcccgatgcacggccgcatccgcaccacgccggccgagcatgtgggctccgacgcccactggaccgccgaaggcgactacgtgctcgaggtctccggcgaaatgcgcgaggccgaactgttcggcgagaatctggtgatgcgccgcaagatcaccagcgtgtacggccagccgtcgatcacggtcgaggatgaggtgaccaacgaatccttccgcgacgagccgctgatgtggatgtaccactgcaacttcggctggccgttgctcgccgaaggcgccgaagtcgtgatccccagccgcaaggccaccccgcgtgacgagaccaccgcagccgacaccacgccgtggaacgaaatccaagcacccgaggcgaaccgccccgaaagcgtgtacctgcacgagctcgccgccgacgagaacggccgcagcttcgccgccgtggtcaaccgcaagctcggacttggagtcgtcatcgacttcgacgccagcctcttcccatacttcatggaatggaagtcgatgggtgcgggcgactacgtggtcggcctcgaaccctcgaactccagcgtccacggccgcggctggcacgagcagcgcggcgacctgcacaccatcgccccgcagaccagcgaacgtaagtccctgaccttcaccgtcatcgaaggcgaggccgcgattgacgggctcatcgcccgccgcgacgccctgcttggctgaattgtgagataatatcggccgatatgtgaacggctgattagcgtggggagcatggttacccgggattcggaacagtatctgcgattcaaacgggagcacacgctgccctcgcatgaggcgattatggactggtatcgcggcaccggcatgcgtccgtatctgcaggcgcttgacgacgccggccgcaagaagttcgaggccgaagtgttctcccaagtccgcgaggaataccccacacagtcggacggcagcatcatcttccccttcccgcgtttcttcttcctcgcgactcggtagaagctcgccggattcgtgtactgggcggcgcgacctgtttcccgcgccgccagctgtgggttgacctcgctactgggcttgcggtgatgccgctggctgctgcgctgcttccgattgcgatggcatttgcatatgcggtgcgatgctggggagtgtgccgtcatgcatgcactgcttcaatatgaggtctcgctgggcgatgaggtcgtcttcgatctggtcacgcacgtcgcgcacggacgagaaatacaggtagaacgtggcgtgattgtagcctgcgagttcggtgatctgacgcaccgagatcttctcgatcggcttggtttcatacagcttccagaacgcctccttaaggcgattgaccgtctgctgcgtaagttgcgggttcttcttgattgcgattcgcggtatggtgatttcgcataagacgcacaaccccatcgactcgtcggtcaaattcgtgaccttctcgatgcgatgctgtcgctggtggtcacgcaggacgtgctgttggaatcccagggaaccgcgcacgcggcgcaatcctcgggactgttcggcatcgggctcggcgtggtggccgtgatcatcggcctgtggatgttgctgagacgtaagtggacggcaacggaataggaatagtgacagcggaatagcgcgcgtgatattggtacgcgacgtatcgtaaaagcggctacaatacttacggcaaaagtctttgcaacgagaaggaagacatgactgagcggcgtcgagcacggatgaggattcgtcgtcaacgaatttacgttgtacggcgcattgtggttgcggtatgcgcattgttgtgctgcgttcttgccgtcttctcgacgattgacgcccaacgggtgtggccccgcggtgagtcggtcgcacaggggcaggcagaggttcaggggcaggcgcagaaggtgagtcaatccgcgcaacagtcggcatcgcgagtgtctgcatcggcctcatccttgagccgccagcaggtaccggtctttaaccaggcgattcaggagcagcgtgacaaggaagcgcaacgtgcgcgatggacgaatcccaccggcaagcagcctgatttgtcgcaatactccgatctcagcgtgaaagtcagtatcgccaagcaggaagtgtatgtgcaatccggcggtgagaccatctacacgatgatcgccagcaccgggctcaacgatacgaccccgcgcggcaactatgttatcgggatgagaggcgatcacttctacaatcccgcagaaggcatgggtgctgattattgggtgcgattcaacggcccgttcctcttccactcggtgccgaccggggcgaactccggcgagtatatggaagaggaaggcaacaagctcggtcagccggcctcacatggttgcgtgcgactcactgtggccgatgccgaatggttctacaaccaaattccggaaggcacgccggtcaccatcgcctgaggcttggcctgagatcgatactgaggctatcgtgctttaggcgtctgatattggtcgtcggtagtgaagcaggtgcgatagaccatggccatgatcagaccgtcggccagcaaggtcagcgcggcgatggcaccgaagaccacgaactggtatttggcggcgttcagcggatctccgccggctatcacctggcccgccatcatgcccgggatggtcacgatgccgctggaggccagcgaagcggtggtgggcagcagtcccagccgaatcgacgagatgatggatgggcgggcggactcccatgccgtcgcccccaaggccagcatcatatccacctcgtcgcggcgttcctccatgctttcatagaatcggctcagcccgacagcaagcgcggaaacggtgttgcccagcagcatgccggtcagcggcaccaccagctggggcgcataccacgggtgcgggcgcacgatgagctcggtgaccaacgccagcatgagcagcatcgtgatgaccaggctcaggaagatcggcccggcaagacctttggggatgccgcgcgcgcgggatatcacgatctgcaccgccgcgaccagcatgaccgccatcagggcgaacaccatccacacgctgttcgaacgaatcacgtagctgatgatgaatcccatggcgcacagctgcacgagggcgcggcatgccgaccacatcagggtcctgccgatgcccatgtgcatgagttcgctgacgatggccgccacggccaccatgcccaacgccagaacaagaccccaggtgtcgatgtcgtaggcgccgttcatggttgcacctccttgtcccgcgtcagatcggtgagccgtcccgcatcgagcatcagcgtgcgggtggcgcgtccgtccggcggacggtgtcggatgcggatgatcgccatgccgtgtgcggccgcgtccgccatgatcgcggccactttggacgcgttgtcgtcgtcgagtccggcgtccacctcatcggccagcagcaccttcgggtcggtgagcagcgtgcgggccaacgccacgcgcgccgcctgaccgcccgacaggtcatgtggcgcgcgcgccaggtcgatgtcctcgcagcccatcgcgtccaacgtcgtgcggatgcgctcgtcgggcagcagctgctcggccctgccccccttgcctcgaatcgcgagcgtccagggcaggcggatcgcctcggccacgtccttgccggtcaggatcggtttttgcggcagataggagacgtcccgccgccattgctgcgcgctgaattcgtcgctgcctacgccgtcgaggacgaacgtgccgtgcgcgtgcgggttgagtcgggcgcatgcggtcagcagactcgatttgccggagccggacggacccaccaggtcgatgatgtcgccgcgttccatgctgaaggacaggttgtcgaacaccgtgcgttcgtcatccgccggcgatcgcgcggggatgacgcaggacacggatatggcttcgaagaaggatcgcatattcatccagtctagtcgggggccacgtgggaaaccccagcgttcacttcctgtatacccggtgtggcataatagccaaggcaatttttgggctttgcctaagctagtttgaatttgaaataggtgaataacgtggcacagactactaacgacatcaagaacggatccgtcctgaacctggacggccagctgtggaccgtcatgaagttccagcacgtcaagccgggcaagggtcccgccttcgtacgcaccaccatcaagaacgtgctctccggcaagatcgtcgacaagaccttcaacgcaggcatgaagatggaattcgagaccgtcgacaaccgcaccctccagtactcctacgaggacggcgacaacttcgtgttcatggacatgaccacctacgaccagatcatggttccgaagaccctcgtgggcgacaaggccaagttcatgctcgaaggcaccgactgcctggtctccttccacgacggcaccccgctgagcgttgacctgccgggctccgtggtcctgaccatcacccacaccgagccgggcctgcagggcaaccgctccaacgccggcaccaagccggccaccgttgagaccggagccgagattcaggtcccgctgttcatcaatgagggcgaccgcgtcaagatcaacaccgaggatggttcctacaccggccgcgagaacaactgatctccgcatcctcaacagacgaccgaccgtataaaggactaggacagcagcagtatggcacgttccaccgcgcgcaaaagggctctgaacaccctgtacgaagccgacgaaaaaagtcaggatattctcgccctgcttgacgagcgcatcgcacatcccggtgcccagaccccgcttcccgactatgccattgaaatcgtcaagggcgtggccgagcaccgtcgtcagatcgacatgaccctggacgaacactccacgggttggaaggtccgccgtatgggcgtggtcgatcgcaacattctgcgtatcgccgcttgggagattctgttcaacgatgatgtgccggacaaggtcgccatcgacgaggctctggcattggccaagaccctgtgcgatgacgattcgcccgctttcatccatggcctgctgtctgcagtgtgcaccgccaagaacgcagcaccggcaccggagtccgcggcagaagaggccgatgaggaatcgtccgattccgatgccgccgcatccgagccgaccgatgagggcgatgtttccgattcgcccgattcgtccggtgcatccgacgagcctgctgccccgtccgctgagattcagccgacggtcgattagtcatttgttgttcagcctccccattcgggaggctttttcatgggcggacacttgtgtcgccacacattctcaagtcggcaccttgccgacagccccgccagcggggtgagactttgcgcccaacggcgtgtgagtctgcgctggccgttaaccttggtacgaatacccgaaaaacataagggggttttggtgagccagaacgagtccgggaccatcgcaattccgatgtatgacaaggacgatgcagtcctcgttttggaagacggacaggtatatgtgggggagccgtacggcgccctcggtgagacgaccggtgagatcgtcttcgccaccggtatgaccggataccaggagacgctcaccgatccgagctacgatcgccagatcgttgtgcagacgttcccgcacatcggcgataccggcgtcaacagcgaagaccctgagtcctcccgcatctgggttgccggatacatcgtgcgtgatccctctccgaacgtgagcaactggcgtgccgaaggcagccttgatgacgacctcgccaagaacggcatcgtcggcctgagccacatcgacacccgcaagctggtgcgtcacctgcgttccgcaggcgtgatgcgcgccggcatcttctccggcgacgccctgaccgaccaggccaccggcgcgctcaagaccatcgagcagctgctcgaagacgtcaagaacacaccgcagatgcagggcctgagcctgtacgacgaagtgtccaccaagcaggcctacaccatcgagccatgcggtgagtacgaaggcaaggagccgctgtacaccgtggccgccgtggacctcggcatcaagggcatgaccccgcaccgcatggccgaacgcggctgccgcgtgcacgtggtgccctccaccatcaccttcgccgaaatcgagaacctgaacccggacggcgtcttcttctccaacggcccgggcgacccggaacaggccggccccgaaatcgagctgctgcgccaggtgctcgacgccggctacccgttcttcggcatctgcttcggcaaccagctgctcggccgcgcgctcggcttcggcacctacaagctcaagttcggccaccgcggcatcaaccagccggtcaaggatctgaccaccggcaaggtcgaggtcaccgcccacaaccacggcttcgcggtcgatgccccgatcggcaagcaggtcgacgcgccgtttgaaaacggcaagtacggcaaggtgctcgtctcccacatcgatctgaacgatgacgtggtcgaaggcctgcagtgcgtggacatccccgcattctccgtgcagtaccacccggaggccgcagccggtccgcacgatgcggcctacctgttcgaccgtttctgcgaacttatgaagaacaactccaaggaaggtaagtgatatgccgaagcgcaccgacatcaaatccgtgatggtcatcggctccggcccgatcgtgatcggtcaggctgcggagttcgattactcgggcacccaggcatgccgcgtccttcgtgaggaaggcatccgcgtcatcctcgtcaactccaacccggccaccatcatgaccgacccggagatggccgacgccacctacatcgagccgatcgccactccgatcctcgagcagatcatcgccaaggaacgccccgacgcgcttctgcccaccctgggcggccagaccgcactcaacgccgccatggcgctgggcgaggccggcgtcctgaagaagtacaacgtcgaactgatcggtgcctccctggaagccatcgaccgtggcgaggaccgcgaactgttcaagaaggtcgtcgacgaggccggcgccgaatccgcccgctccgacatcgcccacagcatcgaggaagtcgacaagatcgccgagaagttcggctacccgctggttgtgcgcccgagcttcaccatgggcggcctgggctccggcatcgcccacaacgaggaggagctgcaccgcatcgccggcgccggcatccattactcgcccaccgacgaagtcctgatcgaagagggcatcgagggctggaaggaattcgagctcgagcttatgcgcgaccgcaacgacaacgtcgtggtcgtctgcccgatcgagaacgtcgacccggtcggcgtgcacaccggtgactccatcaccgtggccccctgcttcaccctgaccgaccgcgaataccagaagctgcgtgacatcggcatcgccatcatccgcggcgtgggcgtggacaccggcggctgcaacatccagttcgccgttcatccgaagaccggccgcatcatcgtcatcgagatgaacccgcgcgtctcccgttcctccgcgctggcctctaaggccaccggcttcccgatcgccaagatcgccaccaagctggccctcggctatacgctcgacgagattcgcaacgacatcacccagtccacgccggcctcattcgagccgaccatcgactatgtggtcaccaaggtgccgcgcttcgccttcgagaagttcccgggcgccgaccccaccctgaccacctccatgaagtccgtgggcgaagccatggccctggccggcaacttccaggagtccctcggcaaggccatgcgctccatcgacaagcgccacatgggcttcaactgggatggcgagaagccgtccgccgaagaagtggccgaactgcttgaggccatccacaccccgaccgaacaccgttacctgcagctcatgcgcgccatctggggcggcgccacgctggagcaggtgttcgcggccaccaagatcgacccgtggttcctgaagcagatcttcctcatcaacgagaccgccatgacggtgcgcgaggccgagaccctgaccccgaagctgctcaagaaggccaagctcgccggtctgtccgacgtgcaggtggcccacctgcgtggcttgggcgatgaaggcgagaacaccatccgcgagctgcgctggacctacggcctgcgcccggtctacaagaccgtcgacacctgcgccgccgagttcgacgccgccacgccgtactactacagctgctacgccgacgaaaccgagctgcgcccgcgcgagcgcgaggccgtgatcatcctcggctccggcccgaatcgcatcggccagggcatcgagttcgactacacgtgcgtgcacgccgtgcaggagcttggcaaggactatgacaccatcatggtcaactgcaacccggagaccgtctccaccgattacgacatgtccgaccgcctctacttcgagccgctcaccttcgaggatgtgctcgaaatctacgaggccgagaagaggatgggcccggtcaagggcgtcatcgtccagctcggcggtcagaccccgctgtccttggccgcgcgtctgaaggccgccggcgtgccgattctcggcaccaccccggaatccatcgatctggccgagaaccgcgagctgttcggcgaggtgctcaagaaggcggagatgaacgccccgcgttacggcaccgccctgagcctcgaagaggccatggacgctgcccaccgcatcggatacccggtgctcgtgcgcccgagctacgtgcttggcggccgcggcatggaaatcgtctacgacgacaagcagctcaccaagtacgtggaccgcgcgcttgccgaggccaaggccgataccgtggtctccggccgcctgccctccccgctgctcatcgacaagttcctgcaggacgccatcgaaatcgacgtcgacgccctgttcgacggcgaggaactgtacatcggcggcattatggagcacgtcgaggaggccggcgtccactccggtgacgccgcctgcaccctgcccccgtccaccctgtccgacgaccagatccgccgcctgcgcgaaggcacctacgccatcgccaagggctgccacgtgcagggcctgatcaacgtgcagtacgccttcatggccaacacgctgtatgtgatcgaagccaacccgcgtgcctcccgtaccgtgccgttcgcctccaaggccaccggcgtggcgctggccaaggccgccgcccgcatcatggccggcgaaaccatcgccgaccagcgcgccaacggtctgctgctgcccaagggcgacggcggcgacatccaccccggccagcaggtcgcggtcaaggaatccgtgctgccgttcaagcgcttccgcaccccggtgggcaagaccgtcgacatcctgctcggacctgagatgcgctccaccggcgaggtcatgggcttcgaccgcgacttcccgcacgccttcgccaagagccagctcgccgcctacgatggtggcctgccgacccacggcaacgtgttcatttccgtgaacgacaccgacaagcgtcagctgccgctgctcgccgtgcgcctcgaagagcttggattcaagctctgggccaccgagggcaccgcctccgtgcttcgccgttacggcatcgagtcgaacatcgtggacaagatcagcacccgcgtggacaccgatccggaagccccggtcgaggtgcatcacgccgccggctccgtgggcaagaacgtggttcagctcattgaggaaggcaagatcgacatgatcctcaacacgccgaactcgcgcggctcccgttccgacggctactccatccgtgctgccgctattgcagccgatctgccgcagtttaccactatcaccgagttccaagccgcactgctggctatcgaggccgtgaagcataatgattatcagatcatgagcattcaggagcattcgaagcagctgttcgaattggagcgacgggagttctgatgactacacccagcagtgaggaattgcaggcacaacgttcggatttcggtctgcgactgagcaattcaatggccaaatacggaccgctgtgtgtgggcattgacccacatcgcaagctcctcaccgactggggatacaacgtcgacgccgaaggcgccgaactcttctccatgcgtatgctgcaggccgccaacgggcgcgccgcagcagtcaaattccagacgtcgatgttcgagcgctacggagccaaaggtttcgaagcgctcgagcgcgtgctctacgcggcacgacaaatgggcgtcatcaccatcgtggactgcctgcacggcggcctgtccaccacgatttccgccatcgcagacgcctatttcaagcccggtgcaccgttgctggccgacgccatcacgctgctgccgtactatggcgcgcgctcgttgaacggcttgattaccgaagcgttggaaaacggacgcggcgtgttcatcgcctccctgacttccaatccggaaggcatgagtctgcagaccgcgttgcgccagagcggcgattacaagggacgtaccgtggcctacggcatcgcctccaccgcgcagaagcataacgtggatatcgaaggcatgggctcggtgggtctgatcatcggtgccaccatcggccaatggatgcaggattccggcgtggacccctccaagttcaccggtccgattctttcccccggttacggttggcagggtgccgaggccaaggatctgaaaaccgtgttccgcggtacgcgcggcaacgtgctggttaccgtgtcccgctttatcgcctcgcatgggccggatatcgccgcactgagccaagctaccgagtcgattgcgcttgacgtacgtcagtcgctgatggaagccactgccgaaggcgcagaaaaccagtaatcagaacggaatcagatgtcgcggcatgcgtacgtatctatctcattgcatacgtcgcatcacgattcatattcttccctgttcgtcggggctgtaacagttaccggtcatctcgccggtgagccgttaccacattggattcataatcgctgcacaccacatcatctccggaggaacccatgactgaaaacacccatgccggccgtctaatcgtcctgactggccctaccgcagtaggtaagggcaccgtggaagccaagctgcgcgccgaccaccccgaagtgtgggtgtccgtctccgccaccacgcgtgccccgcgccccggcgaggttgatggcgtcaactactggttcctcaccgaagacgagttcctggcccgcgaagcggcgggggagttcctggaaaccgccgtggtgcacggcatggcccactacggtacattgctcaagcctgttgaggagcatctggctgccggcatgccaacgattctggaaatcgatttgcagggtgctcgccgcgtcaagcagcgcgccgccgaactcgacttggaagtggtgtacgtgttcatcgcgccgccgagcttcgaagagctcaagcgccgtctgatcggccgcggcaccgaaaccgccgaacagcaggcccgtcgcctggaaaccgccaaagtggagctcgccgccgaaaacgaattcgacgtcaccatcgtcaacgaaaccgtcgatcaggccgccgccgacctctggtccgtcatcgccaaggaatacgggctgtaacgtgtgcgaataggttctgttcgtactgagatgtccatgcttggcatggcgtgctcatgtgattatgcgtgttcagtccctgccagtcggccctcacaatagggggagagcctgacggcagggactgattcataccgatacaaaggggcatgagcccccatttgtgcgtcaaccgtttgatatgcaaatgggggcacatgcatgtgtgcgccatcttccaaaaacgtcgaattatgcaaatggggggcacgaataggtgtcggcgtgatgtggtgtggtgcgatgctgcaggtgcggtgtgacatggtgtgggatgccagcggatttcgggtgtttttcctctggcgtcccacagaacctgatgtacggtgtcgtcaccggtttgtgggattggcagaattccaatggttctgtggaatggggtgtgggatgccagccgtgtgcatcgtttgacgtgcgtggcgtcccgcacggttgcgggacgccggccccaaattggccgctaaccgtgtggtatcccgcatttctccgatatgcgagaggaatccgtccactataaggtctctagcccagcgactaatagttttcctctatgtgcgaataatacgggctgtaactaccgctttaccaccaactgctggtggaggatttcggtgctgtttttggccggtgcctgcttccaacggatcgcttcggattcgtgatgctcggtgacataatgccgcatccattcgaagcactgctgggtttggatggcatcgcttaatgcgcggtgctcctcattgtccgcgatgccgaagcgtacgatcaggtcggccagacggtgatgccgctgcgcggggaacagggcgcggctgatctgcatcgtgtcataatccgcgcaggcaaagccgcagccggcgatatgctgggtgttgtaatccaggaatcgcagatcgaaactgacgttatgaccgacaatcggctcaacggcgggactggcagccggggtagcgagccatgcgatgaatcggggaagcacctcgtcaatcggatcgaggtcggccaccatcgcatcggtgatgccggtcagcgtggtgatctgacgcggaatcggccgcaagggattcaccagctgctggaattgatcgacgatatgcccctcccgcacgcgcacggcaccgatttccgtgatggcgcaactgttcgggtaaaagccggtggtctccagatccagcgccacataatcggtggggaagagggcatcgtccatggcgattcgcccgccggcaccatgattgggctgggatggttgggcgaaaacggtaatgccggaagtggtcacggaggctcctcatatcagtcggtgttcggtgacttattgtaccggcagcccggtctgacggtaaaatttttccctcccggattttctcggatatattggttaggcggccggcaacatgcggcgcatcgggaagggagcacagctgatgaaacagatagtggcaggcatcgtggcgcatgtggacgcgggcaagaccacgctgtccgaggcgctgctctaccgtaccggtgagatccgcaaattggggcgagtggatcacggcgatgcgtttctggacaccaattccttggagaaggcgcgaggcatcacgatcttcgcgcaccaggcattggtggaacacggcgacctgcgcctgaccttgctggatacgccggggcacgtggacttcgcagccgaaaccgaacgtgtgctgcgtgtgcttgactacgcgattcttgtggtctccggcacggatggcgtgcaaggccataccgagacactatggcgtctgctggccagatacggtgtgccgacgttcatcttcgtcaacaagtgcgacgccgccggatttgcccgcgaggccgtgttggctcagttgcgcaggcgtctgagcgatgcgatatatccgttgccggcaatggaacagtccactgagggcagcgcgctaccgttggacgcgttcgccgaagacatcgccaccctggacgaggaggcgatgaacgactatttggaacatggcgcgctgtccgtgggcagattgcgatcgatgatcgccgtacgcgagctgttccccgtatatttcggctcggcattgaaactcgaaggggtcaaggaattcctggacgggctggagacgttcacccgcgaacgtgaatggccggccgccttcgccgcacgcgtgttcaaaatcgcccacgacggtcagcacaaccgtatgacgtggctgcgcgtcaccggcggtgcgctcaaagccaaggagatcgtctcctcatcctcgtgcgccgcggcgtcgacaccgtcgccagcgcaggaggatgatgacatggcgtggtccgagaaagtcgatcaggtgcgcatctacaatggcgccaaattcgagacggtcaccgaagtgccggccggcttggtatgcgcggtgaccgggctgacgcaaacctcccccggcgaagggctgggaacggaaccggacgccgaatcgccgtcgttgcaacccgtgttgacctacacggtgttgcccgtcggagcggaatccgatacggccggcacctcgggagcggccaaacgtgggggagccggccatgacagcgcgaatcaggacgatgccgagcatgatgccgccaagtcgggaaccggccgcaatgaggagaacgacaccgccggccagaccgcggcggacaatagctcgccggcccgtccccagttcgatgatctgaccttgcacaaggtcatcaccgcattgcgtgagctggaagacgaagacccgttgttgcatgtggtgtgggtggaacggctggccgagattcatgtgcaattgatgggcgcggtccagctggaaatcatccagcagaccctgcacgaccggttcggtctggatgtgtcctttggccccggctccatcctgtaccgtgagaccatcactgcgccgatcgaaggcgcaggtcatttcgagccgctccgtcattatgccgaagcacatatcctgctggaaccaggggagccgggcagcggagtcactgtggcctcggccctgtccgaaaatgatttggaccgcaattggcaacggctgattctgacccacctgaccgagcgtgagcatctcggtgtgctcgttggcgcaccgctcaccgatatcaagatgactttggtggccggccgcgcgcatctgaagcacaccgaaggcggcgacttccgtcaagccacgtaccgggcgattcgccaagggctgatggaagccagggcaggagtcagtggccggcccgagacgccggtcgagagccggccggacaccacaggggagggcaactgccgactgctggaaccgtggtaccggttccggctcgaagtgcccgcagacatgatcggccgtgctatgagcgacatccagcgcatggccggcagcttcgaatccccggtcaccgatgacgaatacgccgtgatcgaaggcgaggcgccggtgtccgaaatgcgcgactatgcgatggacgtgaaccagtacacgcacggccatggccgtttctccgccaccttcggcggctacaagccatgccatgacgccgaacaggtcatcgcagccgccgcctacgatcccgaagccgatctggacaacacccccgactcggtcttctgcgcccacggtgccggctaccccgtcaaatggtacaaagtccccgaattcgcccacgtagactacgccatgtgaggtggtgactaccaaatctgcggccgaatgaatccgttggcctccaagaatcgctgaatatcgcgcatttccggcatattgatcgaatgggccatgcccggatacacttgttcggtcaacgtgccgtgctcgcgccagaacttacccatcgccgccacatcggctttcgggaagatgtcgtccgcgacaccatgcccgtagaacacgggcggcttcaacgaagccaattcggcatcgcccgcaacggaccccggtgccagccatccagagcaggagacggctgcggcatatcgcttcggattgaaacgcagcagatgtgcggccaagaggccgccctgcgagaatcccatggcaaccaccggccgagtggcgggaatatgctccgcaacccatgcatcaatggcttgggcggcctcagccgcctgcttgtccaatgattcgccctccggcacaccttcatgcgcccacgcaccgaaccatgtatatcccatgccataggcgatgggtgcctgcaaactggcataatcagccgaaccggcaccgcaatagttcagcagatcgggcaaatcgtattcattggaaccccagccgtgcaacagcacgaacaccggggtggtttcaggaccggtcaaacgggtcaaggccttggcaatcttcatggctcccagtgtagccacgtgaccgccgcgaccgcatttgaacggtccataagcaacccatatagcaacgccgttccattcaagtgtccgatacgttatcgtcgtagacgtgccgcacggggaacggcctcgtgcacagcagccatagagaacaccataaagggggtgcacaatgaccaggttcaatactcagctcgtccacggactgccggttggagacaacaacaccggagccgtgaacccgccgatctacaactcaacgacatatgccttcgagaaggtcgacgcgatgccccgctatgactacgcacgaagcggtaatcccacgcgcgacttcctggaaaagcagatcgcacaactcgaacaaggcacgcgaggcttcgcattcgcctccggacttgccgcgattcatgccgtgctcagcattttcaagcccggcgaccgtattattgtaggggacaacatttacggtgggtcgtattcgcagctcaatgagttctttacccgttggggcgtcgtggtcgagtcagtcaatacccaggacattgcagcgttggaggccgccgtcaagggcgaccgcgcgaacggcatcgcgcctgcgcaagccgtctactttgaaaccctgaccaatccgctgctcaaggtcaacgacgtacgcgccatctccacggtggcccaccgttacggggcgctgtcgatcgtggacaacaccttcgtgaccccgtacctgcagcagccgctcaccttgggcgcggacgtggtcatccactccgccaccaagtacctggccggtcactccgacgtcaatgccggtctcgtggtcgtctccggtgaggatttggccaatcgcgtgtacttcgcccagaaccgtcttggaggggtactggcgcccactgaatgcgattcggtgcgccgcggcatccagacgctgggcctgcgcatggaccggcagcaggagaatgcgaatgccatcgcgcggtacctgctcgcgcatccgctggtcaagtccgttcattacccgggcctgccgggggccggtgaccagcgactcgccgccaagggactcaagggcgccggcggcgtgctgagctttgaagtagtgcctggcgtggaccctgcggatgtgctcaacaacctgcacatcttccgattggctgtgtcccttggtgccgtggaatcgcttgcggaactgccttgccgcatgacgcatttcgaactgccccgggaggagcgtctgaaggtcggcatcaccgatgagctggtgcgtctcgccgtcggcatcgaggatgcgaacgatctgatcgaagacctcggacaggctttcgatatcgcctatgcccggtacagggaacgtcacaccgactccgatgtattcggcgcgttgactccgaaggtgttcgcctgatgcgatatggccgtatgtgccgttacgatggacgcgatgagacggccgcggacgaagcgcggcatgcggaaaggacatggcatggccattgatgtgtacggcaccacatggtgtggtgattgccgtcaggcgaagaacacgttggatgagctgggtgcggcgtatatctggcataacatcgaagaggaggacggtgccgccgatcgtgccgtggccatcagcggccagcagcatattccggtggtgctgtacgatgatggctcctttcaggtggagccctccgccaaggacatcaggaacaagctgcgggagttgaatctgctgactgactgactggcagggccctcttacggcatgaggcgtgtgccaccgttggattggtggcacacgcctcatgcgttgttgcggttgtgtgtggaccgtacttgcaggcttctgaatcgcgcctggccgatggtcacatcgaaggatttgccggcgggggcgtcgtactgcaattcggtgatggcgttgcattgaccctggacgaagcgccagacacgatgccctcccacatcgagatcgaagtagtgctcatcgggccggtcggcgtccccgccctccgtgagacccaaaccaaacacgtcggaccagtgcgcggccaccgccgcggggtcgggcaccgcgaaaatcgcgcgacgggtgtccacttcgccgatggcatgccggtgcagcagtccgccgctctcgtagcgggccagttgctcggattcgctcgcaccccaatcgatgacgaacggatagcgcaggccccgatcatcgcccttgatccatagcaaccgccagcgtatctcctcaccggcggccgtcgtgcgattgcccggaacgatatggccaagatcaaggcctttggccgtgagccgttcggccgcctgttcgatgccatgcacgtgcaatgccggacgatagaatcccacatactcgggcagtagctccccggcttcatggaatatcagcccatggtccggcgtctccgacaaggcttcctcgcggtcgtacaatgccaggaactccaaatagttatcggcgaagtaggccagggagttctccgtgccatgccccacgtgcttgccgccgtattgggaagtcagccctgcgtcggcgaacgtccgttcggcggacttgaggtcattcacgaattcgaccgtatggtcccaggtgaattgttgcgtcatgatcggctcccgcctttactttgcatcgccgccgagcgccgtggtgcgctcgaccgccgccagcaccgcggattgtatggatgccgcgaatccggttttgttcagggtatatgcctcggtgattcccactccgccgggggagttgttgatattgagcagcacttgaggcagcacgtctttctgtttgaggaattcggtgccgccgatgatggtgtcgagcgcgatggctctggccgcgtcccggggcagaccggccagcacgccggcatccacgtaggcgtcgatgaaatggtagacgatgttcggcgggtaaaaaccggtgattacgtcgataagtcgttcctcgacatacagcactttgccgaaagtgttgaggaacgcatccacgtcctcgcgtgccgcggccccattcagcgccacgccgctgtaaccgtaatccacggtggtgagtgtgttcgggatgatgcgggccacacgccacccatggccgagcccttgctcaagcttggcgatggtatagccggctacgatggagatcaccgtggtcttcgccgggtcgaaacgtcgcgccactgaagcggctacgccggcgacatcgtcttgcgggcgcaccgcgattaccacgatgtcggcatctggggcgtccgtcggtgacgccgtctcggtgttgtacgtggatgccagatattcggcgcgttcccgtgagatttcctcaacccagatgtggtcgaccggatatgcggcggccttacgtcgcaccgcttctatgatggcgctcggcatattgcctccgccgatgaaatacaggtttgctcccatcggttcacctcttctgatgatggatacggatgtatgtcagttcccgtaataccgcatggattcccgaaccgtcgtcgttccttccgaaatggcatataggtgttcttgataggcgcttcaaggatgcaatgatttcgcggatggataagacgctataagaaatgcctgtaatacgtgggcggcattccgcttgacatcggcatcgccgatgcgcttcgatgacggataacgttgcgaatcaggagaagggaccccaatatggtcaatcgtcgcgccgacttccacgccatcgtcaatcatcagtcccggacgccgtatctggttagcgcctggcagcatcttgtcggtcatgaatacggtgccgaggaattcgccaaggccaccatcgatttcgtcaatcgctgggattgggaatgggtgaagatcaatccgcgcgccatatactatgccgaggcttggggctctcggtacgatcgcaacgattatgccggattcgtgctgccgaagaagatcggcgccgcaatcaccgaaccggatgatgtgcgtggagtcaaggaactcgacgttcgtgacaatgagtatttcgccgaggctctggccgccgccgcccttatccggcatggccttgaggatcgtgccgtgctgcagaccgtcttttcgccattgtccgtcctgctgcagatcgccgatctgccgctgtacccgggtgacgattacgccaccgcgacgctccgcgtcgaagatctgatcttcgatcagcctggtgtcgccaagctggcgctcgccaacatcgcccgcacactcgcctcctatgcgcgtgcgttggttcgtcccgagtccgaaggcggagcgggactcgacggcgtgttctacgcgctcaccggcacggtgagcgagggttatttcgacgcgcaacgctatcttgaattctccgaaccatacgatcgcatcgtgattgacgcggtgcatcgcgccaacccggacgccgtggtgctgctgcacacctgtcgtgctgaatcccacccgaattggttcgacgtgaagggtgtggacctgctgcagtgggatcagtatcaaccgggaaacccgcaggtggatgccgacctgacggctgtgccggtcgccggtgccccatacgacctgttcgcgccggacggtgacgtcgaacaggtgcgccgcgaattggccaagaccatcgcgcttcgtacgggcaaaccgtttttgctggcaccaagctgcacggttccgaccccggcgggcgacgaggcgctgcaggcattgagcgacatccgcgtgggctgagccggtccccatttacgcttcatgattattcgaatagagaagggaacatcatgaccatcaagacaatcatccgtacggcgatcgcatccgtggtcactgcgggaacactgattggcgtctccgcatgcggccttggcggggatgccgccagcggttccagcgacgacaccgtgaacatcggagtcatctatccgaagaccgggcaatatgcgcaatacggcaaactgttccagcaaggcttcgatctggcggttgccaaggtgaacaaggatggcggcgtcaagggtaagaagcttggtcttcgatactatgacacgcagtccgatgccaagcaagacgccgcggtggctcccaagatcgtgtcggacaagtcgatcatcgccgtggtgggtgactatgcctcgcccgcatcctcggccgcgtcgcccatcttccagcaggccggcctcgtgcattacggtttcaataattcggcacccacctttaccgataccggggaccacgtatggactccccaaatcggtcaggacaagtatcagaagaccaacgcggatatagtggccaaaaaagccaagaagatcgcggtggtctacatcgagaacgactggggcaaacaggcctatcggtacttcaagcaggaggccgagaaaaacggtacccagattgtgtacgagtccagctatctgcccgactccaccgacttgtcgccgattctgattccggcgcgcgatgccaagcctgacgcggtggtcgacatcggctacgggccggacggcgctctggtgatcaataccctgcgcgacaagctggggtacgacggcctgtacttcggtggtcaggaaaccaaggagttcctcgatctcgccggcaaaaacgccgagggttcgatcatcaccggatccttctccgccaccggcaccaaggacgccaaggcccagcagttcgtcaaggacttcaaggccaagtacggcaacaacccaggcaatttcgaagtgaccgcctacgaggcgatcatcgatctggcctatgccgccaacaagaccgaaccgacccgtgaaggcatacagaaggcgctgcagaccgtgacggatttcccgctctaccagggcaatggcggcacgttcaaattcaatcggcagagtcgtcgcgccgataacatcgatccgattctgctcatcgtcaaagatggcaagttcgaacaatacgaaggttgattccccgggctttcccatacaccacgaacgaggtaacgcacacaatgtttgatgttcttttcgccggactgatacacggcagcgcctatgcgctggtcgcagtcggcatgtcgctgattttcggcgtcaccaacgtggccaacttcgcccaaggttccatcgtggccgtgggcatgatgatcgcctggtggctcggttcgtcatggggatggggaatcgtgcccacattcgtggcggtgctcgtggttaccgcactgctggggctgatcatgaacgtggcgatcatcgctccgcttgaaggccgtaaaccgattgcggcgctgctcgccaccattggcgtcggccaggtgctcgacaatggtctgcagatcgtcttcgggccacagacccgaccgttcccgaaactgctgcagacctataacctgcaagtcgccggcgtgcgcttcggcacttcggacatcgtgatggtgacgcttgccgtcctctcgatgcttggcttatgggcattcctcaagttcggcaaagcggggcaggccattcgcgccacttcccaggatcccgaagccgccatgcagatgggcatcccggtgaaggccatccgtaacctctcctttgtgatcggtgccgtacttgccggcgtttccggcatcttcgtgggcttgttcaacggcaacatcaatccgatgaacggcggcaccattggtatgacggcgttcgtggcggccacgatcggcggtctaggctccatcccgggagctgtggtcggcggtcttgtgctcggtgtggtggaagcgttcggcatctctctgttcggagacggtgcacatgacctcatcaccttcggcgcgttgatcatcatcctcatcgtgaagccgcagggtctgcttgggccgaagaccgatgtcaaatccgagccgcttaccggcacgttcctgggaggcggcagggcgatcgcgctgccttggtggggtaatctcatcggtgccgtggcactcgtatccaccccgttcttcttcaatgactacctgtccggcgtgggcactcaggtcgccatctatgccatcgccgccgtgggactgacgttgatttccggctccgcaggccaaacgattctgggcatggcaggaccgttcgccgtgggtgcctatgcctccgcgattctggccacgcaggcgcattggcccttcctggtggcgttgcccgccgcaggtgtgatcgcggcgcttgccgcctcggtgctcaccttccccgtatggaggttttccggccattatgtcgccatcgccaccatcggcgtaggtgcggtgatggtggcgatcattcgcctcgccgagccgttgaccaaggggtctcttggcattcagggcattccgttcccgaaggtgttcggcgtcacgctgtacacgcagcagatgatgtatctgcttgacgtgatcgtgctgcttgtcacgttggtcatcgtcatgcgtatccgaaccgctcatctggggcgcgtgttcgaggccgtgggatcggatcgcgaggcttcggaggcgctgtccatccgcactggcgcctataaggcgctcgcgtatgcgcttgccgcgtttttcgcaggtctcgccggttcgttgctcgcgcaccagtacacgtacattgatccgacgatcttcaactcgaacatgtcgattctcatcctgaccatcatcgtgcttggtggtatgaactctccgctcggcgcggtgcttggctccatagtgctgatcggagcgcccgagttgctgcgtttcgcctccgacgcgcgcatcctgctgtatggcgtgctgctggtgcttgtcatcttgttccgtccccagggcctgttcgcccggaaaggctgagtcgccatgaccgattccgagaccgtattttccaccgtagacgccgtgaccggcatcgatatcgacaacgaacgcctcgataacgcggatgatctggctgaatattccgaaagacaccgccaggccgtccttgacgcgccggtgatgctgcgcgtgcgcgagctcgacaagtccttcgaggggctgcacgccgtcaacaaggtctctttcgacctgcatcaaggtgaggtcatttccatcatcggcccgaacggttcgggaaaatcaaccacaatcaacctgatctccggttttctgcagcctgattccgggctcatcgatcttgccgacgagccggttgccggtctgagccctgcggacatgtctgaacggggactgctgcgcaccttccagaacggtcgtgtgttcggcggtcttaccgtcgaagagaacatcaatctcggatatcaccggcgactcgtcgcggcacgcccgttcaaaagcctgcaaaggtatccgatcgcgcgatggctgtcgttgctcgccgagaccggcgtggcgctggttcccggaccgcggactcggcgcgaagccgatgaggtgaacatccgcgtggatcgggaaatcgaccgtttccgtgaacgactgagcgcgcgtcgacgggattgcacctacacgttgtcgtacgcgaatcgtcgtcgtaccgaaatcgcccgtgcccacatcagcgaaccgaagatcctgctactcgatgagccgaccgccggcatgaaccagtcggagaccgccgaagtgcttcgtcaactgcagtatctgaaagcgcagggacataccatcctattggtcgagcacaagatcgatctggtcactgcattgtccgaccgtgtgcttgcgatggatggcggccgcgtcatcgcgcaaggcgccccggatgatgtgcgcaatgccccgcaggtggtcgaggcgtatctcggcaagcggcgtgaaatgaaccatacccgggtcgccgggcagtcgcatgtgcttgcgatgcagaactccataggtgccgtcgtcgaagtcgagggcaccggtgccggtaccggacgagatgaaaccgggacgttggatgatggcggggatgccctgcttgcgctcgatggagtgaatgtgtattacgggcaggtccacgcgttgcagaacgtgtcgatctgcgtacccaaaggggccatcgtctctctgctgggaggcaacgcttccggcaagtcgaccacgatgaagacgattttgggcatcaatcatccgaagaccggttcgctgtggttccaaggcgaggatgtgaccggactgtccacgcgcagacgggtccaagccggtatcgccgccgtgcccgaggcgaggcgcgtgtttccacagatgacggtggaggagaatctattgtctggtgcctatacgcgacacgacagggagggtgtggccggcgatctggaagccatgtacgatcgtttcccgcgtttgaaggaacgtcgtatgcagcaggccggcacgatgtccggcggcgagcagcagatgctggcgttcgcgcgagccctgatgagtcgcccgaaaatcatctgcatggacgagccgacgatgggcttgtctcccaaactcgtcgaagacgtactcgaacagatagcgcgactgcgtgacgaattgggcgtttccgtgctcatggtcgaacagcaggccgagctggctctctcgatcgccgactatggttatgtgctgcagaacggacgtatccggctgcacggcaaagccggcgacctgctcggcaacgagcgggtgcaggaggcgtatttgggaggagtgaaacaatgagcgaagccgaagggattgagacgtcctcgcatccgtccgtcatcgccgtcacgcaaaggaggttccggtgaccgcagcaacaacccgatcgggcgcatccccgacggcgttcgtaacacttcccgatgctctgaacgctgatgtgcaggaatggtaccgctggttccatcgtcatcctgaactctcctatgaagagttcggcaccacggcgcgcatccgtgagattctggaatcgcatggcgttgaaatcctcgaatcgggactcaggaccggcgtggtggccatcgtgcgcggcgcaagcgccaagcccgtcatcgccctgcgcggtgacatcgatgggctgcccatcaccgagaataccggacttgactacgcttcggataatgccggagtgatgcacggctgcggtcatgacttcaacctcaccgtggcgttgggcgcggcgattctgctcaatgaacggcgtgcctcattgcctggtaccgtcaagatcatcttccagccggcagaggaaggtcgtgccaccgcggagcgccccacgggttccgtgcaggtgctgaacacgggtgtgctggacgatgtcgaggcgtttttcggcacgcacgatgcagccggaccggttggatccatactcatacgtgagggtggcatcaccggcgcggtcgacaaattccaggttgccattcacggcaagggcgcgcatgcagccgaaccggaggatggcatcgacccgatcaccgtgctgacgaacgtggtgcaggggttgcaggcggtcattgggcgcaatctcgaccctcgccatccgcgggtgttgtccgtcacccatatagaagccggcaattcgtggaatgtgattccgcaggatgccttcttcgaaggcacggtgcgcactaccgagccgcaggaccgggttctcgccaagaagcgcgccatcgccatcatcaacaacacggccgccgcctacggtgccactgccgatgtctcgtggttcttcggatcgccttccgtgttcaacgacgccggatggacccgcatcggacgagaagtcatcgccgagcaggggcttcacgcggatgatgatcatcctcaactgggaggagaggatttctcatattaccttgatcgcaagcccggcctgttcgtgcacatcggtgccggtgagaccggtgccgcgcatgggccgacgttccggccgaatccggccgccatcggctacggcatacgctttctcacggccatcgcgcagaaagcgctcaacgagttacgatgaacgcaccccacctatcattccggctgataccgaacgataagaaatgcctgtacccgcaagcacgtgttacggtgcttcgcttcctacactggtgccgtatcagtatgggcgtccgtcggtgttccctaagggacggcggcatgacattgaggggataatccatggcgagggatttcgttaccgcggctattcacggcggctatgaccgggcggctcacggtgaggcggcgaacccgccgatttacgccagtgcggcgtttgacatggtcagcgccgcgcatggtgacgcgctgggtgccggcgaagccgagggcttctcgtactcgcgtgtggcgaatcccactgtggatgtgttcgagcgtcgtttggcggaactcgaaggtggcatgagcgcggtggccgtcgcctccggcatggctgcggtgtcgtatgcgctgttgtgtgccgccgaaggtggtggtcgcatcatctctccgaccaacctgtacggcgcttccgtcgatgccatggagaccttcttcccgcagttcggagtccatgccgatttcgtgcgcgacatcaacgacctcgatgaggtcgcttcgaagatcgggccggacactcgcgccatctacaccgaatccgttgcaaatccatccactgaaatcaccgatattgaaccattggcggaactcgcgcatcgcaacggtattccgcttatcgtcgacaataccgtgcctaccccgtacctcttccggcccatcgagttcggagccgatatcgtggtgcattccaccacgaaaggcatcaccgggcacggtaacgccatcggcggagtggttatcgacggcggaaacttcgattgggccaacggcagattcccgcagttcaccactcccgaactggtcgtcagcgatgaacgcaaaggaatagcgcgcagcttcgccagcagattcggtcgcgaggcgttcattcgccgtgtacgcatcaaatatctgcgcactttcggcgcggtgcccagcccgttcaatacatacctgtcgatggtgggattggaaacactggctgtgcgtgaacggcaggaagtcgaatcggccacgcgtattgccgagcatctcacgcatgcgccgcatgtgctcaaggtcaattattccggtttgggcaacacgggtcagtatgatctggtcgccaaatacttccccaaagggatcggtacgatactgtcgttcctcgtcgacggcgacgagaacaacgtgagacgcatcctcgacggaaccgaggtattctcctatgtgccgaacatcggagacgcgcgttcgctgattgtcgatcctgcgcgcatcacgcatcgcgaggttcctttggatgcgcgtatcgccgccggagtcagcgataatctcatcagactttccatcggattggaaaacgtcgatgatttgattgcggaccttgaccaagccattgccaacgcatactgacgtgtatcgcttacgtatgcggataattgttcgttctgagaaaaacctgcgctgttattcttggggcgttgtgaatttgggttgttgtattacgaaagaaggaacaggacatggctattgacgtctatggcgcaacatggtgcggtgattgcaagcaggcgaagaacacgcttgaggagcttggcgccgaatatacgtggcatgacatcgaaaccgaggatggggcggccgatcgtgcggtggccatcagcggccagcagcacattcccgtggtgctctatcctgatggcactttccaggtcgaaccgtcggctgtggatatcaagaacaagctcaacgagctgaatatcaagtaaagacaagagttgtacgagtttgacgatctgctgcatctgtgagcgaacaatacgtcggcgtccgatgtgttattcattggtgtgaatagcactccataggcactggatataaccacgccgaaacacaggtgagcaagcgcgtctacggtaagggattgtgcttcgcgaacgagcgttgacgtgcataacagcagcgaaaagggagtatcgggatgattcggattaggggagtgagcaagagctttgccgacaccaccgtgctggatgggcttgatcttgacattcctcgacaaaatgtggttactgtcatcggcccctcaggctccggtaaatccacactgttgcgcattctggatttccttgagcacgcggattccggtaccgtcgatttcggtgatggtcttgtggatttgaccactaccaaatctgccgacattcacaaggtgcgttcgaaaatcgggttcgtgtttcagaactacaacctgtttttgaacaagacggcattgcagaatgtgaccgaaccgttggtgtattccaagggaatcaagcctgatgaagcccgcaagatcgctattgagcaactcgatcgtgtgggacttgccgattttcatgatcggtatccgagcacactgtccggcgggcaacagcagcgtgtgagcatcgcccgcgccgtggctatgaatcctgagctgttggtgcttgacgagcccacttcggcattggatccggaaatggtcaacggggtgctgggggtcatcaagcaactcggtagcgaaggcatgaccatgctgatggtcacccatgagatgcggttcgcctatgaggcatcgaatcatgtggtgttcatcgaaggaggccatgtggtcgagcagggtgatccgaagcggatcttcgaacatccgcaggaggagcgtaccgtcgagttcctgtcttcaaccaacaatgtgctgatgattccggtgactcggtagaggcgtttcatggctgttgtaattaattgtgacaatatcaagagaggggtttgtcatgttcaataatcaagtgattcgcaaggctgcggctttgctgtccggtgtcgccgtgctggtttcggttgccgcatgcggttcggcttccgcttccaactccagtgcattggagcaggtcaagcaggccggcaaaatcgtgttcgccactgagggcacctatgctccgttcagttaccatgactccaaaaccaatgagctgaccggttacgatgtcgaggtggccaaggccattgccaaggaggtcggtatcaaggccgagtttgccgagggcagcttcgactccctgcttgccggtgtggatgccaagaagtacgatacggttgccgatcagatttccgccaccgacgagcgcaaggccaagtatgatttctccgaaccctacacctactcctacggtgtcgtcattacctccaaggagaacccgaagaacgtcacttcgttcgatgacgtcaaggggcttcgcgccgctgaaaccggtacctccaactggaacaagaccgctcaggagaagggcgctactatcgttcaggttaacgatttcggtcagcaggtcgatgccatcacgtccggtcgtgcagatgtgtcattgaacgatggccttgctgcgctcgactacctgaagcagaagccggatgcgggcatcaagattgccgccaagtccgagaagactccggccgcctacctgccgttccgcaagggcagcgatgacttggtcaaggaagtcaacaaagccattgtcaagctgcagaaggatggcacattgaccaagatctccgaaaagtactttggcgaggacttctctcaggagtgacatgtttcccggctctcctgtaattaggggagccgggaaatatgagctggcctcgtgaagattacgagcagacgcaacatataccacacaacaaaggatgaccaatggacgcacgagtatggggaatagtcgtagattcctttgctaagctactgattcccggtatcactgtgaccattccgctgacgctgatttccttcgctctcggtttgatactggcgattgtggtggcgctggtgcgtgtggctaaagtacctgtggcctcccaaatcgcgtggttctacatttgggtgtttcgtggtacgccgttgctggtgcagttgttcgttatcttctttggattgccgtccgttggcattacgattccggcattgccttccgcggtaatcgcgttctcgctgaatgtgggcgcctatgccgccgaaacattgcgtggtgcgattcttgccgtgcctaagggacagcttgaagctggcttggcggcgaacatgccgtatgtgacgattatgcgccgcattattctgccgcaagcattccgctccgccttccctgcattgttcaactccttcatcgcattggtcaaggacacgtctctcgcggcgaacatcaccgtggtggaaatgttcatgacggcccagcgcattgtggcgatttactacgagccgctggtcctatacattgaagtgggcttgatctacttgctcttctgcacgttgcttggatggcttcaggattactgcgagaagaagctcaacgaacacttctgatgtgtttatatggcggcagtgcttgattcaagtcgggtgtttccttggttgaaatgcccgactttgttgtttctgacgtgcgacttggctgattcaaacattagtgcacaagatgtggctgccggagtgaacggaacatgaaatctgacgttcgctttcttggacttgcctgtgagagctatcagttcccgggcgtgcgatggtagcatggatggtgttggggcgcggcacaacgatatgccgtgcttgacccttgtgagaggagttttatatgaccatcgcaagtatgttgggcggaaccatgctgttggtgctaattctattagtcgttcttatcgtgctgctgggcgccgcattgttcatcgttccgcagcagcaggcgtacatcatcgaacgcttcggcaagttcctgaaggttcagttcgccggcattcacatccgtatcccgttcgtcgaccgcatcgccatgaagaccaacatgcgcgtcaaccagctcaacgtgcagctggaaaccaagacgttggacaacgtgttcgtgaccgtcgtggcctccacccagttccgcgtgaacccgaacgacgtggccaccgcctactacgagctgcgcgacccggctggccagctgaggagctacatggaggacgcgctgcgttccgccattccggccctgaccttggacgatgcctttgcccgcaaggacgatgtggcgttcgacgtgcagaagaccgtgggcgccgagatgagccggttcggtttcaccgtggtcaagacgctgatcaccgccatcgacccgagcccgcaggtcaagaacgcgatggactccatcaacgccgcccagcgcgagaaggaagccacccgccagcgcgccgaggcccaacgcatccagatcgagacccaggccgccgccgaagccgagaagacccgactgcagggtgaaggccaggccaactaccgccgtgagatcgccaacggtatcgtcgaccagatcaagagcctgcaggccgtgggcatggacatcaacgatgtgaacaacgtggtgctgttcaaccagtatcttgacgtgatgcgctcgctgagtgaatcgaacaacaccaagaccgtggtgctgccagcttccacgcccggcggttatcaggatctctacgagcaggtcaccaaggccatgctcaccgcggccgagacgaagtaatcaccccgtttgcaaatcctcatccatcgatagtgaagcccctccaagcgaggggcttcactgcgttccgcgctgattccgacaagtgcgcaaatgggccgtatgcagatcatgacgagtgtgagaatcatctacttatagattgtgacgaatgcgataatatggcatttatagaacttgataagtgtaaaatacaggatattacaaaatcagacgagtgtgaaacgaaggggtgaaacatgttgaaacgcaaggcatatcagcgtattgctttctggaaagagcataagaccaaccaagcattgctcattactggtgcacggcaggttgggaagacgtatctggttgaggaatttgggcagagcgagtatgagcatatggctgagttcaacctattgcttgacgacagcgtgcgtcgttcgtttgcgcaagccaccagtcccgatgatttgatgctgcgtatttctgttgctgcacaagggccgttggttgtagggaagacgcttatcttcattgatgaaattcaagcatgtccacagattgtcacttttatcaaaggactggtggaccggggagactatgactatattctttccggctcattattgggcgtagaactggaggatgtgcgctccctgcctgtcggatacttggatgaatttatcatgtatccactggattttgaagaattctgttgggcactggggctgtcggaaaccgtcttcgacattgttcgtgacagttacggtgccgtaaaacccgttcctgattttgtccatcagcgtttgacggatttgttccaccggtatctgttagtcggtggtatgccggctgcagtgacttcgtttgttgagagcaaggtcatcgatccagtgcgtgcgattcagaccaatattcgcgcatactatgagcatgacattaagcagtatgcgccgaaggataagagactggtcattcaagaaatgtatcgacttatccctagtgaactgcaaagtcaaaatcgcagattccaagtcagttctattgccgaagtcaaacgattctcgcagattgaagatgaattcctttggcttacccgtgctaatgttgcgctgcccgtatttaatgttgccgcccccgtggccccgctgagagccagcaaagaacgtcgattgctaaaactgttctattccgatgttggattgctgaccagctcgtatggaaaaaagtcagcactgggcatactggatggtcaggctgcgatgaacatggggggagtctatgagaatgtcgtggctcaggaacttaccgcgcatggattcaccaatctgtattactttacgaaaaaaggaattggcgaactggatttcctgatagagaccgatgatggtgatgttttggccctggagattaagtcgggcagatattaccgttctcatgcggcgcttgacaatgcgttgagcgctgatggctacaccattgacaaggcgatggtgttcgcggaaaccaacgtgttccaagaggaaggcgtcacatatttgccgatgtatatgctcacgatgctggttaatgagtgatcggtgccttggtggtgcgatgcaggcgatatttgtgatggcggtcgataaggaggtgctcaacgattctgttgtcggaccggttccgagctggtcatgaggcgtcattggaaagttgcggtgtgtagggtggtgtctttgccgagagtacagtgtttcttgaaaaatgcggtgcatgcgatatgtttaatgtaattctaaatattacattaaacatgagtgagcggtagtgcccgaaaagttgcgcactttggatcgtggccgtccatggcgcgatagtcagttcgcttccacgaggttgtcaccgagccgggacatgtcgagatagcggcgggtcgaccattcgttcgcggtgacgtgacgga

SEQ ID NO: 196 - DNA, 23325 bp, Unknown
  R101_18m  MAG No. k141_16025
ctgtgcgacctcggcctgagctacgacctgttcacccgcaccaccaccggtaaccacgagcacgtggtgcaggagatgttcaagcagtgcttggagaacggctacatctacaagggcacccagcaggtggcgattagcccgtccaccggccgtaccctgcccgaccgctacatcgagggcgagtgcccgatttgccacgccgaaggtgcgcgtggcgaccagtgcgacgcctgcggcaacgagctcgacccggacgagctcatcaaccccgtctccaagattaacggcgaaaccccgcgcttcgagcagaccgagcactacttcctcgacctgccggcgctcgccgaagccaacaaggcatggctggagacccgcaagggctggcgcaccaacgtcatcaacttctcgctcggcctgttcaaggaagtcaagccgcgcgccatcacccgtgacatcgactggggtatcccggtgccggtgaagggctggatcgacaacccgaacaagaagctgtacgtgtggttcgacgccgtgatcggctacctgtcggcctccatcgaatgggcccgccgccagggcgacccggagaagtggcgcgaatggtggaacgacccaaagtgcccggcctactacttcatgggcaaggacaacatcaccttccactcccagatctggccgtccgaaatgctcgcatacaacggcaagggctccaagggcggcgaaaccggcccgatgggtccgctcaacctgcctgagcaggtggtggccagcgagttcatgaccatggaaggcaagaagttcagttcctcccgcggcatcgtgatctacgtcaaggacatcctcgcccgctaccccgtggacgccgtgcgctactacatttccgtggccggccccgaatcctcggattccgacttcacctgggccgagttcgtgcgccacaacaacgaggagctcgcctcttcgtggggcaacctggtgaaccgcgtggccaacctcatcaacaagaacttcggcgagattccgccgctggacgaggattcgatgaccaacgaagaccgtggccttctggaagaggcttccgccgcgttcgacgtggtcggctcctccatcgaaacccaccaccagaagcacgccctatccgaggcgatgcgcgtggtcggagacatcaacaagtacatttctgccaccgaaccgtggaagatcaaggacgaccaggctcgtctcggcaccgtgctgcacgtggccgcccaggccgtgtctgacgcgaaccacctgctcgcgccgttcctgccgcactccgcacagagggtgtgggaggcgctcggcggcaccggcaccttctcgccgctgcctgagctcaaggaagtcgaggatctcgacaagcccggcttcacgtacccgatcatcaccggcgattacgagctcggtgtgaacgtgcacccgtggaagagcgaggcgatcgaggtcggcgccgtggtgcctaagcccgcaccgatcttcgccaagattccgaccgaggccgtggaagaggagctggctcgcttcgatgaagcgctggctgctcgccgtgccgccgaagccgagcgtctggccgccgagaaggccaaactcgccgccgagtgattcggcattgctagctcgtagctgacgggccacctcgcacatgaagtgttgcgaggtggcccgttgccgtatgtgcggtcaagccccgacaatgcgaggccggttgtcggcgggcgtcacaaattcgtcacactccgccaagacttttcccagacaagcacatcaattcgccaagcatggggcggttatatagaagatgtcaacggaatgaagttcataccggtggcgaggttcttccgaaccccataactgaacccttcttctctcttctctctcacccggcggccccctccgccgggtttctttttttttaatgctgggaatgccatgggccgcatattgaaaaaaggattatggcagagtgctgtctgtttacaataaggcattgctgttctagaaaataacaaagaaggggggactgatgatgtataccgtcacattttcgggcaacctgactcaagcggaatcggccttggtcaagcgaggcgccatacagatcgccgcgttgctggccgcaaaaatcactggccgcggactcatcatcaacgacggtgacaccgaatactcatgggatttcatcctggtcgatgccagcagcgatgagcggcacacctttgacgagaggctattgcggatgctgtccgactacatccacgccggtttccccgatgccgtgatccgccacgccaagcacgaggctccaaagctcggcaaataatattggtcgcgtggtgagtcccatacttccgtcggaatatcgctatcgcgatatggtcgcatgcctgttgcgcattgaagcgttcgacctatgcgcagttgatgttccggtgatgacggcaaccgattgacgcgattaccgggacagatttcgctgtcccggttcgtgatttcggcttctttttgggaaccgggacagcccccctgtaaacgcccattatccgtaatcccaaaaccccggaattccgccgatgtacgatggcgaatattgcacggtggggtgataggtgaatgaaattttgtcttggttgctcaaaaaggggcgaaatggagaaccgggacagcgaaatctggcccggtccacacataaatcgattgacatcgctaccgggacatcggacacggacaccgagtcgcgcagcgtcggcgcaacatggatactgtacgactttcgcgataaacgttatattcttcgtcgcctccgccgggcgatctcatcgagtggcgttgccgtcaaagtgaaatcgaatacggcacctcgcaatgccaactgccgcccgacccggtaggcgagttcggcttgggatggctcatcggccatgttcgcggcagtggcgatgatgacgatccaatgatgatgtcgcagcagttcgcgcttgtcgttgtcccgccgccactggtttttgtcggtgcgatgatgatcgccgtcatattcgatggcgacgcgaaattcgggccaagcgagatcgagcgttatcggcgcgccgttgctgaatgtcgcgccgggcaccgtgtaatttgtcacggctggcggaagcccgtatttcgtcgtcgcgatgcgggtctttgattccatcggagagtccacgcggggcgtaatgaatgcaagagcgatcatgcacttggattttgcgttgaatttcgggagtccagtgacttgccgcacgaagtcctgataaatgccgtcagcagtgcggccgttcgccagacccggcttgcgggcgattgctgtaaggattgcgtcgccaagtatgaccagcgattcgagcgatatatgagtggcgagttgtgcccaagtgtgtatcagatccagtgcgtacacatgtttgttgatacgcacattgtgcgcatcgctcagcggcttccagatgtgtggtgtcgttggcggcacgatggcacgtattcgtgtgcggtgtgagtcggagacggtatggagctcggcggggtcgatatcgcaatccttgggaagcggcacggattggagtatcagcgatgtggccatgccgaagagcaccggttgcccgagctgttgcgcggcgtccgtgcatcgtttaagcatttcccgcttacgttgggtgagggtttcgctcattgctggcgacacaggacctgtaatcacagttggcgcggaactcgccatacgtggtgatgaacgtagctcaggattgatggtgcgcgcagacgcaacgcccggtgtgtggggccgggtccagccggacggttcgtcgtcgaatacgccgggcggtggagtgggcaatatgtcgttcatgacgccaccgtagcgcagcggtcacatgctcgctatgaaaaccggggtatgtggctctagcttgcgtgagatgtggataactctgtggataactagttcggaacaattagcgaggccggaacctaccggcaattggccgatgatgacggcacttttgctcagctcagccgcgatagtctcgaataggtgcggccgggcgtactcgcataacgtaatgccccttctctctgaacagagagaaggggcattcgaatatatgctcccgccagcggaacgtcagcggcagcggcgggtgaggggctgccaagggtcgagctcgaccggttcggcggtgagcagggcgcgggtggcgtcgtcgaggtattccttgcggatgatgagctcggtgacgtagcggtcgaaccaggcgtcggacatgacgtagtagccgtccttgccggcgtccttgccccagctgttctccaccttccagcggttcggcttgccgtcctcgccgaggttcacgccggtgaaagtcatggcgtggttgctcgggctgtcgccgtattcaaggccgtgggccttgtcgccagtgaattcagtgccgaacagctggtcgacgcgcaccacggactggtcgaagaagccatccttgcgcagcgcgaactgcgtgcagtcgcaggcgaaccagatcgggtgaccggcggtgagctggtcaagcgcggccttcttgaacacgtccagcggcacgttgacgaactccatatcgcccgcctcggccacgttcgcgctgaagcggatgcggtagcgccggttgaacgggcggttcttgagtggggcgttggccagcgtcgcgaaatcgttgacgtccaccggcacgtacttcttgtagaactcaagcggggtgatgccgatctcgcgaatctgcgggcgctcgtccttaccggttttcggcttgtcggacttgttcttatcgcacttgcaggccttggcgtcggatttgccctcgcatttgcaggagtcgccgcacttgcaggattcggtcttgccgtctgcgtcgacctcggccttgcacttgcaagcctcgcccttcttatcctcatcatcatccttggtgcgcgcgaagaagtcgaacttctccggcggctcgccaagcgacacggcgcagatgcggtacacggtgcccatgtactcgtccttcagcgcgcgcagctcgtcctcgccagcgcccgcagccgaacggcggcgcagctcggctgcgaactcgcgcagcttggagttgaggtactgcttgaaatcatcggaattacgggagttctcggactccgggtaggcgctcttgggcaccagaccgtacttgttcaccagcgcggcgaacatctgccaccagccgccgtcatcggacgggccccagttgatggcctcgaacaggcgcgagtcggtgggctcgtcgagcgtgcgcagcacattctccaggtaggtgttcgacttctccatcgcgtcccagaagaacaggtaggtctcggagaactcgaaatcctcaagattccagcgatgcatgagttcgtaacgcagcgtgttcagggaggcgaacatccagcagcggccggaacgctcctgattggtgatcgaaccttgcttaagttcgatggagaagtcgcgcggcagcgcacgcacgccgcgatagtcggtggccgccttgagcacgccggccgaaaccgccgcgtccgccgcgatcaggttggcgcggtccttgttgaaatcctcggtgtacgtacgcagaagttcgggtttgatggcccgtgcgctggcgtctgtcgtcatgatgcccctgtctgatgctgatgatgctgatggataatccgttgccggcggcggggactgtcaccatccgggccggcggactgctgacacgaaagtataaggcatgtccagcaaaggctcaggaaatacaaaattaacaaacggatgtttgcccaatacacagtaagtgttttcgcagttttctgtacaggaaaaagtcggaaaagtcaatacccatattccatatattggactcaatttgtggttttgagcggggggggtatcactttcccagttatctgggaggtggttgggtgttcaagtacatcatcaagcgcattgtgaactacgtgatcatgctgttcgtggcagtatcgatgacgtatttcctggccagcgcattcatggatccgcgttcgaactacatgtcgcgcaatccgcatccgccgatcgcgtcgattaaccggtcgctcgatctggccaacatcaacgaccagacgccggtcgtcatccgctatttccgctggctcaagggcatcctcacccagtggaactggggcctgagcccggaccagtcgccggtggcgccggccatcgcctcccgtatctccgcttcgctgcagctggtgacgctcgccaccgtgctctccatcctcttcggcgtgagcatcggcgtgtacacggccatccgccagtacaagtggcaggaccgcgtgctcaacaccaccgcaacgttcttcctggtggtcccggccgccgtcatgggcctgatggtggtgctgctggccatcaacttcaacaacatcgtgggcagccgcgcgttctacgtgaccggcctgcactcctaccaaggctccaacccggtgctttgggtgtttgactatctgcagcacctgatcctgcccaccatcgtgatgacgattccgggcatggtgggctaccatctcacccagcgtacgtatctgctcgacaccatgaacgccgactacgtacgcaccgcccgcgccaagggcctgacgctcaacgcggccattcgccgccacgcactgcgcacctcgctgattccgaccgccgtggatgtggccttctccatcgccggcgtgttcaccggcgccgtgatcaccgaaaacgtgttcgccatcaacggcctgggcatgtacttcacccagaccatcgccaacaacgacatcaacggtgccgtggccgtggccgcgttcggtggcgtgtgcacgctgtccggcgcgctgctggcggatatcttctccgcctggcttgacccgcgtatccgactgagctgagccccgcgcaaaggacgatctaacatgatgaacgacaacgaaaacatggtctccgacgccgccgcccaggatatggaactcaccgatccgcagggcagcgaaccgcagtccgccgacgccaggaacgcccaggaggcttccagcgccgacgacttccaccgcaccggccgcatgcagctgtacgtgcgccgcttcatgcgccgcccctcggccgtggtgggtctggtggtgctgattctgctgattcttttggcgattttcggctcgaaattctcccagtggagctacgatgagcccgatttcgccgccctcgcctcgccgccgtccgcccagcactggctgggcaccacggtcggtggctcggatatgtacgcgatgatcatccgcggcctcggccgttcgttgaccatcggcatcttcagctcgttcggcaccacgatcatcgccgccctggtgggcacggccgtggcgttcttcgaaggctggttcgagcgcgtgggcatgtggctgctggatatgctgctcgtcgtgccgtccttcctgctcatcgccctgatcgtcggcatggcggccggcggcagcgactggctgtggctggccatcggcctgaccgcattcggttggatcggctacgcccgtacgctgcgcacgctgaccctgagcctgcgcgatcgcgaatacatccgcgcggcgaagttcatgggtgtgccgtccttcaccatcatcgtgcgtcatctggtgccgaacctgggttcggtgctggtcatcaacaccgtgctcggcgtgatcggtgcggtcaacagcgaaacctcgctgagcttcctgggcctgggcatcaaggcgcccgacacctcgctcggtacgctgctcaacgccggccagtccgtggtgcagacctcgccatgggtgctgatcttcccgtccgtggtgctggtcgtcctgaccttctccgtgcagctgatcggcgacggactgcgtgacgccatcgacccgtactcccgttccggcggcaaggccgagtgagaggggagacgggcatcatgagcgacgaacgcaacgcaagcaacgtaacaaccaacaccaaccccaacaccacaggagcgcaaggcatggcatccgaaccggtgatttcagtacgcgacctcaccgtcagcttcgcctccgaagccggcaccgtgcacgcggtgcgcggcatgaacttcgacctgtaccccggcaagaccctcggcatcgtgggcgagtccggctccggcaagtccgtgacctccatggccatcatgggcctgctggacaagaacgccagcgtcaagggctccatcacctaccacggcgaggaattgctcagcaagtccgatcttgagatgagcgagatccgtggcaagggcatcgccatggtcttccaggacccgctctccgctctgaccccggtgttctccatcggcgaccagatcaaggaagcgctggtcacccacaatccgaagatgaccgaacagcagattcacgaccgctccatcgagctcatgaacctggtcggcatcccggacccggaggaccgcctgaagtccttcccgcacgagttctccggcggcatgcgccagcgcgtgatgatcgccatggccattgccaacgacccggacgtgatcatcgccgacgaaccgaccaccgcactggacgtgacgatccaggcccaggtgctcgaagtgctgcgcaaggcccagcgtgaaaccggcgcggccgtcatcttcatcacccacgatctgggcgtgatcgccggcgtggccgacgacatcgtcgtcatgtacgccggccgcccggtcgagaaggcggacgtcgactccatcttcgaccacccggccatgccgtacaccatgggcctgctgggtgccgtgccgcgttccgaccgcgaacgcaacagccgcctggtgccgattccgggctccccgatgaacctggtcaacatgcccaagggctgcccgttcgcgccgcgctgcccgctggccaccgacatatgccacaccaccgagccggccatggagccggtgccgggccgcccgggccagttcgtggcctgccaccgcacccaggagatcgtggacaagggcctgactttccacgacgtgtacacggtggccgaggccgccaagtcgaagttcgccggcatcccgcgcgacgaacgaaagatggtgcttgacgtcaagcacatgcgcaagaccttcccgctgaccgccggcggcttcctgcgtcgcaagatcggcgaggtcaaggccgtggacgacgtgacgctggacgtgcgcgaaggcgagaccgtggcgctcgtgggcgagtccggctcgggcaagtccaccacgctcatggagatcatggagttcaagcagccgcaggacggcgagatcgagatgttcggcaccaagctcgaacacaagattccgcgcgagaagcgccgcgagctgcgttcggccgtgcagtatgtcttccaggacccgatgagttcgctcgacccgcgcctgccgatctacgacatcctggccgagccgatgaaggtccagcactactccaaagagcagatccgcgaacgcatcggtgaactcatgcgtctggtggagctgaaccccgaccaggtggaccgcttccccacgcagttctccggcggtcagcgccagcgcatcgccatcgcgcgtgcgctgtcggtcaacccgaagctcgtgctgctcgacgagccggtctccgcactggacgtgtccatccaggccggcgtgatcaacctgcttgaggacctgcagaacaagctgggcgtggcctacctgttcgtggcccataacctgtcggtggtgcgccatatctccagccgcgtggcggtgatgtacctgggccgcatcgtggaatccggcgacaccgaagacgtgttcgagcacccgttgcacccgtacacccaggcgctcatcagcgccgtgccggtgccggacccgaaggcggaacgcacccgccagcgcatcgtgctgcagggcgaggtgcccagccccaccgagacgttcgaaggctgcccgttcatgggccgctgcccgctcatgcccaagctgagcgccgaacaacaggcccgctgccgcggcgaacgcccggcgctgcggccgtatgacacttcccgaccgagcggccatcaggttgcatgccatttcgcatgacggtcggaaccatatagaggaggaaataacaatgaacaagacacgtaagctgaccgcgctcgccgcggccactgcggcgcttgccatgctgcttgccggctgcggcgcgggcaatggcaacggttccagcaatgcctcgagcgccaccgaaccgccggccggcatcgattcgtcgtacaccggcgacctgcccatgccgaaggtcaccgagcgttacgacaaccaccagagccgtgacaacgtcaaggacggcggcacgctgaccctgtccatcgtcgaaatcggcccgaactggaactacctgtcttccgacggcaacaccggctacatgtccgagctgtggagctggtaccagcccagcctgctcatgaccgaccaggtcaatggctccccgattaaggtgaacccggacttcctgaccgacatgaagctcgtgagcaaggacccgatggtcgtgcagtacgacatcaacccgaaggccaagtggaacgacggctccgacatcgactggaccgccttcaaggccacgtgggaagccaacaacggctccaacccggactacaacccgccgagcaccgacggcttcgaccgtatcgctagcgttgagcagggcgacagcccgaagcaggtcaaggtgacctacaagaccccgtactacccgtggcaggaagtcttcggcgctctggtgaacccgaaggccgccgacccgaagaccttcacccagggctgggtgaagaacccgcacaacgagtgggccgccggtccgtacaaggtcgactccttctccgactcccaggtcaccttcgtgccgaacgagaagtggtggggcaacaagccgaagctggacaagatcgtctacaagcagatggccgacaccgcctccctcaacgccttccagaacggcgagatcgacgccgtggaggccaacaccaaggacgacatcaaggccatccgttccgtcaaggacgcccagctgcgcatcggctacagcaccaagacccgcgtgctggagtacaacagcaagtccaagccacttgacgacctgcaggtgcgtaaggccatcactcaggccttcgacgtgaacacctacaacaacgtgcagttccagggcctgaactggaaggccgagcagcccggctccgagctgctgctgccgttccagaagggctacgagaacaacctgcccgccgaggccaagtacaacgtggacaacgccaagaaaacccttgaggccgacggctacaagatgggcaaggacggctactacgccaagggcggcaagacccttgaaatctccttcactttcttcggtgacaacgccacccagcaggccctcgccaacgcctaccaggcgatgatgaagaaggccggcatcaaggtcaaggtcgtgaacgtggccgagtccaagttctccgacaccgtgtcttccggcaactaccaggtgctgccgatggcttggcaggctccgagcgccatgaccttcgtggtgtccgccccgcagctgtacacctccgacggcccgtccaacttctcctacgtgggcagcaagaagatcgacgagctcgtcaagaaggctggcagcctctccgactatgacgagcagaccaaggccgtcaacgccgccgagaaggaagccctcaagctgtacggcaccatcccggtctccaacccggcttcgtacctcggtgcgaagaagggtctggccaactacggcccgtccggcttcgccggcaacctgccgcaggacatcggctggcagaagtgatgacgtctgactgacgtctgacatggccaccgcgccgggaacggccggccgcacgcatcgactgcagggctttcgatgccggacgcggcctgcggcaggttcccggcggggtgtgaccgcggcagcatatgccttactctccttatttctgcatatgatgctgcggttgggaagcctcccgtttgcgcgcttatgcgtcgcgcgcgaatgggaggcttttgcatacttgccgcgattccatcccggcaacgatttgtccaccttgctgcccgcgcggctgaaaccgtatccaccttcctcttcccggatttgtgacgctgacggttgccgagcgtcacaaatccgggagatagtcgcccttacttgttgtcagaacttggtgagcccggatttgcggatatggtcctcccagccatccggcttaggcagtgtgaccagttccctcattgtcactgcagggatcgcggccgccacgatgcacaagcccaaagccacggacgtgactgagtaaccccagtgttgcatggcgatgccggacagaaatgtgatcaccggggcagcaatcgtctcaatcatgcccatgccggcgaatacgcggcccatatgctccttgttgatgagcaatgattggaatccgttgattaccgcattgccggccggtagggccagcagcgaaattgccagaaacgccatacgcgcaagaatccacggagccagcgctgcgccgagcgcgccgatgctcatcagcacgtagaacgatacggcgactatgccgccgcgcacatgctgaaccagcacggaagagatgagcgagccaacgatgacgcccacagacacagaaacgttcatgaaactggctgacaccacatgtgatgggtcggagccgatcgagagcaccgtaatcagcaggaacgagttgaagcacgcgaacgccagcgcgctcgacaaaatcaggcgacgttcgaatcgctcgctaagaagccagcggaatccggaaaacatctcacgccaatactgtgacgcggatgatgtcgtggtcgttgcctgctcgtcagcggcctgagtgatgttggccgcatcgccattctcatcggcctcatcgtcggcaagggcgcggccctccgcattggtccgcccgccacgatgccagtattttgtgatccgcatcgccgccgcggtttccaatagattcagcagcgcgctgactgcgaatggcagccatagaccgccgccgatcaatacgccacctactggtgcgccggcgagttcgagggcggcatcgcggccatcattgaggcttgacgccttgggcagcaattgatcgggaacgatgcctcgtagcatcgtgttgctcgtggttcctaggaggcctgagcgtatgccgaggcatatcgcaagtaccatcagcaccgggtatatgagtaatcccgcccatcctagggccgcgcatatgccgaacagtgcgaaaccaatcaggccaaacgcaatcatcagttttttgcggtcgtacttatcttgtaccacgccacctggcaaccgcaataccgacgatatcatggtcatgattgaatccagcagcgtcgcctgtgccggtgagcccgtgacggtctgcgcgatgagtggcattgcgaaaccttggatacttgatgacagcgacgtgcatgaatccgctacgaaccatttgccataatccgtgccgcgccatagcgactcggtggtgttgctatgtgaattgtgaccgttgggctgtgttgaagattggttgttgactgttccgatgtaatcagccattgtgatcatctccgtattcatcgatgcttgagatattctattatgttcgtcttcaagcgccgcaccggactcacccccggccaataccgcgacgccttccccgcccgcctttacaacaccgtgtgattagggaaggtcagggtactaaccctgggaaaagtgcagtattctgcattattaaccctaggaaaaatgtaattttggacaatcgcaaccctaggaaaaatgtagaatacgcgaattgcaaccctaggaaaagtgtgtattgcggtataaatttatttttggccacatcgctcgtggcgctcgggtggcgcaatatgaatccgcgattcagcagattgtcgattctggtcttgcgttgcgggtgtatcgcgtcgaaaaacctgcggcaccattgccgtcataccgtgatgattccgcgttcaaactgtatctccatgatgttgggctgctggcagcggccctggatctgactcccgcaagcgtggtccttggtgatgacgggctgaccgaattccgtggtgcgttaacggaacagtatgtttgccagcaattagtggccgccggcatcacaccgatgtactggtcgaatgcgaacagtacgggagaagttgattttgtctttgcaggtaatggcgcaatcattccgctggaggccaaagctggtaccgagcgtcataagcgtagcttgaagtggctgtgcgacaaatacgggatttgcggttaccgtacgtcgatgcggaattacaaggagcaggattggctgaccaatgtcccactgtggatagtcgggagctacttccgcccgtggttggcgagtgattatgagccggatggcggagctgatttagggccgctaccgaatactgatgatgaaggatgactgaagccgcgagatatggttcggccggttgctgacttgggatatggtccgcgaccggccggcggtcgaatccgtcatgccgcggtgcgcaccaccgtcacgccgtacggctccagcaccagatccctgcccagtaccgtgccgtcaagcaccgactcgcatccggcgaacggcgtatcctgccacgccgtggccgtatccgcatggttgatcacgaacgtcaacgactccccgcgtgacgggtaccgccgcgtaaccacctccaccggctccggcgagacgatgccggtaacgccggcccggcgcaccacgtcgccgaccacggcgtccatgccggcctcgtccagcaccgcaccggcgaaatacgccgtgcccgcgccgaaatcgttcaccgtcaccgccggcgtaccccggtagaacacgtcgccggcgtaggccgccagcgggcgcgccccgccgtcgagcttgatcagcccggcaaccagcgagacccgggacccgtccgtgtccgcgtcctcgccctcgcccgaaccgaacacgacacgcacgtcgcggccgtccgggatcatgtccatctcctccatgcgcattccgcacacctcacggaacgcgcccgggtatccgccgaggatcacgttgtcatgctcgtcgtgcatgcctgccatcaccgtcgccaggaacgtgccgccggcgcgcacgaacccctcgaccagctcacgaacgcccggcttggccatcatgagcgccggcgcgaccagcacgcgatagcccgccagccgcccggcgtcaatgtcttccggcaccacatccaccgcgatgttgcggtggtggaacggcgcataccagcgccgcacctgatccggatagtcgaagcccttcggcagcaacgagatgttctcggtcgaccaatacgaatcccagtcgaacatcagcgcgaccggcgcctcggtcagaccgcccacgaaccgcgcgccgtgcgccgccagctcgccgccgagcgcacgcacctcgccgtacacgcgctcgtcctcgcgcccgccgtgcgagatcaccgcgccatggtacttctcgaacccgccgcgcgactgcttgagctggaaatactgcacggtatccgcgccatgcgcgaccgcctgatagctttccgcacgcatccgcccgggcgcgcgcagtacgttgcactcctgccagttcgtctggttcggcgtcgactccatgagcatgaacggcctgccgtcgcccacgccgcgcatcagatcgtgcttgaacgcattgtcggaaggcgtggtgtgcgggaacggataatcgtcccagctgatcacgtccatctcgcgcccccaacggaaataatcggcaccctcgtaggtgtccatgaggttcgtggtgatcggatgcatcgcgtcgaacgcgcggatcgcgtcgcgctcggtgacgtaggtgcccagcagcgagtcggactggaaccgcttgtagtcgatgctgcaggcggacagagtggcgcgctcgccgtccagtccgtcgctgatcgcgttcggcggtaggatctgggcgaaatcggcgtaggtatggctccagaagttcgcgttccacgcgcggttcaacgcctcgatcgaaccgtacttgcgttcgagccagacgcggaaggcggcggcgcagttgtcgcagtagcagcggccgccgagctcgttggagatgtgccaggcgatcagatggtcgttggcgccgtagcgttcggcgagcttgccggccagcgcgccggccaggcgcaggaagttcggcgaattcgggcaggcgttgtgccgcacgccgaagcggtggcgacggccttcgtagtcggtgcgcgtggcgtcggggtagcgttgcgcgatccatgcgggtagcgcgccggtggacgtggccaggacgaaaccgaagtcgtgcgcgaccagcaggtcgacgatgcggtcgagcatggcgaagtcgtagcggctctcgtccggctggatcagcgcccaggagaacacgttgatggtggcctcgttgatgccggcgcgttcgagtttggcgatgtcgtccgcccaggtggattcgtcccactgctcggggttccagtcgccgccgaagacgaagcggccgcccggtgcggtgatggtcggtgcaggcgatgcgggtgatgcgggtgatgcgggttgggtgtgtgccatggtgtcggtcatgatgcgtactcctttgcgatgacgatgatgcggcctgcggccggtctcggcgttgtggccggcgtgcggcggactcgcgttggggtggttcggcgtcgcgccgtcggtagcggcggtccctgtgtgtggtgacgttgccccttcagcgttaaaccgatttaattcctggtggccattatgtacgtcgaggttgtcttcgtcaaatggatgattgaaggtgtcggcagctgctcggtgagatgccgaaaagcccataaatacctaaggaggacgccatggcggtgacgatgcgtgatgtcgcgaaggcggcgggtgtctctcctgcgtccgtgtcgtttgccctgcgcggcgatcccagaattaaacaagaaacggcacggcacatcatcgacgtggccaatcggatgaactattcggtcaacatcactgccaagagcctgcgttcggggcgaaccggcgtgatcgaggccgccgttttccagcttgaccggccgttctacgcgcagctgctcgccggcgtgtcgaatgcggcgttcgaccgcggcatccaggccgtggcgcagcagatctcgaccggcaaggtcggccatgagaaaagcatcctcgagaaggtcgccaacaagttctgcgacggcgtgatcctgagcgcgggcggcctgagcgacgccgagatcattgagctaagcaggggcaagccggtggtgctgctcgatgaccagtcgtaccaagggccgttcgactcggtgttcacgccgtgcgagaacggcgccgaggccgcggtgacgcacctgttcgagatagggtgcgagcgcgtcgggctggtcggtacggacttcatgccggccgaccaggcgcgccggtcgatgcacgtgggcgaccgacgtctgatcggctgccatcgcgcgttcgagcggcatgagcgcacgctgaccaaggccgacacgatccagctgttcgactgggacaccgacgacgcgtaccgcgcggtttcgcggcgcatcgaggagggggacttcccgttcgacgggctgttctgcatgaccgacgcgatcgctttcggcacgttgcgcgcgttgcgcgagcatggcatcggcgtgccggacgacgtggcggtgatcggcttcgacggcgtgcgcgagggatcgtacagcgcgccgacgctgagcacgatcgcggtggacatcgacaagcttgcccgcgaggccgtcgacatcctgtgcgagcgcatcgaggaggggcgttacggcgcgccggccatgcccaagcatgtcacggtgggttatgaggtgctggtgcgcgagtcgtccaaccgcacgcgctgaccggtcgtccggtggctgttcgcggtggatcgccgatcggtgggacaactcgcggcgttttttgtttaattatttttcgttgtccggtgcgattccgcgcgttccacagcccttgtgtttaaaaggttttgtaacgagttgacgccgtttgagcggagtgctataaatgcaactacaagattaaatcggtttaaaaccgggctcttgcacggaagacaatgtggtttctttcggcatacaacatggcgtatgccaccaacacaaaggagagttgcaatgtcaatgaagatctggggcaaacgaatgctcgctctggcctgcgcgggagcgatgctggtcccgctggccgcctgcggctcggacgccgacgccggcaagatccggctcagctacctgagctgggacaacgagcagacgtccaagccgtacatcgacgagttcgagaaggaaaacccggacatcaagatcgatttcagctacgcgccgccgaccagcgagtacatctccacgctgcagacccgcctcgtcggcaaccaggccccggacgtgttcatcatcacctccgagaatcgcgacgacctcatcgacaacggctatgccaaggacctgaccgacgagtcgttcatgaagaacatctcccaggccaacaaggacttcgtcggccgcgacggcaagacctacggcatgtcgatcatctcgtgggtctccggcatcgcctacaataaaaatctgctcaagcaggtcggctacgacgagccgccggcgaactgggacgacttcctcaagctgtgcaagaagctcaagaacgccggcatcgagccgttcctcgagccgaacgccgacgagccgagccgcttcatcgacgccttccagggatccatcctcgagaagaagggcgtcgatccgaccacgctgtccacgcaggacaaccagacgccgggcaccgacgagctcgaggccgtcaaggaatacatccgcctgtacgatgagggtggcgtgacccgtgacacggttggcatcagcggcgacgacatgaagacgcagttcaccaacggacaggtcgcgatgatcgtcgacggcgcgtgggactttgccaccttcgaacaggccggcatgaactgggacttcgccccgatgcccaagctcggcgacgactacacgcagtacgcgcagggctccgcctccccggcgtgggcgatctacgcgaagctcgacggcgacaagctcaaggccgccgagaagttcctcgccttcctgtcaagcaagtgggcgctgcagaagcataacgacgccggcgacgctgtcactgtcgacgggttcgacgctacggtgatgacgcagtaccagaaggtctacgatcaggacatcaagaccggcaagtactacctgcacaccaacttctattcgaagccggacattctcaagagcgaactcaaggcgcagaaccagcagctggtgcaggggcagatcacgcccgaccagtatgccaagaacatcgacgccaaggtcgcggccgcgcagtgacccgcaacggatcgcacataatcacacatagataactacagtctccggttcgtcatgaaccgtgcgcatggtaatggggcggcctgtcggctgcggctggtcgcccttcgcatgcccgcaatcggatttcggtcataagccaatgtcaaaggaggatggcatatgagcgcaacaatgcaaggctcggcggtcggcaacctgccgccgttggacgaagacctgtatcgtcggcgtcgtcgtgcgcgtggcctgcatgaggacgtgacgtcgttctggttcctgctgccgatcctggcggtgttcgtggttctgttcctggtgccgttggcacagaccgcgtacttctcgttcaccgacttcaacggttacagcatggacatgaactgggtcggtctggacaattacaagaaggtgtttacggatccgtccaccctgcagggcctgggcttcacgatcctgtacgcgatcgtggtgatggtcggggtgaccgtgatcgccattccgctggcggtcatcctcaaccgcaagttcgtcggccgtgatttcgtgcgctctgtgttcttcttcttctcggtgccgtcgctggccatcatgggcatggtgtggaagtacatcttctccccgatgaagaccggcgtggtcaacagcgtgctcgcggcgttcggtttgggaccggtgccgtggctgtcgaacaactctctggcgaagttctgcgtgatcttcatcgcgatctgggcgcagatcggctggcatgcgaccctttacttggcgttcctgcaggcgatccccgcggacctgtacgagcaggcgaccgtggacggtgcgaacaagtggcagcagttcgcgcatatcaccctgccgcagctgatgccgggcatcgtgacctcgacgttcctgctcatgtcgggcggcctgaaggtgtacgacctgccgttcacgatgaccaagggcggcccgggctattcgacgtacacggtcacgcagtcgatcatccagcagggcatcggccagtcgcagtacggcatcggttccgcgctggcggtcctgttcttcatcgccacgggcgtcgtggtgttccttcagatgggcatttccaacctgatctcgaggaggttcgagtaaatcatgggcaacaaggcttcttccgtcacggccgcgccgaagggcatgaacttcacgacgcgcaagaggatcggttcggcggtcaccagcgtggtgatgatcctgatcgcgctggtatgcgcggttccgctgtggtacatcctgatcaacacgttcaagacgattccggacatgtccgccaacccgctcggcctgccgaaggaatggacgatcaagagctacatcaacgcgttcgagacggtcccggtgttccgctccctgctgaacacgttgatcgtcacgttcttcgcggtcgtgatccaggtgctcgtcggcgccctggccgcatacggcatgatcctgcgcaagtccacgttcaccgctgcggtcggcgcgatcctgatggtcgcgttcgtcgtgccggcgcagacgacgctgatccccctgtaccgcatggaggcgaacgcacacctggtcaacaccttggccggactggtgattatctacctgggcggagcggtgttctgctacttcctgatcgtcgggtacatgcgcagcctgccgttcgaactgatcgaggcggcacgcatcgacggcgccggcccgctgcgcatcttctggtcgatcgtgatgccgctgatccgcccgatcctgacgaccgtggtcgtgttccagacgatgggcacgtggaacgacttcatgaacgcgaatgtgttcctctccagctcggaactgcgcacaatcgtgctgcaggtgtacaacgcggtgggccagttctcgaccgattggccgagcttcatgaccatcaccgtgctcgccctgctgcccgtgttcgtgttcttcatcttctgccagaagtggatcgtctccggcctcgtcgccggttcggtcaagggctgatcggctgatcgactagtcggctggctgatcacggtattaattccggctccccactacgctcatatcatctccttccgcggcgtgtggggagccatgttcttcaccagataggaatttcccatgggtactgttggcactgtgctacaaacatcgccaaaaccgagagccgtgcctcgtgacggccttcctcatcgcgtgaataacgcggtactgaccactaatccgctgcgcaggtattgcgccgacccgaatcttgccattttcgatggccgatatttcctgtactgcaccgatgacggtgtggataattgggacaccaccgcgttcagtgtgtatgtgtctgacgacttggccacatgggagcgatatccggcgctcgacttgcgcgatgtgccgtggtgggatggctcggatggtgcttgggcgccttccgtggtacagcgcgcggacggcaaatacgtgttctacttcgtggccggttcccagatcggcgccgctgtgggcgaatccccgtgcgggccgttcgtgcctgagcccgaaccaatcgtgcgcgaaggtacgttcgattgccacaccattgaccccggcgtatacgtggaggatgatggcacccggtacttcctgtggggcaacggcatagcttgggccgcgccgctcaatgaggactgtctgtcgttcgacgaatcgcgcgctttcagctgggtgccgggcgatttccgtgaagccatctggattcacaagcgcaacggcatctactacgccagctggtcggagaacgacgcccgagagccggaatactgcgtcaagtacgcgatggccgaatcgctgcatgggccctggagcgaaccgcgcgtgctgattgaacaagacccggcgcgcaagctgtatgccaccggtcaccataacatcgtgaatattcccggcaccgacgaatggattatcgcgtatcaccggttcgcctacaatccggccggtcgctgggctggaggcgatggctgtcatcgcgaagtggtattcgcgccgcttgactacaatcctgacggctcgctggttcccgtccgcccgcaagttggttcctacgtgcgttcgctgacgttctgacctgtaggctgtctgtctctgtctgttcgttgtcttcgccttgcttgcgtttttgtacgttttatctgtttcgtgagtttcgtgcgttctgcggatttcacgcgtttcgcgcagtgccgtacgctgatcaccattcagcgtgcggcacttttgcatatctcacgtgttgcgggagatgccgattccgtcgcacaatacgtaaaacgtgaatgaaccgctcactattcttatgtttttgtgactcagagtgtgttttgcatatgtaaaaacgtgaatgctaagatgatatcagtatgtgattgtgtgatgacctgcgtgttttcagtcattctccacaaaagaggaggggaatatgctcaagcgccatgcatatgaccagttgctgaattggaagaaccgtaaaaccaagtagggcttattggtcacgggtgcccggcaggtgggcaagaccacgctgattgggcagttcggtgcagaccattatgagcatgtggctgaggtgaatttcatcgaaatgcctcaggcggtcgaaacggtaagcaaggccaaggacaccgaagacctgatactgcggttatcggtactttccggc

SEQ ID NO: 197 - DNA, 4577 bp, Unknown
  R101_18m  MAG No. k141_16814
aagaatcgcgtgcccaaggaatacgccgaacacttcaacgagcgctccgacgaagagaaggccaagggcggtatcaccgtgcggcaggcgcacgagcgactcgatctgattgagcgccgtaagccgctgtacaagccgtggttctccggtctggcctccgccctggcctgcgcggccttcgtgttcctgctcggcggcggcccatacgacatgatcggtgcgttcgtgggcgcgggccttggccagtggatgcgtcgccggctgtttgcataccatctgaaccagttcttcgtcacctttgtgtgcgtggccgcggcggcgctcgcctgcaccggcaccctgcgactcatcggcattttcgacccagtcgcgctctcgcacgatacggcctacatcggcgccatgctgttcgtgatccccggtttcccgctcatcaccggcggactcgacatggcgaaaatcgacttcccctcgggcatccagcgcgtggcgtacgtgctgtgcatcatcctgatggccacgctggcaggctgggccgtggccgtgatggtgcacctgcacccggaaggctttgaaccgctggggcttgacccgtgggtcaacggattgctgcggttcgtggcggcgttcgtcggcgtgtggggcttctccgtgctgttcaattcgccgcagcgcatgtgcctggccgccgccctgatcggtgcgatcacggacacgctgcgcttggaattgcaagacttcaacgtggcacccgagatggctaccttcatcggcgcgttcctggcgggcattctggcatcggcgtggcgttcatccgtgcgacgtggctggctaccgccgcacctcggctacccgcgcatctgcctgaccgtgccgtcgatcgtgatcatggtgcccggtctgtatatgtaccgtgccatgtggtacctcggcagcttccagaccatgaatgcgctggactgggcgttccgtgcgttcatggtgattatctgtctgccgatcggtttggcgatggcccgcgtggtgaccgacaagtcctggcgctacgacatctgaccgtcatcttggctcccctcaggtggggagctcggataaaacagcgtctcagtatggaaacggtggaaggtgcttgagcccttgtatccactaccatcaggcgaagtgcgttgcggccgtattcacggctgtgacggtctgtatgacgccgctccggcgtcaatcgcatatcagcacgcatatcagcacatagttctgccatggcggtagccgcttggcgtcatgattggggaggtgtcgcagttggccaacgatttctggattctgctggccatggtcatctattttgcggccatgctgtccatcggattcatctactccaaacgctccaactcctcttccaaggaatactttgcgggcgggcgcggcgtggggccgtggctcacggccctgagcgccgaagcctccgacatgagcggctggctgctgatgggcctgccgggcctggcctacttcaccggcgcggccgacccgatgtggaccgccatcggcctggcgctcggcacctatctcaactggaagcttgtggcccggcgactgcgccgctactcggtagtggccggcgatgccatcaccattcctgacttcttcgccaagcgtttccatgacaagaagggcgtggtctccaccatcgcggccgtgatcatcctggtgttcttcagcgtgtacgtgggcagctgcttcgtgaccgtgggcaagctgttcgccacgttgttcggtttcgactaccacgtcatgatgatcatcggcgcggtggtcgtgttcgtctacaccgtggtgggcggctacttgtccgtggtgatgaccgacttcattcaaggcatgctcatgttcttcgcgctcgcggtggtgttcatcggcaccgtggccagcgcgggcggcatcgacaacaccgtggaattcctgcgtgccatccccggctacctgtccggcacgcaggtggccgcgcccaagctggacccggccaccggccagcagctcgtcgaggcgggcaaggccgtgttcggcgcgccctccgactacggcatcatcaccatcatctccatgctggcgtggggcctgggttacttcggtatgccgcaggtgctggtgcgcttcctgtccatccgcagcgtggaagaagtgcgcaagtcccgaatcatcgccacctcctggtgcgtgatttcgctgggttgcgcggtgtgcatcggcttggtgggacgtgcgatgatgcccaccgaactgctgacctccaccgatgcggaaaccattttcatcgtgctggcgcagaccctgctgccgagcttcatgtgcggcgtggtggtctccggcattttcgcggcctcgatgagctccagctcctcgtatctgatcatcggcgcttcggccatgggcgagaacatcttccgcgggctgctgcaccgcaaggccaccgacaagcaggtcatgattgtggccagggtcacgctggtggtcatgttcctgttcggcattctggtggcatacgaccagaactcgtcgatcttccaggtggtgtcttacgcgtgggccgggcttggtgcctcattcggcccgttgatgctgtgctcgctatactggcgtcgcgccaacaaggccggcgccgtggccggcatgctgtccggcacggcggccgtgctgatctggcacaacctcgtcaagcccttgggtggcgtattcgccatctatgagctgctgccggcgttcatcatttcgctgctgttcatcgtggtggtttcgttgctgaccgccaagccgaacgagcgtatgctctacgaattcgaccactacatggacgatccgctgcccggcaccctgccgtccggcaccgtgctcgtcgacgagcccatggaagccatggagtccgaggtccgcagcggcaaatgacacgtgcctgctgtgcggtcgcctcgtatggcagaggagtggcttttttgtggttcggcaggaaccattgaggccaaaacggacttcgaggggctgatttgacgttctggagaggtctactgccgtttcaaggggctgatgcctgagtagacgcggctccaaaacggcggaatggcgttggcgtaagggcattgatacacgtgatctagcggatgatcagccccttgaaacggaagtagacctccggcggaggccaaatcagccccttgaaatgggttttgaataccgtagcgcggtgcggacggtgcggactgactctaccgggcttattattcctgcgtcgtcggaataattggcagcagaggctcgaatttcagccgtttgtacagcggaatacggcgtagctttcggacatcgctaatttgctgggtggtttgccgcatcgtgagctggaccgttttgcccgtaacctcctgtatcctctcggcaactcttcgggcaagggcctcttctcccgcttcgtcgccaatatctaatttggtgacttgaatgtacttccagccagcgtcttcgatcatctggcggcgtctcgcgtcattcagccattgcccggcatgatgagagccttcgtattcgatgcataccttgaattcagggtatgcaagatcgagatatatgggtctggtgttgtttcctacgaatattggataattcacctgcgggcaatccagaccgtatttcaagagaaccaaacgagttcgtgtttccatggaggaatctgtgcccgcgcgcgccaaaagcagggcgcgacggcatttgttatacccgcggaacaaatacgaattggtgccattctctttgtcggctcgcacctgggcctcggcctcatcgagatacagagaaagggcgtcgatggttgttctgcagagccttcgatctcgtcgcatcatggaatcagcgagaacgatgagttcttcaagttcgagatacgcggagaacatggcccatgtgcaagctggtgaagtgcatgtgaattgtccctcgattatgaccgtgtctagtgggaaaggccatacaaccactttgacccccacaatgtgccgtttgtcattggcgtgtggaaccgcaacaatggttgtagttgcaaggcctctgtgtttgcttgatatgcggggtacttcaattgacaaaagctccaatgctgttgtcagggcatagggtgggtgccatgcgcttcgtcgttgaacatctgcgcacgtctgcattcgttgatacttctgcattgtcagctcggtcaatgccgttgagctacccatgatgatcaccccttcgtgatgttcgctttgtcctcgcagtgtagagtccggctaccggccttgtctaccgccccaatttttcggtggataaatgtggataagtcggtggataaactatgggtgttcatcgcagttgcaggccatcccgcaattacatggaacgtaggggtttgcaggcagccagcgggaatcgccgccgacggcgcgattcagcttgaacgaatctccatggcgttcatgcaaaggtggcatgatggcgggtatgagtagcttggtgcgtattgtcaatgccggtgttccggggtctcaggaccgcgtgga

SEQ ID NO: 198 - DNA, 3858 bp, Unknown
  R101_18m  MAG No. k141_16955
ccagccccgccccggatcaggtcggcgacgacccgcatgaaaccgtcatcgtaatgacgcctgcgatccctacacatgagaaaccgcacctccgatcatcgaatctgaattacttcagtccaacaatcggggtgcggttcagtctcagacgagggagcctcatttgttaattacttttcggcttcttcagcggcctgccgggccttgagctcggccttgaccttctgggcgtattcgttcacgaattcctgaccgctcattttctggattgcggtggaaacacgatcggtcagcgaacgcaaatcatcatgtgtaatttcatcagccggcttcttcgcaacctcaatcggcttgccgtacaacaccttggtcttgcccttcttgggaatcgacgtgccaatcggctgcagcttgtccgagccgatgatggcggtcggaacaatcgggcaaccggtctcgagcgcaagtcgtgcggcaccggtgtgtcccttgtacagtcgaccgtctgggctgcgcgtgccttcaatgtggataccgaacaggtgcccatcctcgataatctcgcgtgcatgctcgagtgcgccaagcgacttgctgccaccggaacgatcaaccgggaacacgcccacggacgtgaaccaccacttcttgaacttgcccttcaatcccttgccctcgaagtattcggctttgcccatgaagtgcaccatgcgcgggcaggtaatcggaatcaaagcatcgtcgatcaccgccagatggttggctgcgataatcgcgccaccctctcgaggcacgttattcagtccgctgacagcagggctcaaacgatgatgagcaatagggccgagacctttgacgaagaaccagtagagcacttggcattcctcccgcagacgaactagccattggccggtcgcctgattagagtgacagttatgactgagaaccagaatagcaatgccgacgaagagcggccaacccccacgccgggcaacggacaggattccgatacttcgtccaagtcgtcgactcccggtgccgccggaccggccacgaatggtgccgatacaccgcaatcgcatgacatgaacgatttggatgcggcgtgggccgcgttcgaagccgagcatcaggccgacttgcatgacgtggcttcctccaggcaggccaaaaagttcgagaagcaggccaagaaacgcgagaaggaagcactgctttccgtagatgacttggatatcggctcgttcaccgatgatgctcgcccgagccgtggcggcaaaaaaggcaagcagtcaggcccccgtgatttcaccggctccagctggctggataccgataatgtgatggacgcctatgatgatggcggcttcactcccccgaaccctgatcttggtccggtcaaagcatctacggtactgctgacggcgttgctcatcatcggtctcgcaggcgaaacggtgatgatattcgttcccggcttgaacgcgattcctctcttaggcgcgctgctcaatattctcttcgggctgggcgtcattttgggtctgggcggattggtggccaaaatcctcaaccgcaaagaccgcccaggggaccggggcggatactacgacgacggcgcgcgggtctaacgcttggactgggcggtttcgatccacttgttgaacagggcttcagccttgccggagtcgacagcatcctcggccagcttgtaggcctcggcgaagcgctcggccagtgtgccgttgccgaccagattgccgtcagccacgatggcggaggcagcgttgagcagcgcggtggtgcgggacgtaatgtccttgccggccaggaagtccttaaatgcgttggcgttgacgtccggcacgccgcccttgagctggtcgacggtaatcttggcgagacccagatccacggtcgggtcgaactcggtttcggtgaccttgccgtcgcgaatctcccagacggaaaccgggccggtgggggcgagctcatccatgccctcatgcgaagtgtagaccaagccggactgaccacggctggcgtagacggcagccatgatcgggctcaccttgcggttggcgcagccgatggccacgtgtgccgggttggcggggttggtcaacggtcccaggatgttgaagacgcacggaatgccgagcgcggcacgaatcgggcccacgaagcgcatggccgggtggaaggtgcgggcgaacgcgaaggtgatgcccacctcgtcgcccacttcgccgacggcctccggcttcaaatccagcggcaggccgaggtcttcgagcacatcggcggcaccgcacttcgaggatgcagcgcggttgccgtgcttgacgatcttcacgccggctgcagcggcggccacggagcccatggtggacaggttcacggtggcgaagccgtcaccaccggtgcccacgatgtcggtggtcccaccggaaacgttcagcggcacggcgtgggagaccatggccttggcggcaccacgcacctcgtcggcggtcagtcccagctgctgctgcatagcgagcgcggcacccacggcggccggattggcgttaccttgcatcaggtcgtccacgaaccactccgattcctcagcagtaaggtggtctcccccgaccagcttggtgagaatcgacttccatgtgatctcggccatgatgccctccttggcgtttcctacgccgtgtgatgtatgttcgccgctcattgtaatggttcgtcatttcaaggccctgaatcttccatattgcaaaatatggcgctattgctgttttcgtggatgtcggttcgtcgtcgagccgttggtttcgtaagcgtgaggggcgttcccgcgtattctgttttccgaccaaagaaatgaatcacgaagaacgcctgggcaaaagcccattcaccggattgccgaacgtcaaaggcacggttgcagaggatgcgcggatcacggattcgccgccgcgttccgaacccgtgctcgagatccgggtgcgtccacgtgcgggtatgctccgatgctcccgatgcggaaggaggcgccgcgggcatgaccagggcggcggcgtgcggcgtcgtggtcgcttccgtgccgtgggccgagccgggcagccggtccacacgcgatttcgaatcggaacgcgcgtggccgatgagcgtcgcgaaccagaagaccgtaagcggttttccgcacgtcgcgtggcgcgccgccggaagacgccgcccatagggtcgccgaacggttgaaagcgtcgatgccgtctccgttcggcgacctcacgtcgatcggcgtggacgagaccggctaccgcaaaggccacacgtgcatcaccgtgatcgtcgaccacgaacggcatcgggcgatatgggcgcacgacgggtacggcagggacgtgttcggcctgttcttccaaacgttgacgcccgaacagcgcgcctccatcagggtcgtcgccggggacggggcccggtggatcgactcatgcgtgcatgagtggtgcccgaatgccgaacgcgcgcccgacgggttccacatcgtcagttggacgagcgacgcgcccgacaaagtcaggagacacccgtggaaccaggcgcgccgcgacggggacgagaaatccgtcaagcgcatgcgcggcgtcagatacaccgtcctgaagaaccccggcaagctgaccgacagacggtccgaggcgtccgggaacctgcgggacacggaccccaagggccggccctaccgttcatgacggctcagggaacccctccggacgatgcccaaacgaccggccgaccaggccgggaccgaactggaccgccgggtgttccgggcgtcccacagccgcatccccgaga

SEQ ID NO: 199 - DNA, 4051 bp, Unknown
  R101_18m  MAG No. k141_17128
acatttgcggccatccatgatggcccgatgtgcgactatcacgacaccgaagcattgaccttcttcatggatgcgctgaaacgccatgccaaggcaaagggtgcttcacagctggaaatcacccctgaatccccgtatcggcttcgcgacaccaatggagcttctttgccggatgaccagaatggcgctcccgacaataagctgatagaacggctcgaggcgatcggcttcactcatggcggtttcaccgtgggctacacggcggttccacgttggcgctacctcaaggatctgaccggcattaccgatgagaaaagtctgctgaagtcctatgacaagcgcacccagtggagcgtgaagcgtgcccaatcgatgggtgtgcatgtgcgtgagctgtcggacgacgagttgggggtattcgcacgaatcgagcagcaaaccgccgaacgtcgtagcttcgaataccgtggcgaagcatatttccaccgtttcaaggaagcgtttggcaacaaggcgcattttatggttgccgagatccacatcgacgaatatgtagcggacatgacggccaagcgtgaagcactttcggccaaggtggcggcattgaccgccaaaaacgccgaacaccccaccaccaaaaccgaacgtcagctgggggaggagacccgcaatctggcggcagccgaaaagcgcctgaacgaggcggccgagttcgccaaagacggggatgtgctgccggctgcggcatcactattcgtggagcatccgcgcgaggtcatctacctgttctccggtagcgtcgagcagtacaagcccttctacgcctccgcgctgattcagcatgaagcgatgctgcatttctgcgtggaacacgggctgtctcgctacaacttctacggcatcgacggcgtctttgatgatcccgatgacgagggtcgtggtgtactggagttcaagcagggcttcaacggatatgtcgaggaacttccgggcgagttcgtgctgccggtcaaaccggttgcctatgccatgaagcaatttgcgcacaagctgctgtcgcggtaaacggacgcagcacacaggccattccagagcccagagtaacgatcagagtaacgacaagtaagaaggttcgattatgacgcaatccgatgcaggcgtcgcctcgctcacccctaccaagatcactcctgccgagctggatgcgttctccgcagctcaagtgcaaggtagtttccagcagacctcgcagatggccgccatgggtgcgttcaacggtccggtggactatgtgggtgtcaagcgcggtgacaagctgattgccgcctgctacgtggtgtacacgcggtcccgtttcggtttggaaggctcagtctggtgcggaccgctgtgcgattatgacaatccacaggtggttgaggcgatgaccgaagccttgcgtcgttcggccaaggcccatcacgccatcagcgtatcctgctggccggccgcagtctaccgtctgcatgatctggacggcaagccgaccagcgacccggacaccacgatgatggacaacatggcccgcttcggttggaaacatggcggtttcaccgtgggctacgaatccgtggtgaaccgctggaacttcgtcaaggggcttgacggcattcataatgagaaggaactgctggcctcgttctccaagtaccgccgtaagaacatccgcatcgcccaggattccggtctgcgcgtgcgccggctggaacgcggcgaactgagcactttcgtcaagctgtgcgatatgagcgccgcacgtcaaggcttcaagagccgcgatctggcctactatgagcgtctgttcgataccttcggcgacctgatcgagttcaaggtggtcgaaacccatttcgacgaatatctggacaccctgcaatccaagctgaatgcggcctccaaagacaagcgcaacctcgaacgcctgctccagcgcgcgcaacagcagccggaaggcacggccaagaagggtgcttccgacccggcaacgctggaaaagcgcatcgccaccgcagacaagaagattgcggcgctggaaaagaccatcggcgaagtcaatggcatcatcgcctcggacggtccggtcattccggtggaagccggtgtctacttctggcatccgaacgaggtcgtctgcctgtccagcggcgaggacgatcgtttcatggattactacccgtcttccctaatccacttcgaggcgatgcttgactgcatcgcccgtggcgtggagcgcttcaacttctatggcatttccggcattttcgacgccaacgatccttcctacggcgtctggcagttcaagactcgcttcggcggattcgtggaagagcttccgggcaagttcacgctgccggtggacggactgcgcttcggtgtatccgaagccgcacacaagctgctgcatcgctgacaaacagtggcgagcacggacacagaaataaggcacaggtgacgacgagatgagcgcgactgtgaatcgaacagatacgacgtatacgtttggcgtgattacgcccgaagagctcgaccggctttccgaagccacaagccagggcagcttccagcaatggtccgggcaggtccgtcttgccaagattcgtgggcatgaagccgaatgcgttggcgtgtgcgacgcatccggcaatctggtaaccggctgcgtgattctgtacctcaatggtcgtttcggtgcagatggctccgtatatttcggccccatcggcattagcgatgatccggctctgctgcgggccataaccgaggcgattcgtgaatcggcccgtcgccaccatgctgtttccgtggcatgctggcctaacgtcgcctaccgtctgtattcctcggacgggcagcccgacggcgagccgaacgatgcactgctgaccggattcaccgatgccggctggacgcatggcggattccataccggttatgacgtggtctgccagtggatgtacgtcaaggatctcaccggcatcaccaacggcaaggaactgctggcatcattcggcaaacgcgctcaatggagcgtcaagcgggcgcagtcgatgggcgtgcacgttcgcgaaatcggccccgacgagttcgacgtgttcgccgatatcgaacggcggaccggtgaacgccgtgggttcgcgacgcgtggcgcggactatttccgccagttcaagcaggcgtatggcgcggatgcgcatttcatgctcgcggaaatccacatcgccgaatatgtggcggatatgaccgccaagcgcgaggccttgcagaccaaggtcgcacagctgcagacgaaatacgatgaacgtccgaccacgcgcatcgaacgtcagctgggggaggaatcgcgcaatctcgcggccgccgacaagcgtctggctgaggtggagggatatgccaagaagggcgatgtgctgccggcagcggcttcaatgttcgtcagtcaccccaatgaggtggtctatcagtattccggttcgttggaggagtacaagccgttctacgcctcggcgctgattcagtacgaagcgatgctgcacctgtgtgtggaacagggtgtgagccgctacaacttctacggcatttccggcgtgttcgacgatccgaacgacgagggccgcggcgtgctggaattcaagcagggcttcaacggctacgtcgagcagatggtaggcaaattcacgttgccggtggacaagttccgcttcggcgtgagcaatctggcgcacaagctgctgcaccggtagcagctggcggccgggggacgaacctatgtgggctgcgtctcgcctgaccgtgtgcccgccgtgcgcccgtcgtgtgcctactcgcgcatttgctcacacgcccatcagcacgtgagcaaatgccatcatcaccagtgaaatcatcgcggtgattgccagcgagaagccggccagtttggcgttgccgagtactttgtcggtgaacagcgtggagaaaatggcgattggagccaacgcgcagatcaccatcacggcgcgaatcgaagccgaga

SEQ ID NO: 200 - DNA, 19137 bp, Unknown
  R101_18m  MAG No. k141_17376
actgctcataggaaggttgcgctgaagatgctgcgtacatcggtacatcatcggcagatggaatcggcccaccatccccctccacggcatcggcaactgcttccagggcaatccgatctgtggatggttcgatgggcgatggagaggcagctgttgcctgcgtatccacatccgagaccggcgcatccgcatgatcgtcggggacgggtagcacagccgtttcgtcatcatcagctgcggatggcagcaccgtggtatcggttcggtcatcgacggtcaccatggttgttgtcgcggtggtcgcgtcggtttcggaaggtatggccgtggtcggtgtcgcatcctcgatggaggcgaattccttggtttcatcagtcatgattccatctcctggttgtaacggcttgatcattccgattgttcggttgtgttcttgcttgtactgttgccgtcgtatatatcggcaagcggctggaacgtggagcctttccaatcggaggcgtacaccacgttgacacgtgcttccaccgcatagggaatattgatttttaattctgggccgttgtccggcatggcggatcccttatccaaccattcgtaatcaggcccattcatgggattggtggcactttcagcttcgaagaaaccaaagcttagacccatgtagttgttgtataccatctcgtatttgccgccaacgccactcgaagtgaagtaggagtcggcggtgccgaaggcgtaagtgcaggaatccggcagaacgatatgcacttgcgcctgtgttgcggctatggtgatggtaccgaccgggcaattactgatggaagttttgccatccagcatcttcaccgtgtgcggcccatgtgtcttgccccaatcggaccaatcaatgatcgcctgatcggtgttgtagttttcaccgctgaacgccacaccttgctgcaatgtttcgaacgtggcatcgctggcatcggcaacgaagatgccatccttttgcacatcgttcatgccatcgctgtttctcgcactgacagattggctcagtgaaacaacagtattgatgccgctggcaccaagatcacggtagtgcacgccatacgtgcctgaaacgatggtcatgcagagcgcgcatccaccggcaaccagtccgagaggaatcagaccaccggtacgccgccctctgaatccgagaatgatgaccaccagccccatcactatgcatactgcggcaatccagatggtgctcagacgcataatgccgataatgcccatgtcgtttacccaaatcagtcccatcagaccggcaaaggagaggaaggtaaggcccagtatgctcaagaccacgattgggcccgccggcttgcggcgcttggactcggtgggggcataagccgtcgcattcatacggtcgggggcaaacggcccgttgggtactgtgccgggcatcgcgctgggcactgtgcccggcatcacgctgggcatcgactgatagacaggctgtgaaacaggttgtgaaacactaggcgcggttcgtgaaacagattgtgaaacaggttgcggagctgaatacaaaggagatagagggaccggttgcgcggctggatatgaggcaggctgtggagctggatacgacacaggctgtgaaaccggtcgcggcgcagatgccccgaatccgtacccttcctgctggcgaatgccgcttttggccaacaaccatagcgctaaggcggcgagcgcaatacaaacccaccccgcacctggaatcacgattgccacggctaggaacaggaagcatccaagacaattccagtcccattggccggcaatgaggtcctcggccaagatgtgcccatcgcgtacatccggcatcagaaaccagccgagtgcgtacagagctgcgccaaaaccgaagaacaatgtacatacaatcaccaacgcacgtactaatgtggggctccagccaagccgtaaagcgatgccgctgcatacgccaccgatccaccggtcgtcgccgcgaaccagtccactggatcgcacccaagtgaagaagcgtcgcgatgtcttgtttttttgcggaccaggctgcggctgtggctgatacggattcgcgtttggattgctcatgattccattacaccgcccgaccactgccacaacgctcggggaacaccctgattgttccctgaacaccgggtaaaaccccggccgcaacgccctgagcgcggcacaataggagtatgacgtcatctcccgaaccattgctgcccgcgcgcatgccgctgatgcgcccccggcagggccgctggctcaccggcgtgtgcaagggcatcgccctgcacttgggcatcggcgtgacatgggttcggattgcgttcatcgctctgaccttcctctacggcgcaggcatcatcgcttatgtattcctgtgggtgttcatgcccgccggagacccggtgacggctgcagctcgcacagtgcccgttgatcaggcgccgcttgcgcgaggcaatcagccacttgccgctcatgacgacgaatcggctgccgcaccggaatcattgtccgaggccatccaacgtgctccgaaaccggccgtcgtggcattggccggtttcgcgttgatggccaccggactgctgctcaccagcaccggtgcggatgtccagattgtgcttccgctgctggtagggttgggcggcatcgcactggcatggatgaatcttagtccgcgaggcacgcagctgttgtctatgttgggcggcatcgcactgattttcatgggatgggcattgtatgtgcataatgtcagcattcccgggtggggcagctctcctcgacgcattgttgccagcggattcgtgatgatcgtcggtatcgtggtggcggtgatgccgtgggcgaacgcgatgctgcaacgactcacccacgagcaggcattgaaggaacgcgaagaggagcgcgcggacatgaccgcccatctgcatgatggcgtgctgcaaacgttggcgctgattcagctgcactccgaggaaccgactaccgtattcgccctggcgcgtagccaagagcgcgagctgcgcgaatggctgtatcaggaacgttccacatcggatcgttcggtgggagccggattgaagcagatcgccgccgaggtggaggacgagcacggcaaaccgattgaggtggtcaccgtgggcgacgcgcggccgagtgcccagaccgatgcgctgctggacgccacccgtcaggcgttggtcaatgcggtcacgcatggcggcgagccggtgtctttgtattgcgaggccagcgacacgatggttgaagtgttcgtgcgcgaccatggcgaaggcttcgatatggacgccattccgcccgaccggctgggcatccgcgaatcgattatcggccgcgtcaaacggcgcggcggtacagtggagatagtgtccagggccggctggggcaccgaggtcagaatgcatatgccgatcgcgctgaaagcggcgcagggagaacatcgatgagcgagaacgagacagccaagattcgtgtggccgtggtcgatgaccatgagatgttccgtgcgggcgtaatcgccacgttgcgtgattccttcgatatcgtcggccaagcggcggacgtgcccggttcggtggcgatgatcgcacagaccaagccgcaggtggtgttgctggatgtgcacgtgcccggcggtgaaggtggcggcggtgccgagatcctcgccaaatcgcggccctactcccccactaccgtgtttctggcattgtcggtttcggatgcgccgcaggatgtgggggcggtgattcgcgccggcgcccagggctatgtgaccaagacgattaccggcgctgatttgatttcatccatcaagcaggtgcatgagggctatgccgtgttctcgccaaaactggccggttttgtgctttcggcctttcagggtgtgccggcggcggggtctgatggcggcgctgatggtgcggcacgggctcatgatgaggagctggaccggctgtccgcccgcgagcaggaggtcatgcggctgatcgcgcgtggttacacgtataaagaggtggcggccgaactgttcatttcgatcaagacggtcgaaacgcacgtgagctcggtgctgcgaaagcttcagctttcgaatcgcaccgagctcacccgctgggccgccgataggcgcattgtgtgataaacgacagatgagctccctcatcagagggagctcatctgctcatatcactcggcgtcgcggaaaccgttggggttcttggtctgccagttgagggaggaggcggccatgtcgtcgatggtcagctcggccttccagccaagctccttctccgccttggaagcgtcggcgtagcaggcggcgatgtcaccggggcgacgcggcttgatcgtgtacggaatcggatggccggcggccttctcgtaagccttgatgacctcaagcacggagtagccgtggccggtacccaggttgtagacgaacacgccttccttgtcgatgtggtcaatgacggccacgtgacccttggccaggtcgaccacgtggatgtagtcacgcacaccagtgccgtcgggcgtgtcgtagtcgtcgccgtagacctggacttccttgagctcgccgaccgcgaccttggccacgtacggggtgaggttcgccggaatacccttcggatcttcgcccagcaggccggactcgtgtgcgccgaccgggttgaagtagcgcagcagcacgatggtccaggacggatcggccacatgtacgtcgcgcagaatctgctcctggaacagcttggaggtgccgtacgggttggtggtgccgccggtcggcgtctcctcggtaatcggcagttccttcggcgtgccgtacacggtggcggaggaggagaagatgatcttcttgacgttgtgcttcttcatcaccttgagcagcacaagcgtggagtacaggttgttgtcgtagtattcgatcggcttggccacggactcgcccacggccttgagaccggcgaagtgaatgacccaatcgatgttgttttcggtgaagacgcgttccataagcgcctcatcgcgcacgtcaccgtcgtaacgcttgaccggcttgccggtgatctgctcgacgcgctcaagcgccacgggagacgagttgccgtagttatctacggaaataacgtcgtagcccttgtcgagcagttcgatgtcggtgtgggtggcgatgaatccagcaccgcccgtaaccagaacagtagtcatatctcctcctttggaaggacttgccttcggttttccttcagtattgagcttacttcacttgacctgtttcacctagcggcaaaaccaagactttcgaggaatgtttgcgtggtggctttctgcttgaagacggccgtgttgccgaggatgcggtagcagacgctgccgagctcgtcacgtacggcttggtggatggcctcgcggtcgcggtttccggccaatgtttcagcgagttcgccccattcgagactgaattcgctgacttcatcgggcaaatcgcggccttcggcgagcgcctcctcgacgatgccgagctggtcgacgagccgtccgggcaggatgaacaggccttgggcttcgatcagtccaatcggctcctgcttgaccggccagtattcggggtgtgcatggaaaataccttccgggtactcgtcgctgatcgcattgttgcggaagatgagactcatctcatagccacgttcggtgatgatcgcgctgggcgagagggcggattggcggttgccgtccgcgtcatggctggcgatgccgttcgccgcgtcgtcataaccgacccatgcctcgcggatgatgtcggatacgtcgatgatgctctggcggtttttcgacaccacacgcacggcggtaccgggccagtcgaggatttcgaccacggcgtccggatagtcggcgagcgtgaaggcggcccaagtggcggccttgtgcatcggcagcagttcgccgccgccctggtagtggtcgtgggcgagcaccgagccgccgatgcgaggcagcgcggcgttgcatccgaggaagtatccggggaagcggtccacgaagtcgagcagatggccgaaggtgtcgcggtccacatgcatcggcgtgtggtcggtgttcacgcagatgccgtgctggtcgaagtagccgtagggcgagaactgccagaaccatgactcaccgccgagcgtgaccggcagggtgcgcagcgtgcgcttgtcacgtccggcgaagccctcgttctcatggcagatcgtgcacttcgggtagccgccggacacggcgttgccggccgccgccttcttcatgttcttgaattcgggtttggcgaggttgatggtcaccgtcagcccgtgcgagtcgaagcgcgggttccggtcgagctgggcacgcttgacataattgttggccacacagtagtcgtagaaccattgcatggcggccatgccgccgtccctgtgctcgatgagcaggaaccggtcgtcgagatcggcggggttggcggagaggatgcccatgatggtgtcggcgtaggccgggccttcctccggatcgaagaggccggcggttggggcggcggcgcggaaggcggcgagtaggggggcgggggtcttttcgtcagagggggcctggcttcggctgccgacaatgtcttggactgcgtctgacactgacgccgccgacgttgtggttttgggtccggggtaggaatccaggtggaagagggcgaagatttggttgcgggtccagtctgcgttgcgtggatcgaggtcgagatgatccaaggcgtaatcgactagggcgtcgatgctggcgtatacctcggtcagctgatcgctcattgctcggcccccatcatgctggttcgggtatggttcgactgacggctcacttggcagcctccatgatgtcggctacgatggcgtgggtttcactggccttctgctccatctcctgcacgagtttgatctgggtgcgggtgcgcaccagattgtgctcggggtacttggtggcaaagtagatatcgccttccaagtagtcggcgagaaagcgcatgccgcattccatggtgagcaggttgccgctgaacggcagcagttcggcctcgcgcgcggtgatgctgccacgtagttcgcccacgaatccttccgtgtaggcacggaacagctcggtgctgaaatgcaccttgctgaggtccttttcgtcttccagagcagtggacgcaccaaagcgtatggaatcgccgaagtcgaacagcatggagccgggcatgatggtgtcgagatcgatgaccgcacgcgccttgccggtggtggcgtccatgaggatgttgttgagcttggtgtcgttgtgggtcacgcgcaacggaatcgaaccgtccctgagcccatccatcacgacggcatactggtcggcgtggctcagatagaagtcgatttccggctggcatgcggcggcgcggccgagcttgtccgcggcgagggcggccttgaagtcctcgaaacgatgcggggtgtcgtggaagcgggcgatggtttcggtcagctggctggcgtcgaattcggacaggaagttctggaagtcgccgaatgcgctgccggcctcgcggaacacgtccgggttcggcacgaggttgtacgacacggtgtgttcgatgaacttgtagacgcgccatgcgccgccatcgatctcggcccaggtggcgccggaggtggtgggcacaatgtccagcgtctctttgccctgagccttgagagtggaggtgaccagttcgacattgcgcatcagattcaccgtatcggggaagatgctggtgttcatctgttggaggatgtagcgggggccgtccgtggtcaccagataggtggtgttgatatggccgtctccgtaaggttcgatgccggtcacggcaccttccagcgcaaaatgcgaggcgatgccgaataaaacttcattgctttcggtcatgatgggtccgttctccaaaacgcgggaatcaggcttcacgccatgcgatgccgctgtcgggcaggtcgaagtcctcggtggtgccatcggccagagtcaccgtggtccgctgcggctgatcggtgttgttgattacgcagtacaacccttgctcggggaagtgcgccacctcgcactccgggttggacgagctccaagccgcatacttgtcttcgttgtgggaggcgtagaacagcacgcgttccagcagtcgggcgttggccgccgaatagggcagaccggagatgtacacaccgcggccttcgccataatcattggtcgcgagctgcacctgccctccgtccgcgcgcagcagggtcacgttttcattgaccggatacgtgttgagcacgggttcgccgaagtcgatgccgcccaacggcttgatggactggccaccgccgcaaccgctcagcgggatgcggtagccggcctgttcccaagcctcgcgggccgccgggtcgaccggcacatcggcggtgatgaagtggtccggcaccaccggtgggaagtacttgtccacggagagggtctgatagcgctcctcgtccacgccaatcacgtcggccagctggaagaaccggcccgcttggaagcgcggtgccgagctcggctcgcccacgcccacgaacgcgccgccaccacgcacccaggcgcgcacggtttccacgagcttcgggttggtccacacgtcgccgccggtgaatgcggtgtcgaccgggccgccgttgatgattacgtcgatatcactatcgatgccatgcgcgagtacgtcgtcgaagctgatgaaccgcacgttcacgcgcatgccggacagggattccagaatgccgtagtaggagtaggtctgcttgttgggcagggcgtgtgccacggtgaacgccatccaggaacgcatcttgccccaggaattcagaatcgccacgttgagctcgccttcggcggccaccccaccggtgcggtcgtggatgtcgcggaattcgtcggcgatatgggtcaccgtgtccacgaacttcgggaacttggcggccaaggagaggtagccaccgtagcccatacggccgatcggcgaacgcaggatcgcgcggcgggccttacgccagttgtcgaggccttcgatgctcgggtcgttgccctcgtagaacgtgtcggggaagaagtacggcaggaagcgtccttccgtgtatttgacgcccggaatgtccgcgatcatgcgggtggtggtgccgtctccgatggagccgacgaccgcatccaaacccagcttttcgaacccgtccttatacggttcggtaccgatccactggtcgccaaggaacatcatggcttccttgcctgccgcgtgcgacatgtcggcaagccgcttgacgttctcgcgcacgaatccggagaggaagtcaatccagtcgcgttgcgacttgcggggcacgcgccacgcggagttgtaggcaccgccatccacgaaatcctccggacgcagacggtaaccgtactccttctcgaaatcgtccaatgcgcgcgggctcacggtgcaggcgcaaccgaaccagtcgaccaccttttcgcgacgcttggcatcgaacaggagcgtgaactggtagaagaacgtggtgaaacgcaccacatccacctgcgggctgtccttcagccactgctcgaacgtatcgaacacgaacttgcgggtggccggatggtagatgtcgaacggaatctcgtgttccttgtctccccaatcattggtcaggtggttgtacatctcgaccgggtcccagatgatgtaggccaggaaactcaccgtgtattcgtgcatcggcacggcagcggtcacgtgcacggtgtcctcgcccgggtcgagcgtccagccggacgggtccacgacctcgcccgtggtgcggtccacgacttcccagtacttatgagggtcggcgtcacggttaggcttgagctgttcctcgaagaaaccgtccatcagcggcacatccaccgcgttggactcggccaggatacgggcggtcagcaggtagacctgcggggtctcgtccatgtgcagggtgatccactcgttgtgggcgcgggtcgggaagtaggcgctgtagattttcttgccaagagcgagcactgcctcgtccagatgcgtgccgtcggagttgcggatggcgtccgcaccccacaattcggcgagttccttggtcttttcggcaaaattctcttcactgggcagcgtgaagcggccggtgctggtcatgagtgctcctttgtggggttggtcatcaaaaaactacaaagcgacgaattcgtcgcatacaaaatgaccggcgtcatcgcgggccctgggaccctgactgcgtagatccttgacgcttacggtgacgccggacgattggaatcgtgtcactgaatatgggagggacgttgcccggcaccggaaggagtgacacgacatgccgggcagcggattggttagcccttgacggcaccggcggcgaggccggactgccagtagcgctggaggccgaggaacagcacgatcacgggcagcacgccgagcaacgcacccatcatcagggcgccgcgatcggtgaacgtggccagcgagaccatgccgtacagaccgagggtcacgggcttcaaggtgtcggaagacaccatcatcaacggcagcaggaagttgttccacgtggccacgaacaggaacaggaaaatcgtcaccatggccggggccaggagcctcagcacgatggtgaagaagatcctcgcctcgctcgcgccgtcgatgcgggcggcttcaagcagttcgtccggcaccgaactctgtgcgtacgtgcggcccaggaagaagccgaacggcgaaacgcagcacgggatgatgatcgagagcatagtgttggtcaggtgcaacgtgtggaagatcgagtacatcgggatggtcagcagggcggacggcatgagcatgcaggccataatgatgccgatggccgcgttcttgccgcggaagttgaattttgcggtggcgtagccagccatcacagacacgatggtgccgatcaatgccgagacgcccgagtagatcagggagttcagcacccagcgccagaagttgccacgagtccagccaagcagtttggaatagttagtggcgatggcattgggcagctggtcaagcggcacagcaaaccacatgccgttgctaccggtcatctgggccggcgtcttggtggacgcgatgatggcccagtaaatcgggaacaggaagtagatcaacaccagtaccagcagcaccacggtgagggtcttcacggccgcggacggtcgcatggagcgaggcaaatcgtgttgcgcagcctgacgctgcttttcgagcttgcgctcggcctttttgcgggcgcgttcttcaacggttgcggagctcattactcgttcaccttcctttcggccaaggtgtacagcacggcaagcacacctgcgatcagagccatgacaatggcgatggccgaggccggaccgtcaccagacggggtaatggtgccctgagaagtgttcatggccatcatcatcggtgtatacgacttggaaatacccggatcagccgtagacatgatctgcggttcgttgaacagctgaatggtgccgacgatggaaagcagcatggccagcagggccgcgccacgcacgttcggcagcttgatcttcgtggcaatctgccaaccattggcgccgtcgatacgggcggcctcatagaggtcatgcgggatggcctgcagtgcggcaaggaaaatcagcatgttgtagccggtgaaggtccatgtggtgatgttggccatcgagccgagcacgatgttcttgttgaagaagtccacattgacgccgatggcggcaagtcccttgacgatcggcgagatttggccgttgtacaggtagacccagataatcgaggccacgacgccggggatggcgtagggcaggaagtagcccagacggaaaccggtgacatgcttgaccacgaacgagtcgatgacgatggccaacgccagtgcggcgatgatcatgatcggcacctgaatcagggtgtagagcagcaccctgccgacgccggaccagaagttgccggaagtaatagcatactggaagttctggaatcctacgaatttattgaccagctcgccaccgccgtatgcgccaccgccctcggtgacctgacggaagaagctggaatagatggcccagatgatgggcaagatgaacacgaaagtgaacaggacggcgaacggtgccatgaacgcccagccggtgcggttctcgcgcttctgagcgccggaccgcttcggcttggcggcggcacgcctaggtgctttgcccttcgcctgagtagtggatgcagtcataatacaaaacctgtcttcgcaaagaacagtaaaacaaatgacaagggccacagcgcccctgcagcaatacccccaaacaatacggaaggccggagtatgtgccccggcctttcgctatggtgatgcgaggcatcggaggtcttggacggccggctatttcaagccggcccgttgacaagacctagtgaggtcactccttgacggacagaccgaggttcttcagcgtatccaccgaggtcttctgagcggtgtcgaacacatccgaaaccttggcagaaccatcggcagccttggcggcggtctgtttcattgcagcgccgactgcggagaagccaggcatgtaggtgaagtcacccatgttgtcgttcgcggtcttgaactcagccatgacatcctgtccgctgaagtagtcggaccacttctgcggggtcttggcatccgcggtggtggcggccacgacaaggccctgggagacaaggtcatcaacctgggtgttgaaccagtcaaggaactccatggcttcggccgggtgcttggaacccttgagcacggccacaccggaaccaccatcggcgccggtcttggtgccattgccgaaccagtcaccgagctgggtgaccttccactcaccagcaccagtgccaccggcggaatcgatgaacagtggggcttcccaagcggcggccacggtgccgatcagctgaccggactggatggagttatcaaacgatgcatcccaacgcgggttggtgagggcggccttgttgtcgatcagctgctggtagacatcggccacggccttggagcccttagtctgggtgttgacaacccaggagttgccgtcgaccttgtaccacggaccggaagcgccggcctggccggacatcatcatcatggcctcatcaggttggaaggtcatgatgtacttgccttgggcagcggtcttcttggcggtctcaatgagctcgtcagcggtcttcggcacggtgatgccgagcttctcaaattcagcggcgttgtagaagtaagtcagcgggccggtgtcctgcggcagaccgtaggtcttgccgtccacctgcatcagtgcgaacgggccggaagcgaaatcgtccttgtacttggcggcctcatcggtgacatcctgcagaaggcccttggtgaagacctcaggaacctcggagtaaccgacctgagccagatccggcgcattgccagccttgacgtcggtctcgagcttcttgatcatgtcggcggcattgccatcgaacttggtggccttgacctgaatgttcgggtgctccttgttccacttggccacaatgtcgttgaccaaggtcatgccttcggaatcgggcagacgatgcatataggtgatgttgaccacaccgccatcgctgccggacttcgtgtcgccggcagtgtcgctgccgccgcaaccggccaaaccaatacccattgctgctaccgcggcaagagcagccacgatgcgcttattgtgcgataccatatctctactccttcctagtgaaatcatcacctcagcgtgatgactgattgctaatttaggcctttgctcttttattgtcaacttagctaacaattaccgcgcgtcccgttgaggtgagtggcattaaaccgattcgatgctcgattgtgcgggtttgttcatttcattaactccccttacaaagcaacgtacttttggtccaccggtagacctaatgagatattggatagcggcaacaatccaagacgtcagcttgcaatcgtccaccacaaattgcaagcacttgccaacattatcggttttcaggttgccggcgcaatacccgactaggggggcaccgcgccttaatgagacgctacacgagcagtctcagcaactggtagagctgccacaggctacgcacgttgaagtgcgtgccgtcaaccgtggcgttcacctcgccatcgcccacatggacgatcacggtgcgcccgttcacggtcagactaccgtgcatcgtgatatgattcatcttgcaaccttgttgattaaaagcgcaagccggtaatcaacgcaaaggcccgatgccgcaaacgtcgggccttttcttatcggctcacgccgattggcccgtcatatcaacggggacaccgcatgttacggcattacaaaccaatatatcagcaccccggtggcgatcaagaagacaggttccagaaaaagaaaaagggcctgggcatgttgcccaggcctcggttcgcggacagggcgagattcgaactcgcggagggttgcccctcaacggttttcaagaccgtctctttaggccgctcagacacctgtcctgatgcgcgttcacacgcgcaagtattcattatacagaagggagggatgttgatattcggcagtgcggtcggtcttggattcgcctgctggctattagcgatctctccctcagtcagctacgctgacagctcccccattaaagggagctaaagcacgatgagactcaggcctcccacttagtgggctcgatgacttccttgccgcccatgtaggcgcgcatggcctgcggaatctcgatggagccgtccttctgctggtggttctccatgatggcgaccagccaacgggtggtggccagcgtgccgttgagcgtggagaccggacgggtgccgccatcttccatacgctcgcggatgttcagacggcgagcctggtactcggtgcagttcgaggtggaggtgagctcgcggtagcggccctgggtcgggacccaggcctcgcagtcgaacttgcgggcggcggaggagccgaggtcgccggctgcggtgtcgatgatgcggtagggcacttcgaccttggcgagcatctcctgctccatggccagcaggtgctcgtgctccttgtaggagtcctcctgcttggcgtagacgaacatctccaccttgtcgaactggtggacgcggatgatgccggaagtgtccttgcctgcggcgccggcctcgcggcggtagcaggaggaccaaccgcagtagcgcagcgggccgttgccgaggtcgaggatctcgttctcgtgcatgccggcgagcgccacttcggaagtgccgaccaggtactggtcgtcgggctcgcgcagacggtagatctcgtcggcgtgggagttcaggaagccggtgccgcgcatgacctcggggcgcaccagcgtcggggtgatggccagcgtgaagccgtgctcctcggcctggtccacggccatggtgagcatggcgatctgcatacgggccacctggccacgcaggaagtagaagcgggagccgccgaccttgacgccgcggcgcatgtcgatgccggccacgccggtgccgagggtcaggtggtccttgggctcgaagccttcggccgcgaagtcgcgaatctggccaaccttcttgacgaccacgtagtcgtcctcgccgccttcgggagcttcgggctccacgatgttggagagcttccacatggcggtggtgtattcctcggcggcggaatcggccttggacttgtattcggagaccttctgggacagttccttggtctcggcgatgagcttggccttctcgtccgccggggcggaggcgaccttcttgccgatctccttctgctgggcgcgagcctcttcgaaggccttcagcgcctcacgacgtgcggtgtcggaggagagcacttcgtcgacgagttccacggactcgccgcgcttgcgctgggattccttgacgatatcggtgtgttcacggatgaattgaatatcaagcatgggcaccagactagccgcgtaagcagacaccgacaatggccgaatgcgcgggagtcacgcggaaatcacagggaagcccgggaaagtccgcggacgggtccacccggccaatttcgtcagatgagacgcgattgaaccataatcgcgccccacggggctgttgcgtgcaggaaatgttcacgtacggcgcaccatggccgcaaacgacctccccaccgataacaataggagccatgcctcagcctgccctcaccgtgtttctgatcatcgccgcaatcgccattgtggtggtgctcatcgccgtcatcgtcatcgccctgcgcgcgcagcgccgccgcaagctggctcagacgctggagaagcgccgggacgacgaggtgcagtacgccttcatcgtgaatccgtccaaaccgcaggccgaagcccgccggctgcatatccagaggttctgcgaggccaaggggctcaatcgcatccgcttctacgacacccagcttgacaaggacggcagggtctgcgcgcttgaggcgctggaggacggcgccgacgtggtgatcgcggtcggcggcgacggcacggtgcgcacggtggcgagcgccgtctccggcaccggccatgcgctgggcatcatccccatcggcaccggcaacctgtttgcccgcaatatgggcgttcccgtggacgatatcgacgccgcgctgaccgtggccacctcccacggctcccgcctggtggacatgggccgtctcaccctgctcgaccacccggaggacgaccacggccacgccttcctcatcatcgccggcatcggcttcgatgcggccatgatcgacgacaccaaccccgagctcaaggcgaacatcagctggctcgcctacttcgtgggcggcgtgaagaacctgttcgcgccgaagttccgcggcacgctgacagtcaccagcgccgacggctcgacccacaccatcaagaatctcgacttccgcacggtgatggccggcaactgcggccagattcccatgttctcgctgatgccggcggcatcctatgacgatggtctgctggacttcgaaatcatcgacaccaccggcggcatcctcggctgggccaacctgttcggcgacgtggtgcaccagacgatcatcggcaagcccgaacagaacccgctgtccacgaactcgaccatcgaacaggtccagggtgtcagtgccgaaatcacattggaaaagccggccaaagcgcaggtggacggtgacatgctgccggaaacccgccacatccgtttctcggtggatcaccgcgcgctgatcgtgcgcgtgcccgacgcctccgcgctggaaaagaccgcgcaggccgctgcttcaaatgccacctcgaatttcgccgaaatgaccggtacactcgagccgattcgctgattcgccaatccgctaatccgttactacgatgcgtggccggtgactcgggcgacatgcatcgccaaataagcgatttcgtcgtcgctgatatccgtgtcgaggcgcagttcgagcagggaggcgatggttcgcgcgcatcgcagcgcagcggggtaggactcacgaatcaccttcatcaccggtgccggctcgtccgtcagttgctggtgctggtggatgcgtacgaacaggtagcgcaggtgggtgatgaaccggcccacgttcacggaactgcggtccaacgtgatgccgtagctgtggtcgatgatgtcaagcagttgctggatcacgcccgtcatcgtgtacgtataggacaggtcgccggtggcgaagccggcgttgaccagatgcatggcaagcgcggtggcctcgccgtccggcagcgtgacgtcgagccgtgcattgagcgatgcgagcatcgcacgcccctgcgcgtattcctgcgggtacaggttgctcacctcgccgagcagcgggtaggtgatgtcgatgccgcgccgcacccgctccaccgcattcgccacgtggtccgacagggccatgaccagcgtggtgctgccggtctcgcgctcccccagtccggtctcctgcatggattcgacgaccacgcggatgatttcgggcggaatgtccgccagcatctgcgccagatggtcagggtcgcgcccgtccgatggcacgaaggtgcgcacaactttcgactcgtcgaccgtctgccccggcttggcctggaaccccagtccgcggccggtgagaatcacctcaccgccgtcgccgcctttggcgagcacgacgttgttgttgaacactcgcagtatttccatggcatcctttcgcaacgtcattgttccacatcgatgatcgggctgccggctgatacggttttgcagtcgccgccgttgtcgtcgctgctaccgtcgccgatcaacggcgtgaccacggtcagttcagcggcgttgaccaccgtcaccaccaccacaacgctgtgcccggccgccgcgactttgccgaaatccacggtggccagtggctctcccgccgcgatccgctcgcctttgcccacggccacgacgaatccctcgccatccatattgacggtgtcaatgccgacatgaaccagcacttcgatgccgtcatcggttttaatgccgaaggcatggccggtccgggccacggttttcagcgtgccactgaccggtgccagcacggccgtctcgccggccgtctccggcacgacgcctacaccctcccccagcgcgcgggaggcgaacaccggatcgccagtcgcttccagattcatcaaccggccggcgaccggcgacaggatggcgttggagtcaggagtccgatcggaggcaggccgcgatggggaatcttccgcagactccgcatccgacgatgtcgcgccaatccctctcaccgcatcctgcgagcgtacgttctcgcccgccgaga

SEQ ID NO: 201 - DNA, 7536 bp, Unknown
  R101_18m  MAG No. k141_17538
ccccccccctcccccacccacccccccacccttcttatccattgcggtaccgccgagaccgctatccacaccatccgcgtatgcggtgatctcagctcccggagcaacgcctataattcctggcgaaccgtcatagccagctccattacccacaatacgagccaccatctcggtgccatgggtcgcatatataccacgctcccccgccttcagcgaagaatccgacgccttcaagatgcctgttccccgtttagtctgagcagtgcacgatgcaagcccgtttttcagcaccgctttatacgagatgttcgcatcggcgaaccccggataatcggacaccacctggctgtcaataaccgcgaccttcacacctttgccggtgatatcttgcttccatgcgtcacgcacgcccatgtcatccacataccaatagctggcagacgaatcagcatcatcggccatcgcaaccggcgtacacaccgtaccagccatcaccacagtcacggcagcaccaatcaaacgccgcgtgtaccgcttcacagaccagcccttcaccataaaaacatctcccagccgcaggaaaattagactcgtgccggaggcaacgggaccgaccccgactgctgaggcggcatcggcacctcggtgagtggcatggtatccggcaccgtgcctgccaaatccgtgccaagcaagtcgtcaagcggctgcagtacctcacgcaacatatccttggttttctcatccgcgaattgcacatccgaagcggcttcgacttgtgccttcacaccggccatagtctcttcttgggactgctcgcccttttcgatttcggcaacggatcgcactagcgaatcggaatactgacgaatggaagcctcaagattcgcgcgcgattcctggaacaccttggccgcctgctgaagatacttctccatacccttctcgaaatcattagggttgctgcgcgtgctgccatcccaatgtgcgccgacaccatccttgatgtctttgccggcagtcaacaggttagcggcctcggcacgcacccgatcgccatcgacatgaatgtcattcgccatgtgtttcccctcacaccaatttcaccatacacaaccattggccaatccggccaatgcaaacaatacaacccccgatacgttcgggtgccgcgtggattacccatgcggcacccgaactggtaagagagtcagaagcgcgcagccgaacggttgtcggactccacatactgctgggcgatttcagcggtggcctgagaaatctggccaagaatctggttcatctcctgcagcttggtggtccaatcgttctgggcgcggtggtatgcctcttgcgcggcaccatcccactggtcgataagggtgcggacctcggcgtcgaggttctccagctcctggccgatgcccttggcatcgttggcaatgtcggtggacagcgagtccaccatttgcggacgaacggaaatagaagacatgatgatgataatccttaaactctaagcgttcctatattggttatcgaatccggctcagctcagcaacgactggagtcgggaagtgcgagactggttatcttcctcgttcgcggcctggtccttggcggttccgcgcaggttgtcacgcaaatcgttaaggatgttgttcagcttattggccttctcctgccagttcgccatcaacgtgttgtaggaggtggcagcgtcgccgctccagaacgaccccaactcggccatcttgctatcgatgtccttgattcggctatcaatgccggtcctggcgttttctacagccgtggcgcccttctcaagcgcgccttcgcctgccctgatcttctcagccatttcgcatcccttcttatgagtgcttgcttatatcgcgttgcgactgctgatgatcaagccggatgacattgggccaccgggaaggtacaactttgattttcccgccaacgagtacatcacccttgactctctcttcaccatatacaacagcacggcccatcatacccggcattcagctcttgtccaacaatttttccggtattcgcaagcaacactgtgaacacgtcgagtaagaccgtatgatgaatggagacggagagcacgccggagcacttggggccggtgagtctccatcagagaagagtgcgcgcggcagcgccgcatgctcacatgaagggaagtctatggcagcgagaacccccataccaccacgacgcatgcattcgagccagaacaagccgccgctccccacaccaggccccgcgccccttgcccataccccctatcaaggcatcgctgcaccttccgcaccattccagccgggtgccgttccggcacccatgtctacggcacctgcggctcccgcagcgcctacggcatcgcaggccgcgccattggacccggaagcaacccggcagctccatatcaccattgtatacaaggcaagaaccatcgaactctccgttggccccacaccgattgtggccgatctgctacccgacatagcccgccgactgggcgtgcttgacccggcaatagtctatggcggttaccgtctgctcaacagcgagggcgagaccctctccccttcccaaacgcttgacgaacaacacgtggaagaaggcagcacccttactctcgaacccggggcgttgaacgaaacggacatcatgtatgacgatgtcgttgaagcggtgggcgcaagcgtgcagcgtgtgtacaaaccatggaccaacgaccacaccacgctgacctcccttatcatcagcgccggaatgcttgccatcagcgccggcttgctcgcggtattcccaccatccattgtcaatgcggcattgggattcggcttcgcattggtgctgattgcactctgctcggtattaagcggcaagaatatgattccgcaggcattggccatgggactcatctctagcgtgttcgccgcgatcggcggctaccagctcatctccacgctgttcccggggcatcctttccatgggttgcctctgctgggagctgcggcagggcttatcgtcgatggcggactgatggccgctgccgcatcacgaaccaggccgtactctctcatccccatcgtcatcggcgtgattgcggtgatacccagcggattggcattcatgttccccatcaatgagccccagatatggattttcaccgccacagccgttgcactcgccgccaacgcactgccctctatgtgcctatcgctggcacgtatcagcgtgaacagcccacacagcgaatctgatatcttcaaactgcctgaagacattgattatgaagacatcaaacagcggtatattttcggttccaccatgttgttcatcgggcgtatcgccgtcgcctccctgctgctcattgccacgccgctgctggtttcgctgagcacaccgttgggagcggccatctgcctgttggcattcatgggcatgctgctcgattcccgccaaatctatacgcttagggagatgatcgtcaccgtgggagccgccggaatcggcattatcgccaccggcctgctcgccagccaggctcaccccgaactgaacataccgcttattctcatcatgctggcgagcgctttggcgaccatcattctcacgaacgttacacgtcagcagtcattgtttgccaccagaatggcggacgccgccgagatgctgtgcctcgtgctgctgccgccacttgcctatctcgccatcaccatgtgagcgtggatggttgccagataaatccgatggggaatcgtcacaagaacttttcagggaaacggaaaacataggtcatggctgataaaaaggatctttccgaagcgcaaagctactcacgtaggagactggtcactgcatttaccagcggcattccttccggcgtggagctcacgccgaagaagaaccagacgccggtgattgtgggactgggattggtggtcatcaccatactcatcagcgtgttctacggcatcatgagcccgtctctgccctcggattggaaaaacaacaagctcatcgtggccaagaattccgcagcacgatatgtcagtgtcaacggcacgcttcacccggttatcaatgccatcagtgcgcgactgctcatcccctcctcggatttcgacgtattgaccgtggacgacgaccagttggcgggaattcccatcggttcgactcttggcattctgggagcccccgattcactccctgcacaaaaccagctgatatccggttcgctgaccagctgcatggacaatatgaagctcagcaacaccattagcaataccgccttagctactggtgccgatagtcgtacggccatcgtcgccactgtggacaacaccagttaccttgtttccggttccaagcgttacgaactgccatcggaatcttcaattcgagacagtttcctgcgtatgttcggagtaccacagaccagaaccatcaaggcaaccgcacagtggatcaacctgttcgaagccggaagcccaatcaaacccatcactgttcccggagcgggctcgttcgtcaacgttaatggcaccgaagtggcggtcggcggcatcgtcacccagcagggcgagacgaagtcaacaaaataccttgtgcaggagggcggcaagatcaccgcactagatgacttctcctacaacctgtacatcatcggcaaaccagaatccatcgcacgccccacagcgctgtctgcccacgacttccaaagcctagccaacgccacatcatcagttattccgacgaattggcccaccagtgcgttgcagcaggtgagcggcacgccgaccatatgcgccacattccccctgtctgcatcgggccacgaacgacttacttcacgcgttcggcttgcggtcagatcctccgccgagtcaggggcggatactgcatcgggagtcgatgccagcgaaaaaagcactgtttccaccacgattactggtggcaccggggcgctgttgcgttcggcgatcggagataccgacaagggaacggtattcgccatcgattccaccggtaccgcatatccgattccccacgcaacacaagagatactgaaccgtttaggctacaccggtcaggatgttcgttccgtgccgcgttcatgggtagacatcttcccctcaggagtgcagctcaccaccgaagccgcaggcaatgcgcccaacccgcaagctgtgctcgaacagaccgggaagaactgattatgaatcgtatgccgtttcccgctatgccgcgtctgcgttcagtagcgcgcgccaccgtagccaaaactctgagcgccatgcttgcagttggtctggccacaagtatggcgggcatatgcgcggcggcgccacaagccgcatacgccgactcatctgactcttctgactcatcatcccaaacctcatcggggcaagcacaatgccaggcaggcatcgaaaattacgtcacacagcagccctggaccaataatctattcgagctcgatactctgcatcagcgtgccaccgggcaaaacgtgattgtcgccgtcatcgattccggcgtggacactgataatccgcatctgaacggtgccgtgataccgggcaccagcatggttaagggcgacccatccaacggaaccatcgatacctacaatcacggcaccgcggttgccggcatcatcgccgcgcgtccagtagacggttcatccgttcagggtattgcccctggtgccaccatcatgacgattcgcgtgttcgataccattcgggaggagaacggcagacaagtgggtgccccctccatggaaacaatcggggcggcggtcacttacgcggtcgatcacggtgcgaaaatcatcaacatctccctgagcgacacccgcaatattcccgagatgcagcaggcagtatcctatgccgaaacgcacggcagcctcatcatcgccagcgcaggcaatcgtcttacctcggccagcaccaaagacggcgaacgatacccagccgcctatcctgaagtcatcggcgtgacggcgttgaacactgacctacagcccaccaacgactccgtacatggagatcaagtcgatatcgcggctcctggtatgcagacggccggaacgattccgggaggagtggactgtgtgttcgccaccgatgcagcctcctcaagcttcgccacggcatacgtgagcggagaggccgcgctggtggcctcgatgtatcctaatgagtcgccggcacaatggcggcaacgtattcttgccaccgccaaccgtgccgacccagacaatcgcgaccagctgaccggctggggcatcatggaccctatgaacgctgtatctgtcaccctgtcaggcaatttgcgcggcccgcagttggatggcttatccaagcccttccaatccagctcctaccaagacaccatcgtgttgcaccccactcaagaccgcaatgcccggaccaaacagatcgtggccattgctgcaatctgcgtactgtgcttgtggagcatcgcatggattgttggtttgcgtgggaaaaggcaacggacttcggtataacgcgaaaactgatggattttgtcggttgactgatggctcatcgtcggttttccgacaacaggccatcagccaaccgacaaaatccatcagtcaaacgaattggcatctcccgacaccgacttattcggtttatatgaattacatgaaacgttggggtgcaccacgcatcgcgccggaaaccacttgctgcaccagcatgcgtgggtagatgttcaccgtccgcattgcggtaccggctgcggcgaaccgcacctgaagctggttgacgccgccatcctcgctgatgtacacgtatggggtctccccggtctcggcgcggacagcacacgtactgtacgcgccacgcacggattgagccggtcggcgaacttcagaacgcgccgttcccgcacgcccggagcaacggccgaaggctcattggccggtaatgattcgttcagcgcctgcgaccatcggccgcgcgtggccacgctggccacaggcgagacgaactgcaccgcgtccacggccacatggcgcaacgacagtatgggccccgagcacagcctgctcacatacgccgggaccccggtcttgttgaagatatcgagaatgagctgcacattaccgctcggcgcgaccgccatatccacccaccgcaccgtggacatggggccgtccgacattggcgttttctcaaacacggtaggcgtgccggtgccggccgccttgatagggaacagccaccgcccttgcaccatgaattcctttttcgagcatcgcggttcctttcttcaagttaagtgaaacggtcttacggattcaatcggcgattcctaaccgaattctggggaggcatgccatcataggcgtgttcgccgtaggtcaagccacctgaatacagccacatcccgtaatgcgcgccacgcggatcggacgacaaaggaaaacgaggatcacactgatccggccacctcaccgga

SEQ ID NO: 202 - DNA, 49919 bp, Unknown
  R101_18m  MAG No. k141_17721
cagccacactcaccactcgtggcgctgataggcgattctggtggtgtcgaccggccggtcgagcagctggatcaggccgcaacgggcgaagccggagctttcgagcacgtgctgcatggccttgttattggggtgggtgtcggcgcgcacgttgccgtagtgcttcagggcccacctgatgcagtcgcgggccgcgtggcgcaccagaccggatgcggcgatgcggtggatggtcacataggtgtcgttgtccagccaggcgccgtcgattttggcgtaggtcggatccttgcccgggcacagggcgaactgggccagaatgcgttcgtggccattgcaggtgtcgaccagcagcatcgtacgctggttggcgatgtcgtcttcaatcaccgattcacgcggaaattcgttgccccactgggtggggttgccgttggcggccatcaacgcgcgtgcgcgtgcgtagattttctgcatctgcggcagatcgcgcatggtggcgtggcggaaacggcggcctgtcgccttgtttgcagcgttcgactgagtcacttctcacctctccgacatgccgggttgccggcacggtgaccggcgactaactgacggccaacctaccatgccgtaggcacaagaaatcccgtccgcgttgcatgacggacactaataaacaatggcttccgtccgcaggagccggacagtccagccgagttgaggacagccaccctcagtcggcttcgcccccggctcccgccagcgggagccgaatcagaattgaatcgaatcagacgaatcagacgaccttgcgctcgaacgggtcggagctgatgccttcctcaaggatctgcttggcccattccttggcggtgaacaggctgtggtcgcgatagttgccgcagctcttctcggtggtggcgggcacgtcatcccatgtggccttgtatgcgatgaactccaacgattccttcaacgccttggccacatcctcggtggagtgggtgccccaggtcagcaggtggaagccggtgcggcagccgaacggcgagcagtcgatgtagccgggaatgcgttcacgcagcagcacggcgatggtgtgttcgatggtgtgcaggccgccggtggggatggcctgctcgttcggctgggtcaggcgcagatcgtaattggagatcacgtcgccgtgagggcccgtttcggtgtcgatgtaacgcacgtacggcgccttgaccttggtgtgatcaagctggaatgattcgacgacgggcttttcggccttgtcttctgccatgctgttgcctttctacttgctgagtgttcggtcatgaagtatcgaacagtcatcgtagtcgcgccagcccaagaacgcccgcagatactccgcggttcgctataggagattgttatgacgcactcccggcattgaacgaggcgatggtttgcatgaagcgctggccgtagaggtcgagcttgtgttgaccgacgccgttgaccgccagaaattgcgcgttggtaaccggcttgatgcgggccatgtcgcgcaaggtcttgtcggagaacacgatgtacggcggcttgccgatttcctgggcgatggtgcgtcgcagttcgcgtagcttctggaacagcgattcctcgtcatcgtccgggatatacgagcccagcgcatcgccgggaacattggcggaatcggcagtatcagccactcccccgctccgaccggaaccggccgccgccgacttgcgttccacccgtttgatctcatagtggaagtcgggagcggcggtttcggccgcccgcgcaccgaacatgacgattggcatacgcccttcggcgattgacaggtacccgtccgtggccatctggctcaacacgtcgcgcacgcgagcttcgttcacgtccttgagcatgccgaaggtgggcatccgctccgggttcagccatgccagatcctgtgcccgcgaaccgcgcaggatcttgacgatcttgccggaaccgacgcgctgccccacgtcatgcacgcaacggctgatcgcctgcgccacgcgggtcacgtcgatggtctcgaacgtgctttcgcagttcgagcaggcaccgcatctgccggactgcgaagagtccgccgcaatgtcttcacccgccgcggaaccagcattcggcgacaattcctgaccgaaataccgggtcatataccggtgcaggcagtcggtggtgcggcagtagccgaccataccgtccagcagccggcgcttggactggcgaacgatctcctgctcttcgggagtcaatcgctcgttctcataatcgttatccagcaaccgacgccgggtgacgatgtctgactcattccacagcagcgtgcatcggctgggctcgccgtcacggcccgcgcggccggcctcctgatagtaggcttcaatggattcgggtagattgtggtggatgacgtaacgcacgttggacttatcgatgcccatgccgaaagcgttggtggccacgaccaccggcaccttgtcggtgatgaagtcgcgctgggccgcctcacgcgcgtccggcgacatgccgccatggtaggcaacggccggatgccccatctggttcagcgtgtcggcgagcgcttcggtggtcttgcgggtggcgcagtagacgatgccggattcgtccggatggtcggccacataccgcgccacccatgcggccttgtatttggtctccagtttgaccacatcaaaatacaggttcggccggtcgaatccggtgacggtgacggccggattccgcaatcccagcagtcccacgatgtcccggcgcacccgttcggtggcggtggcggtgaacgcacccaccggtggacgctgcggcagcccggcgatgaaatcgccgatacctaagtacgacgagcggaagtcctgaccccactgggagacgcagtgggcttcgtccacggcgatcagcgagatcggcgtacgggcggcaaagtcgcggaatcgcccggtttccaagcgttccggggccacgtacagcagtttgatctgcccggcggcggcttgggcgaacaccatcgcctgctcgtcgggagtttgagtggtgttgatgaacgcggccggcagaccgaggtcgttcagcgcatcgacctggtcgcgcatcagggaaatcaagggagatatgaccaaagtcgcacccgggctgagcgcggcgggaatctggtagcacacggacttgcctgcgccggtgggcatcacgcccaagacatcgcgtccggcaagcaaagcctcgacaattccttgctgtccgggcctaaacgagtcatagccgaagtatcgtgtgagcgcctccagcgccgcctgatgtgctgtcataaacgaccagtgtaggccgaccgcggatggatttcatcgtataacggaatacctcgtaacgatgtacgtagcccttccgtattattatgcgtcaagaaacgttattcccggcatatcgcacgatatgccgctttgagagaactaagacggggcattttatggccaacgatacattttccttctcctctcctgacgatcaggagacggcggtgctgcagcctgtggccgccgatgggctgttcgcagccgcggccacaggtaccgccacgccacagcaaagcgacaatggcaccaataaccatgccgacaatacagcctatgtgggtgaacatgttatggcatctaccaccgctaaatcacatggcaaggccgcacggattgccatcataaccatatttgcagtgttgcttgccgcattaatagcctatttcttcgtcggacgttggtacttccaagacaaggctgcgcccggtgttcatttgggcaatgtctctgtcatgggccagacccgcgaagaacttgcgaatactgtgaagcagcagctgaataacaccacagtgacgttcaccgccgaaggcaacagcgtcaaagcctcgctgaaggaccttggcgtcaccgtcgacacggataaaaccgtagatgcgctgttgaacgcgaagaccggcgacgtggccaagctcaatattttcgatcagccgcatatcgctctgaccgccaccagggacaaagagactgccgaacaattcgtcaccgccggcctggtcgatgaggccgaccgagcgcagattgccaccgttgtctacaacaagagcaccaagcagttcgattacaccgcgggtcaggatggcaagggcccggatatcaatgttgtcaatgctgcagtcaaggaggccgtcgcgaccccgggcgaaaatgcgacggtgccggtcaagctacagactgcaaagaatccgattgatgacgcgagcgcacagcaaacacagtttgacgccaatgccaagcttggcctcaaactgaccgtggacaacggcgtgaacaagagcgtcaccatcccggccgataccattgcctcattcctcaagcccacggtgaataaggcgggtggcaccatgagtctggtagtcgaccgcgatgccatcaccaagtacgtcaccagtgacagcgtaaccaaagaactgactgttcccaaggtgacacgcgaggtctacatcacgccgaaagacgaaggcggcgtggaaattggtgccgataagacactcggtgtggatggtattgaagtgactggtgccggggacgcccccgaacgtctggctaccgccatcgagcagaaccagtccactgattccactgtggctgtgaaagacagcccatatgatgtcaagcaggtcgaggtgcctcataacttcgatacggcaaatggcgataagtgggttcatgttgatctgacgaaccagactgccactgcatatcagggcaccacggtggtcaagaagttcaacatcgcttctggcaagcccaccgccgatggttccatgctgtccgataccggcacgttctacgtgtatctcaagtacgaatcgcagaccatggttggcgaaggctacaaccagccaggcacgccgtgggtttcctactataacggcggcgaggccctgcacggtgttcctgcatacatgtggggcgagcaccccatctatgtgcagcagggtatcccaggctcgcacggctgcatcaacatgcaggtggccgacgccaagtggatgtacgactttgccaccatcggcactcgtgtggtcgttgatggcaccacaccgacttccggtcaggcgttgcgcccggctggtgcggatgccaccggatggcagggcggcaacgccagctgattcgatccatgttcaatcgataacggaaaatccccgacccttgtgggccggggattttttgtaggtaccaatcgatagcgagtccgccgataagcgtggtggcaccgtcaatacggtgccaccagtaccgtcagtacggtcagatacgatccaacgcctgcttgagatcggcgataaggtcgtcggcgttctcgataccgaccgaaatacgcaccagattggcgggcacctgcagggtggtgccggccacggaggcgtgggtcatggcggcgggcacctcgatgaggctttccacaccgccgagcgattcggccagtgtgaagatctgcgtgtggtccacgaagtgcttggccgcctcggcaccggccgcgagctgcacggagacgatgccgccgaagccgccgtgcatctggcgggcggcgatttcatgacccgggtgggactcgaggcccgggtaccagacgcgctcaatcacatcagagggctgggattcgagccattcggccaccttcagggcgttggcactgtggcgcttgacgcgcagatccagggtcttcaggccgcggatgtccagccaggagtcgaacggggagggcactgcgccggcggcgttctgcaggaaggcgaccttctcacgggtctcctcgtcgttgaccaccacggcaccgccgaccacgtcggagtggccgccgatgtacttggtggtggagtagaccaccacatcggcgccatcggccagcgggtgctgaagggcgggcgaggcgaaggtgttgtcgacagcgaccttggtgccgtacttgtgggcgacttcggtggtggccgcgatgtcggtgatgttgagcagcgggttggacggagtctcgacccacacatactggtagtgcttggaggccaatgcggtttccacggctttcagatcggtgatgtccaccacgtcgaggcccacaccccacggcacgaacaccttggagagcaggcggtaggtgccaccgtacacatcgttgccgagcaggatgttgtcgccgggcttgatggtggagcgcagcagcacgtcgatggcggccaagcccgaggagaagctcagcgcgtacttgccgccttccacggcggcgagctgctcgtcgaagctggtgcgagtggggttgatggagcgagagtagtcatggcctcccctgaggcccaacacgccatcctgcttgaaagtggaggtggcgaagatcggcgtgacgaccgcaccggtggtcgggtcgggctcctggccggcgtggatggcgcgagtggcgatgtcggtgttggcgaacttggcgttgtattcagcggacatgatattgggttcctttcgggattgttccgtattcgaaggtaaaacaggtgcggttagttagtgcggatgttggtattgattcttttgatagctagttatggagtccatccgcagctccctcatcagagggagttccgttaaggtactgctcggcgagggagggcttgctggtgcgttccacgatgtcgccgtagccgttggcacgcatccagtcgtcattgaagatcttctccagataactgcggccggaatcaggggcgagcaccaccacaatctggttctcgtccaaatcattggcaagcgcgtacttgatggcgctggccacggccatgccggacgagccgccgaccagcaacgcctcctcgccggccagacggcgggtcatttcaaaggcttcggcgtcggatacgcgcacgatgtcgtcggtgatgttccggtcgaaagccttggggtagaagtcctcccccacgccctcgatgtcgtactggtggacttcgtcgcgtgaggaagcggagtagatggagccttccgggtcggagccgatgaccttgaccgcgccgttggaggcttccttgaggtacttgccggtgccggagatggtgccgccggtgccaatgccggccacgaagtgcgtgaccttgtggtccgtagcctcccagatctcggggccggtggtgtagtagtggctcagcgggccgttcgggttgtcgtactggttcgggcggaagccgccgggaatcgtgttggccagtcgttcggcgacctggtagtaggagcgcgggtcgtccgggccggcgtcggtcggtgtgacgatgacttcggcaccgtaggcgcgcagcaccgcgcgcttggattcggaaaccttgtccggcagggtgaaaatcgtgcggtagccgcgctgctgggcgaccagggccaggccgacgccggtgttgcccgaggtgggctcgacgatcacgccgccgggcttcagctggccggactgttcggcggcgtcgatgatgcgctcggcgatgcggtccttggaggagccgccggggttgaagtattcgactttgacggcgatggtggctttgacgccggccgcctgcgggatgtggttgagcttgacgagcggggtgttgccgatgagttctgcgaggctgttgtggatggtcatgtgaagtccttcgttgctggggttgtgggggtttgctgcgttgcgttcgtgaaccgacgttcccagacgaatggactgtggctttggtttgaaaatcgagtattcccgctcactgtacggtgaatccgaaaagtgaatcagtttttcatgttaaccacggctcgcgcattacacgattacgcttgtgccatcggatacatgaaaagtatgcggcagattcgccgcgattcgaatgctccatctcaagttatgcgtcactgaccgctcgcccaggggcgtcggttagcgacaacaacatgagataatctgcatgcctcacaccatagcacaacccgcgacaagcgcgtgtcgccggcggactgaggggagtacgacggcacccgtaactcccctcagcctcactgcattcgacagctcccctcagagaggggagccaaaaaggtctataacgaggctgcctcgatgagctgacgggtgtaatcggattgggggttgccgagcacttcggcggtgggacccgtctcttcgacgcgcccgtcgtgaagcacgaggatgcggttggcgatatgctgcaccacgccgagatcgtgggagaccatgatgatggcggtgctcggccgggcctcacggatagcggcgaaggtgtcgaggatctggatgcgcgcggccacgtcgatggcgctcattggttcgtcggcgaggattaccttgggctcgttgatgatggcgcgggcgatgaccacgcgctgcgcctggccaccagacaggtcgattgggtaccggttcaggaagtccgccggttcaagacccgccatggtcagagccgcgaccacccgctcgtcgatatcggtgttgttcagatcacgtcgctgcagactcagcggttcagccaccgatttggcgacttgccaacgcgggtcgagtgatgagaacgggtcctggaacaccagtcccgattcgcggcgcagggtcgcgaatcccggcgattttcggccgccgacaatggattggctctcgtattccacgctgccggagtccgcggattccaagcccagcataatgcgggtcagcgtggatttgccggatccggagccgccgatcacggccagacattcgccggcgtggacgtcggcggagacgtcgaagaggacttggtggcgtgcggtgcgcggtccgaaggatttggtgatggagtgggcggagaggagtggcacactgctgttactcatgcgaatcctccttgggggtgtggagggtgagggtttgggcggcggcgaccaagcgttgggcttgcggcgtggtcggtgcagcaagcaggtcggcggtgggtccggattcgacgatgcggccggcgtccagcacgtagcagcgggtggtggcacgcgcgagtacggagaaatcatgggtgatgaacagcatggatgcgccggcgtcgtccaccaacgaggtcagcaggtccacgatctgacgttgcgtgatggagtcgagcgcggtggtgggttcgtccgcaatgatgaatcgcggtgaggtgatcagcgccgtggcgatgcccacgcgctgctgttggccgccggacagttcgtgcgggtatgtgccggccacgtcacggtccagtccgaccttgtccagcatggtattcactcgctcagcacgttcggccttggtcagatcgtagtgcagtctcaacggcaacgcaatctgctgcgccacggtcatcaccgggttcagcgcatgggccggattctggaataccgtacccacataccggccgcgcagatcggcaagcgtatgctcgtcggcgtacgcagcggaatcgtggcccgaggtggcaaccctgcgttcaccggcaacatggtgcctatctgccgcgccgcgttcttcgtcagatcctgagtcatcttcctgcccatgccgcgactcggcggtttctccggacaggatggcggtttctcccatcgtgatggtgccggacagcacggcctcgcgcggcaacaggccgagcaatgacttggcgatcatcgatttgccggaaccggaggaaccgatcaggccgacccgttcgccgtccgcgatggacagatcgacatccatgacaatcggtttgccgccgatagcaatattcagcccgtgaatttcaacgctcatcatccgtctccttcggcgctgccactgcggactgcgccgcagtgtcaccggctcccctagccaccggcacaaccgcaccgggcacagtcatctgccgcaacgcgggattagccaccgggtcggtggcgtcgcgcaacgcgtcgccgaacaggttcagcgcgaccaccaccagggtgacgatcagaccgggccacaccaccgtcaacggaaacacgttgatgagtttgaccgaggtggccagcgaatggccccagctcggcacccccgcgccgacgcccacgcccagataggtcaggcccgcctcggccagcaccgaggtgcccgccgacatcgacgattgcaccatcagcaccggcgtgatgttcggcacgatgtgtctgaccagtacgccgaacccgctggcgccgttcgcccgggccgactgcacgtatcccgagcgggcggcgagcagggcggccggacgggcgacgcgcgccagatgcagcccgtagccgatggagcacgcgccgatcaccacggccgcggatgcgccgaacggcacggcgagcagcagggcgatgagcacggtggggatggagatcagcgcgtcgaccacggcgaccgacgccgaagcgagcgccgaagaacgggcgaccatcagcccgaccagtaggatgccgatggcagccgagcagacaacggtcagcagggcgatggcaaggttcgtacgcgatccggccatcagccagctcagcacgtccgcgccggtgccgtcggtgcccagccaatgcgcggacgacggcttgtcccacacgtggtagccgtcggtggccagcagcgactgcggggtccagaacaacgacaccagggcgacgaccatccacaaccccagcacgatcagcgagtagcggccggtgccacgggaccagatggtgcccagaaccacgcccgaacgacgccatcgaccattgcgatcaaccatcattcctcctttccggcggccagacgcgggtcaagcagcgcgtgcagcagatccaccgccaggccgatcagcaggaagaacgcggcgagcaggaacagctcgctttgcacggccaccagatcgcggttgccgacatcgcccaccagcagggcgcccagaccgggcagggcgaacaggttctccaccaccatcacgccggtgatcatcgaggcgaacgccagccccaccaccgagacgagttgcggagccgccaaccgcaatcccacgcgcaccaacgcctgggtgcgggtcatgccgcaggacatggccatatcgatcggacctccctcatcggcgatgccttccagaatggagcgcgtgtaacgcatgatgcccgcaccggacacgaatccggtggcaagcgccggcaggatcagggacgagaccgcccgcccgggagcgccccacccagcggcggggaacccctgcgagggcagcagaccgacaaggcccacgccccgtgcgaacaggaggatgagcagcaggccgctccacagggccggcacggcgccgcccacgatggacagcacgcgcaggaaaccgcgcacggccggcgaccgggagatcacggcggcggcgcccatggacaagccgagggtgagcgcgatggccaggctcatcacgatcagcgggaacgtgatcgtcgcacgttggccgacctgggaggtcaccgcccgcccggtcagcgccgacacgccgaggtcgccgtgcaacagccctccggcccagtcgagatactgcacgacatacggccgatcaaggccgaattcggcgcgcagggccgccacacgcgccggcgatgcgttcatgccggccatcacgaccgccacgtcgcccggcaggatgcgcagcatcgcgaacaccagcaccgaaatgccgaacagcgccgccgcgaacagcagcaagcgttgcatcaagaaccgcataacgcctcccttatcgattccctcgccaccgcccgtggcgtcaccggccggatgggccgtccacggtcgggcgcgcagcggaatcgctcccgcgccgcgcccgagcgatgggttccgggactacttggtgtaggtgatccgccagaggggcagcacggtctggctcaggttctgcgggaagccgtccacgcccttggcgtaggcgatggtgaccttccagctgaacagccagtcggccggcgcgtcctcggagacgatcttcgcggccttggccagatacttcgaggcctcgtcgtcggaggtggcctccagcgccttggcgtacagggcctgcacgtccttgttgtcgtagtggaagtagtagctcggcgtggtccatccgtagaagtcgtggctttcggcatggtccacgagcgaaagatcgtagttgccgttggcgtgcacgtcctgcagccaagtggagaactccacgtagttgatcttcaggtcgatgccgatgggcttgagctggctcttgagctggtcgccgagctcggtgccgtacacgttggcgtaggtgagggtcaggtccagcggcttcgactcggagtatccggcctgctccatgagcttcttggccttggccacgtcatgcgggtacaggccgctcagatcctcgtaaccgggatcgaccttggggatcggaccgccgaggggggcgtccacgccgccgcgcgaggcgatgatctgcttatggtcgatggcgtatcggatggcctggcggacgcgcttgtcggagagcttgtcgttggccatgttgaaggcgagcacgaacttgtcggaaccatcaccggacttgaccacatagttcggatccttgcggaacggatcggcaagggtggcggagatgggcgaaagcacctgcacgtcgccgctcttgagggcgttgatgctggcgttctcgtccggcaggaaccggacgatcacgttctcggtcctcgccttgtgctcggtgccccaatacttggggttcgccttgagcacgatcttgtcgttcgggtcgaaggagaccacggtgtacggacccgagcccaacgcgccgttcttctgatcccaggtggcgtccttgtcgtagaccaggccgggacggctggtgaggtaccacagcatgttcgagttgggcgcggagagggtgagcctgaccgtgttggcgtccacggcctcggccttgtccaggctcttgacctgctcgtagtcgtagtacttctgggccttgagctcgttgatggaccacgccacgtcctcggcgtcgagcttgtcgccgttggagaagttcatcttctcgttgaggtggaacgtgtaggtcaggccatccttggagatctcccagctcttggccagaccggggtggaccttgttgtccgagccgcgcgagacgaggccctcgtacacgttgccgatgaggatctgctcaagggccgaacccgactggtggcggatgtcaagattgaccggggcgagtttgaggccgacggccacggtgtcggatcggctggccgagacggaggcgttcgcgtccttgcccttgcctttcccgccgaagacggtgacgcccacgatgagcgccgcggccacgacgaccgcgatcagcgtccacagccaccatttcgggccgccgttcttcttgttgtttgatgatttcgcgcgcgcgttcaggctcgcgtcggtgctggcggcttgattcgcgccgtcgatgttcctgtcttcggttgcgccagactcgccgtgcacaccattgttctgggacatggatactccctgatgcattcgggcatgcttacgcccgaatatggtttcgttgttatcttgcgtggttgaccgcccattcgggtcgatcaccacgttctactatatccccggacacgccggaggcaatggctatactggattgcggcgccgacggagggtccgcggcgaccacaacacgcggcgcatcgtcgggcaacgacgcgggaagcgctggcgtgggcacacgtgcggccttggcataaggccgggaggcagctatggcacatattcttctgggcgtcaccggcagcatcgccgcattcaaggcctgtcatctggcatccgattggaccaaggccggccacgaggtgcgggttatcgaaaccacagcggccgaaggcttcgtcactcccctgacattcacctcactgacccatcaacccacccgtaccacgatgttccccgcttatccggccgcgcacggcgacgtgacggccaatccgaccgtgccaacgaccatcaatcatgtggccgatgcggcctgggccaatctgctggtggtggccccggcgagcgccgacgtcatcgcccgcatcgcctgtggattggcgaacgatacgctgacgtccaccattctggcctatgaggggccgaagatcctatgcccggcgatgaacgtgcatatgtacaacaatccggccacgcagcgcaatctgaaaacctgcgccgaattgggctggcagattgtggagccggaggaaggcaatctggcttgcggcgacgtgggacgaggccgtatggaagagccggcgcgcatcgaggaagtggccgctcggctgctggcggatgcgcaggatgaccaggctccctcatcttccccgctcaaggggctgcgcgtgctggtcactgccgggccaacgcaggagccgctagacccggtccgctatctgacgaaccattccaccggcaagatggggtatgcgattgcctcggccgcagccgaatttggtgccgacgtaacgctggtctccggtccagtcgccttgaccgcgcccgatgcggtggatgtggtgcgcgtcacgaccgcgcaggatatgttcgatgcggtggccgacgccttcccggcggcggatatcacgattatggccgccgccgtgggcgatttccgcgtgaccgagattgcgccggagaaaatcaagaaggccggccgcagcagcatcaccgtggagctggtttccaacccggatattctggcgtgggccggcgaacgcaagcgcgacgacggctcgcagatcctgtgcggattcgcgatggagaccgagcatctgattcgtaatgcggagaagaagctgacgtccaagcattgcgacatgctggtggccaacaatctgcgcgacgccggtgccgggttcggcaccgacaccaacgttgtcaccgtgctcacgtccggagcggaggatgccggcaccccgaagatcgagcattgggacaagatggacaaaaccgtgcttgcgcaacgactgttgctgcggctcgcagcgttgcgttccggcggcgcgagcaatgtcgatgacgagaacaaggaggcctgacccatgctgatggcggtcgatatcggcaatacgaatatcgtgatcggttttctggaggtcgaccgcatcgtcggctcctaccgcatcaccaccaaggcgacgcacacctcagacgaatacggtctgatgatcacgcagttcctggctttgagcgattacacggccgacgatgtggacgatgtgatcgtctgctcggtggtgccgaaggtgatgtattccttccgcgcctcgctgatcaaattcctcggattggaaccgatggtggtgggccctggcgtcaagaccggcatgaacattcgtctcgacgaccccaaaaccttgggctctgactgcatcgccgactgcgccggcgcctaccacacctatggcggcccggtgctggtggccgacttcggcaccgccaccacgttcaactatgtggacggttccggcacgattcgctccggcttcatcaccacgggcatccgcaccggggccgaggcgttgtgggggcagaccgcccagctgccggaagtggagatcacgcaaccgcagtcgattctggccaccaatacgcgcactgctatgcaggccggactgtattacacgttcctcggtggcattgagcgcacgattcagcagttccgcaaggaaatcgatgagccgttccaagtggtagccacgggagggctcagccgcattttcaagaacgacaccgacatgatcgacgtctacgattcagacctgatcttcaaaggcatggcatacatctactcgcgcaatgtgaagtaacgcggtgtgcaggcatcggccgcgcatagcgcagtcgattccgtccctccccgaaaaacctactcaaaaccctacttaatcgtaaagccctgattgaggccgtattctcggaggtctttctgccattgggccaggccgtcggagagactgactttcttgccgggcttctccaatggttcgagcgggttgccttcctcgtccttcatgcccatctcaatggcttcctgtcgctgctgataggcgtggaaactgccggaccactcgtatgcctggcccaccgtcgatttgaagtcactgcgcgcatacacttcgaatggcagatactggtatccgaccgacacatcctcggcggcctccgacagtacccggttgaacttctgcccgccgaaatacgggatttcaatgccacggtcattggtaatcgtggttttatccagaaaatcagcggaattcagggtggcgtaatcggccgggaaggcaccgccgtctacacgcgcgctaatgccttgggcgtcatgcgccacaaagtccacgaaacgataggccgcatccggcttacgggtcagttgcaacacggtcagcgccgagccgccattttcggcgttggcaggctgcccaccataggtgggcatgggagccacgcgccacagaccggccgcgcccggcacattggacagcagcaacgacggcatccaagccccagagaacacggaggcgatggtgccggtgcccactctgcttttccaccgatccgaccatgtggcggaggtagtgtcaacaagcccctcatcgatcattttctgccagaattcggtgaaccgttgggtgccggcatcctcatccaaatcgatggtcacggttttgccgtcggccgacgtgtggaacggctgaccaccggcgagccagaccatcgcgtcatagaaactgccgtcgcccgagtcggcggcgatatacgcgccgatctccttgagcttttcggcggcctcgtaatagtcatcccaagtcttgatcttggtggcgtccacgccggcttggcggaacacgtcttcgttgtagaagaagcccatcgggcccgaatccatgggcagtccataggtacggccggcgagctgcacggacgaccatgtgccgagggtaaagaagttggaataatccgagccgattttgtcggtcagatcaagcaattggccggagaccgcgtactgcaacagtgcatagtattcgatttgagccacgtccggcgtgccgtaaccgtcttgaatggcggtattaagattgccgtagccggagatattggtccatttcacgcggatgtccggattggctttttcgaaacggcggatgacctcccccatgctcggttcccagctccatacgctgatctccgtacggttgtcgtccgtggcctgcccgcacgaggccagggatacggaaaggatggcagtcactgctatggttgccattcttttgattcgctgtccgatcactcgcatggtgacgagtgtactaggcggggcttaaaacggtaaaagccccgtgacgggattcgtcacggggctttgtgtatcgaacggggtcgcgccggcggccccttcgcgattgcgaatcaccacgtgcggcgcgttgacgccgaacaaacgttcacccaacagtacgagcgggtaatcgccatccaaagccgcgatatcgtcaaccgtcatcatcagagggcttaagatgagcccatccgcgctgtgcgtgcccatcgatgcgatgctttccagcttgcgggcacgattgttggtggtggattccacgatgacgccatagccatgttgccgggcctcggccagaatatcctcggcgagttcggagaaatacacctgccgcagatcgggaatgaccagcttgagcaaccaggtgcgcccggaacgcaggtttctggccgacgagttgactttgtatccgagccggtcgatggcttccgcaatacgcgcggccatcgcctcgctcatatatggctgtttgttcagaaaattagacaccgaggctaccgaaacaccggcctcatgggccacgtccgccatcgtcactctgtttttgcctcgcacggtgaccaccctacccgactttgctggagatacgaaaacgactcccctgctacgatgagcagcaagggagccgttgagtaatcaggcgctatgcgcggttttacagcttgacgacgagtacgccgttgggctggatggcggccgtgtgctcggactcgttgacctgggccagcgaggcgaccagcggttcgccttccacgtccacgaccgcaacatcgtgggtgcggttgaacaggaacacgaagtggttctcgccagtttcgtccgcacgctcgacgcgcagcacttcaccgcgatcgtcctcagccgaagtctcgatgccgagttcctccagcagcacgggcaggctcttggccaaaccctcacggccgagacgggcaccgacgtatgcggccttgccgtcgccgaagtcgttgacggtgatggcgggagcgccgtcgaaaccggtccacttatctgccttgaaggaggcgaccacgtgagcggtatcggccacggaggtgatcacgtcggcgaaatcgtgcgccacggttccgttgtccaagtcaaggtggtccatggcaccggggaagtcgttgcccatcggggcgaattcctcaacgcgcacacccaccacgtcacggatggaaccggggtagccacccagccagacgtgatccttgtcgtccaccagaccggtgtagtaggtcacgaacagcttgccgccgttcgccacatactcgcgcacgcggcgcgtggtctcttcggacaggatggtcaggctcggcagcacgacggcttcgtactcgtcccaagggccgcgaaccggcaccacgtctgcggtcagaccgttgtccgccagcgcgcggaaccacgcgagcggctcggtccaatggcgtacctcctgagtaggcgtggcggtgtgttccgtagcccactgggactcgtaatcgaagacgacggcgaccttggacttgaccagcttggtgctcagcaggccctcgtcagcaagcttgttgaggtcggcacccagctcgcacacatcgcggaagatctgggagtcggggcccgcgtgaggaaccatcgaagagtgccacttctcggcaccggccttggactggcgccactggaagtagcagatggcgtcggagcccatggccaagtgggccagggagtcgcgcaccagttcgccgggctcgacgcgatagttgatcgggcgccaattgacggcggagctggagtgctccatgaggaaccacggattcttgcgggcgatgccgtcgcacagggaggccgagtaagccagctcgtcgaagtgagcttcgccaggcgtgaagtagtgatcgttggacacgaagtccacgtcgtaaccccacttgtcgtaatcgatgccggcaccgccggcggagaccatgaagttggtggtctgcggcttgggggcgatctcgagcagggcgtcgcgctcggccttgtaaaagtcgagcagggcgtcggagctgaagcgcttccagtcaagcagcttgcccgggttcatgaagttgccgtcgccgatgaagcgcggcgggatgatctcggaaaaattgttcatgcgctgcgcccagaatgcggtgccccaagcgtcgttgacggcgtcgatggtgccgtacttcttctcgcaccacttctggaaggcgcgctcggcgtcttcggaatagtcgaagcggttgtggcagccgtactcgttgctcacatgccaagagaccacataggggttgtccttgtagtgctcggccatcttgcggcacaagctgagcgcgtagtcaaggaagaccgggctggtggcgcgccagtgctggcgggcaccgggctggcagacgtcgccgcggtagtcgacccagaggatctccgggtgggcctgggtcatccacatcggcggggatgcggtgccggaggcgagatcgacggcgatgccggccttaccaagcttgtcgatgacgcggtcgagccaatcgaagtcgtacacgccttcttcgggctcaagcttggcccaggagaagatggctacggagacgaggttgacgccggcctgctgcatgagggctacatcttcgtcccacacttcctcaggccattggtcggggttgtaatcgccgccgtaccagatgcggggcttgttgcccgcaagcggctgcggccacttgaactctttacgttccatgatgattcagctcctttattgaattttatcgataatctgcgtccgcgggaataaacagcccacagggctgtttgcctaacggctcagctcgtcagagggggggcttggcactattttacctccctctgatgaggaaggttgtctcggcggagccgggacggagggagagaccccgccgcgaggcggtgaagacaccgcgtcggcggagccgactccatcactccttgacggcgcctgcggcgagtccggactgccagtacttctgcaggcacaggaacgcgatcaccagggggatgatcgtgatcagggagcccgtgatcaccaggttctggatcgcctggccgcccgcggtcgaggcctggtccttccactggttcaggccgatggtcagcgggtaccagtccgcgtccttgagcatgatcaacggcaggaagtagttgttccacgtcgccacgatcgtgaacaacgccgtcgtcacgatgttcccgatactggccaacaacacgctgggggcgagcacgtcgatgtccgtgcccaggaaatcgttcaacgaacccaccaggccgtacttcgcgccatacacgaaaccccagatcaacgtcgacaccaccgcaaaaggccacatgaatttccatccacgccaatcggccttgtgcttattcacacgagccttgcccgaatgtacgggcgcagctgcgatatcggctgaagccattcccaacccctctccttcgaaggttgaccgaaatgtttgcgttatcaccataacaccatttgtaacattgtccaatcgtgttgagtaccgtgttgaattaagggtttctcagtcactctgctacaatggtcacgaagacaacgatgttatcgttaccgtaagcggccctaagataagcgttgcaaacgaaacaccgacattaatgagtcaagcgagggtgaaatgtcgaggccaacacaggtgtccatgcaagacatagcgaaagccgccggcgtttcgccacagacagtgtcccgcgtggcgaatggcagcgatgcggtgaaacccgaaacacgccagcgtgtcgaagctgcaatgaaacgccttgggtatcgtccgaattatgcggcccgagccctaaagcacggccgcttccaggatatcggcgtggtgatgttcaacaccaccgcgttcggcaacgcccgcatccttgattctattgtggccaacgcggccgatgacgattattcagtcaccatccagaccatgcgccacggtgcggaacgcacgctttccgccgccatcgatcgcatgcagcgtcagccggtggatggtgtcatcgtagtgctggaggaacgcatctccgatttcgtcggatacaagcctccgcgagaacttccagtcgtgctcatctgcgaatccgccgccgaccactgccccaccgttgacgccgaccagtatggctgctcgaccgctatcgtcgattacctgatgagcaaggggcacaagaccgtctaccacattgccggaccgtccacctcgcgcgccgccgaaagccgcgcccgcggttggcgagaagcgttggaacaaatgggagcacgcgtaccgagcatgtacatcggcgattggtgcgcggattcaggctaccaggccggcgtggcgttggcccacgaccccgactgcacggccatctacgccgccaacgaccaaatggcatacggcgcaatgctcgggttgcagtcagcgggcaagcgcgtgcccgaggatgtcagcatcgtgggcgtcgatgattcgctggtcgatatggtcccgcgcttgaacctgacgaccatgaagctgcgctttgacgacattggcgccaccgccttctccatggtccgccgtcaatgcgaaggcgagaagataccggtcggcgtcaaaaccgtaatcccgccggaactgatcgaacgcggttccgtgcgcgacatcagctgacgagcggcatgtgctggcatccactggtacctgtcagtgattcacctgccagtgatccacctgccagtgatccataggcaattccgcaccgaccaatcgactcggttgtgcaatattctgcacatttccaactatgtgcagaatattgcacactttactatactgtgatatattttgcacatgattgtcatggatatcgccgaatacgcgcggcttatcaaggatgaaaggcaacgccagggcatcagtcagaccgacatggcccaacggctgggcgtgtcacgtcgctggctgatcgaatttgaacacgcccgagtccccaatcccggattctccaccattctcagcgctctgactgagcttggcttgtcgctggatgtccgcaaaaccccgcagcccgccgaactctatgaatggtgacaccatgagcgaaaacactctcaatgcatttctcggcgaaacacccatcggccagtttcgaagaacaaacgatggcagcattattttccaatatcacgattcctatcgttggtcgcaatcacccacaccaatatcgctttccatgcccattaccgcagccgaatattcaggcgacatcccgcgtaatttccttgaggccctggtcccggaatcccctcaggcccgagatgaagccatgcgattgcatcatgcccgatcgacaagcgcatttgatctgttgcaagccatcggattcgatgccaccggcgcattacggctgtccgccgacccgcacttgcccatagatgacgattcacttattccaatcagcgattcgcagatcgcgaatcgactacgcgcagccgcccccacaggcatccagtccgcaagcgtagacgagcattggtcggtcgcgggacagcagggcaagatcgcactgaggaaccgcaatggatcatggttctccaccactggaatcgcgcggacgactcatatcatcaagcccggcataccgacccttccacaccaagcattcaacgaacacatcaccatgcgcattgtggaggcgatgggaatacccgtggcccacacctcttttcacatctttgatggggtcccagccatcatcagcgagcggtatgaccgtatagtgtccgccaatggtacggtgacggccctgcaccaagaagactttacccaagcgctgggcattccctcatcgctgaaatacgaggaacacaacggcccaatgtccaatgcatatgcggaaatgttgcgcaagcacggtctgcccggtcaggccgaaagcaatatccgagccttcaccgacggcatcctcgccagttatctcgtcggggcaacagacagccacgccaagaactactcgctattgctcgatggcgcgtccgtgcggcttgccccgctctatgaccttgcttcggtgttcccttatttggggcatggcaagcagatcataaatgccactttggcgatgaacatcggcggacgccgagatcttcttcaattacgccgcaaacatctggaacgattcgcacagcgggtgggattagatgaggaatccgtgattttacgattccacaccttggtggataggctgccggaggcattcgacagcaccgtgcaacccgctcacgacgttatcgcgagcattggtgcgcaggaattcatcgatagctatcgcaagcgcatcatgatggtgtacgacgatgcaatgagctggatggccagtcgaaagggacagtgattcggacgggcggggattggtctcgccatcccccccctaagaaatcagatcttaagcggcacacgggaaacgaattcgcgcttctcgcctgttattggatcggtgaatcgtagcacacgcgccactaattgcagcggctggctgaaatcgtcgtaggggcgtgtctggatgcgcgggtagaagtcgtcgcccacgatgggcaggccgagcgaattcatgtggacgcgcaattggtgggttttgccggtgcgcgggtggagtgtgtagcggcagatggggtgatttcccggatggggaccaccctccggcgcttcgcgccacctcccgccagcgggagggaaacagagatcgccgcgctcgatgagggtttcggcgttggccaaacccggttcctcgaatgcggccatcgtgccgtgttccttggtgatgtgcgatcggcgcagcaatgggaacgggcgtggcggttcgacctgcatgatcgtgccgaatcgcgggccgctgatcggccggcagggtgccaggcattcatagatcttgacggcctgccggttctggaacagcatctgatacgcgccgcggcaggccgaatcccgcacgaacaccaatacgccggcggtcatgcggtccaatcggtgcgctggcgtgatgtccggctcccccagccgctcacgcaatcggatcagcgcggtctgccgataccacatgccgcgtggcatggtggccagaaaatgcggcttgtccaccacgatgatccgctcgtcctcatacagcacgtccatctcaaacggaatatgaggctcgtcaatcacataccgatgtggcttactcaacggtcacggacttggcgaggttgcggggcttgtccacgtcgtagcccttgagctttgccatgtccatggcgaacagctgcagcggcaccacgtcaaccagcgggctcatcagcgttgggcaggcggggcgccagaacaccacgtcagcgtaccgttccacatccgggtcgccctgctcggccacggcgatgatgtacgcgccacgagccttgacctcctcgataccagagatcaccttggcgtgcaacacattgcggccgcgctgcggcggcacgatgaacaccacgggctcaccctcgtccaccagcgcgatcggtccatgcttgagctcgccggccgcgaagccctcggtgaacgtgtaggcgatttccttgagcttcaacgcgccctcaagcgccaccgggtagcccacgtggcggccgaggaacaagaaggagttggcgttcaccatgcgctcggcggccgcctggatggtcttgggctgggtgtcgagcacccactgaatcttgcgcggcatgtctttcagggagtcgagcatctgatgaatctcatcgcggaacatcgcgcccttgacctgcgccagatacaggcccagcaggtaggcggcggtaatctgcgccacgaacgccttggtggatgccacggcaacttccgggccggcgtgtgtgtagagcacggcgtcggattcgcgcggaatggaggcaccctgcgtgttgcagatggccagcaccttggacccctgttcgcgcgcgtggcgcagggccatcagcgtatccatggtttcgccggactgagaaatggccaccacgagcgtacgcggggtcagaatcgggtcacggtaacggaattcgtgcgcgagttcgatttccacgggaatacgcacccagtgttcgatggcgtatttggctacctggccggcgtagctggcggtgccacaggccacgacgatgattttgtcgatggccttgaagtcgtgttcgtcgatacgcacttcatcaagggtgatggcgccattcgtgtcgaagcggccaagcagggtgcgctgcactgcggcagggtcttcgtgaatctccttgtccataaaggaatcccagccgcccttttcggcggccgaagcatcccaatccacggtgtaggtcttcgggttttcgaccacgttgccgttgaaatcggcgacgatgaccttgtcggcggacacgcatacggcctgatcctggtcgacttccatggcgcgcttggtgtaggccacgaatgcggcgacgtcggaaccgaggaagttctccccctcgccaaggcccacgaccagtggcgaatcatggcgggctccgaccacgatgtccggctggcggcagtcggtggccagaatggtgaacgcgccttcaagcatgcgggccatacggcgcacagccttgaacaagtctggcttgccttcgtccgcgataatcttgtccacgatcttgccgagcagcttagcggccacctcagtgtcggtggcggaggcgaatcggtagccttcggcttgcaggtcgaaacgcagctgagaggcgttttcgatgatgccgttatggatgatggccaccttgccgtccatactggtgtgcgggtgggcattcacgtcactcggctcgccattggtggcccagcgcgtgtggccgatgcccaccgtggcgagcggcatcggcttgcgctcgatgtcttcgaccaggttcttcaaacggccggccttcttgcgcacgaccaccttatccatgccgggcgcggtcagcgccacaccggccgagtcatagcctcggtattccagacgttccaggccttgcaggcagacctccaaaggcttgccgcatgccgtttcaatatttcccgcgtatccaacgattccacacatggctcaccagcctagcggacgattattgcgcaaagcgaatccaacccgccgcctttgcaggattggaacatgccccttcgtgaaaagcgtacgctgagttcatcagcgtacgcttttggagctgcaacaacgagccttcctacagcacgtgctgtaggcggagccgtaaagcggggagcccagtgggctccccgtaggcgacgccgaagcacgacagtgctgaggtaatataacagccttcctacagcacatgctgtaggaagtccttaaacctaggctcggtggggtggtcgatgatgtcggggccgcccttttctacgactacgccgccatccatgaacacgatctggtcggcgacttcgcgggcgaagccgatttcgtgggtcacgcacaccatggtcatgccttccttggccaaggaacgcatgacgttgagcacttcgcccaccagttcggggtcaagggcggaggtcggctcatcgaagagcatgatctccggcttcatggccagagcacgggcaatggccacgcgctgctgctgaccacccgacagctgggaggggtaatagtccatgcgatcgcccagaccgacgcgctgaagctcggccacggccaggtcacgggcggctttcttggactggtgctgcacgtggatcggggcttccatcacgttctccagcgcggtcatgtgtgggaacaggttgaagcgctggaacaccatgccgaggcgagagcgctgtgcggcgatctccttatcgtccagggtctgcagcatgtcctggccgtttttggtcacgtgcttgtagccgatgagttcgccgtccacctcgatggaaccgccggtcagggtttccagctggttgatcagacgcaggaacgtggacttgccggaaccggagggccccagaatcaccgtcacagtaccgggcataacggttagatcgatgcccttgagcacatgcagtgggccaaaggccttgtgcacctgcaccgccttgacagcgggaatcacggaaccgtcagccgccttgtgcacggccggggcaacactggtgatgtcattcgtagtcataatcgcgctcccgccttatgcattcaatccgacaaatgtggtctggttgagcttgtccacgtcatccttcggctcaccgtcggtcttacccggcaatggcacctgcttgcccttggtgcccaccggtcgggcatcgaagcccttgccgaagtgcgcttcaaggcgggactgcacaaccatcagaatggaggtgatcagcaggtaccagaagcaggccacgagaagcagcggaatcggcttgtagatacggttggcgatggcgttggtggcaaactgcaactcgagggtgaacggcacggcggtgaccagcgaggtggtcttcagcatgccgatggtctcgttgccggtgggcgggatgatgatgcgcatggcctgcggcagcacgatgcggcgcatgatgagcgtgcggttcatgcccagcgccttggccgcctcggtctggccggggtccacggcttcaaggccggcacgcacgatttcggacaggtaggcggcctcgttcagggccagaccaatccatgcggcgttgaatgcggtgaccaccacgttggagtcgatgctccagaactccaccgaggtgaacggaatgccgaggctgatcttaggaatcagcacggcgaacagaccccagaaaatgagctgcgtgtacacaggcgtgccgcggaagaaccagatgaagaaccagctgacgccgcgcagcaccggattgatggatttgcgcatgatggcgagaatcaccgacaggatgatcgccacgaccatggagatcacggtaagctccaaggtatagcgaatgccttcaagcacgttctcgttgaacaggtacttccagacggtgggccaatccagtcgcggattggtaatcaagccttgaatgagcatcgcggcgagcagtaccacgatcactgcggccacaatcgggccggggcgcttgaccggcaacgccttgatgcggttggggatgttcagcccctcaccgtcgacttctttcttcgccataatctggttccttggatgtgttgggcagcctgaactgcaagttgcaactagcgttgaaccttagtgcacgaatggggcgactgtgttacaaacagtgcgccccattcgaattttcgcgacagcttgtcgactattcgacggccgggttgatttcggccttgtccagtgcgccggattcgacgccccagtgctggagaatcttagtgtaggtgccgtcgtccatgagcttttgcatggccttctgcacggcttcggcggtctgggaatcgcccttcttgatggcgatggcgttcggtacttcatcgaagtccttgccgagctgttccagctggccatcggtctgggcgatggcgtagccgacaaccggggaatcggcgaagaagacgtcggccttgccggtcaccacagcggtggtggcgtcggtctgctgcttggaggactggatggtgatgtctttcttgccgtccgccttgcactgcttggcggtcttgttgatggcctcttcctcgacggtgccggtctcgacggcaacgttcagaccgcacaggtcgttctcatcgacgttcttggggttgcctgtggccactgcatagcccatgcctgcggtgaagtaggagacgaagtcgacggattccatgcgctccttggtgatggtgaaggcggcgatgcccagatcgtacttggagccgatggccggaatgatcgtatcgaagttggaggagacgatttcggtctcgagaccgaagatgttgcccatggcgcgggcgagatccatgtcgtagccgatctgggtcttgccgtcggcgtcgaggaattcggccggggcgtaggaggggttggtgccgatggtgagcttgccgtccttggtcacggattcaggcagcagtgcggcgatggtgtcatccttctccacggagctgacatcgtagctggtgatggtggcggcatcggagcccttggcggaatccgtaccggcatcggccttgtcggaggtgccgcaagcggcggtggcgaacagcatggccgagctcagtgcaatggccataatggacttcagtttggtggactgcataatcgtttcttcttctctcttacgccgcttcaacggcaacgatcaacggttaagcatatttatacactacagtgcatacatatacaaaaagactcccgccgcagggcaacgggagtcttcatagtaaccgaaactactcgacggacgggttgatctcggccttgtcgacggcgccggaagagacgccccacgtgtcgaggatcttcttgtacgtgccatcatccatcagcttctggatggccttctgtacggcctcggcggtcttggaatcgcccttcttgacggccacggcctcaggggtcacaccaacgtcctcgccgagggcctcgagcgtatcaccggtctgcttgatggcgtagccggcaaccggcgtatcggcgtagaagatatcagccttaccggaagccacggcggtagtcacatcggtctgcagcttggaggactggatgtcgatggcatccttaccgtccgccttgcactgctcgttatccttgttgacttcctcttcctgggtggtaccggtctgcacagccaccttcacgccgcacaggttcgaggagtcgaccttgttcgggttgcccttctgcaccacgaacgtggaaccggccttgaagtaggtcacgaagtccacagcctccatgcgttccttggtcacggtgaaggaggagatgccgatgtcgtacttggagccgacggacgggataatcgaatcgaacgtggaggagacggtgttttccttcagtccgaacactgcggccagcgccttggacaggtcgacatcaaagccgaccggggtcttgccgtcctcggccaggaactcggccggggcataggaagtatcggcgccgacggtcagcgtgccgtcgccggccacggaatcgggcagcagtgcggcgatctcgtcgtccttctggatgctgctggtgtcgaagccttgaatcgaagtgctggacgagtccttggatgaatcgccgctcttggatgcggtgtcggtgctgtcagtcgtgccacaggccgccacggcgatcagcatggccgcgctcagggcggcggccgcagcggattgtattcccttgcttagagacattggatttcctctctccggatagtcagctgggcgggtatgtttcccagatggttccagagcgtaggagtgcaatgctacggaagcgttaatcgtgggcgaaatggcccacaacgcggacatcctactcttggctcccctccggaggggagccaagaggcgggactagtggcgcatgttggcgtagcgcatggcgcgtagggcttcgcgcttgtcctgctcttcgcgcagggcctggcgcttgtcgaattccttcttgcctcgggccagcgcgatctccgccttgacgcgaccgtccttgaagtacaggctcagcggcacaatcgtgtatcccttggcttcgatgccgcgggcgagcttggtgatctgcagtcggtgcagcagcagtttgcgcttgcgcttgggcgcatggttgttccatgtgccgttcaggtattcggggatgttcgcgccctccagccacatctcgccacggcggtcgatggagatgaacgcctcggacagcgatgcgcggccttcgcgcaacgacttgacctcggtgccggtcagggccagccctgcctcgtacttgtcttcgatggcatagtcatgccgggccttcttgttctggacgatgagtttctcaccggtttccttgggcatgtctcctcctttcgtgggcaataactcgtgggtagcaactcgtgggtagcaacgcaacatccgacgatatcacggaccggcctcgaatacgaaaagggttcctcttcaagaggaacccttcaaccgcatatatcggccgaaccaaccggtcagtggacgaaccagtactgacccaaattggtcaaggtgcggttgtgcatgttccacggaccaccccagttcatttcggagatctggaatgtgccgtcgccatacacggcttcgactacggcaacatggccataggtaccgtcggcaccatcctgaccaggcaggaaggagagcgccgcaccgacctgagggttgtggtccacgcgcaagccgtacgagggggcgttgcgccaccagtcgccgccattgccgagataggacggcgtgccaatgcccatctgcctacggcgttcatacgcccagtacgtgcactggccggcggcataggcgttgccgtaatcaccgttcgacgtgccttggccgccgacgctgggggcgggagcgggggcgggagccggcgccggagccggagcgggcgccggagcgggggtcaccggagtggacggcgtgccgccctggttaccggtatccaccctgttggcggcgtcctgctgctccttctggaactgacgattgtaggaatcgacctgggaggcgatcagtacggtctgggccgcctgcttggcggattgggaatccagactgtcgatcatggaagacagttcgtcacgccttgcttcgccttcctggcgcagcttatccaaagcgtcacgttcgctttgcgcggtttcggcggcggtctgtgcggaagcggccttctcatcggcctgggtcttgagcacagcgatctgcttttcgatggccgccaagcgctcgccacgattcttcgacgtgctcagtgaggtcgcggcggaggaagccgcattcgcctcgttgcgggacaacgcgtcccgggactgcatggagttgacgaagtcctgtgtgctggtggcacccgtcaccacgctcatcacgtcggaagcattcgagccgtgcatctcgtcacgggccagctgggccacggcggcgtgcgcgtcatcgtagtccttgccggtctgcttgatccgctcctcgagcgtctccttgtctttctgcgcggcggaaagacgtccggatgcggcgtcggcctcgtcctgagcggtggcggcatcctcgttggcctgcgtgaccttggcctgcgcggcgacaatcttgttgttggtcagatcgtccagctcaagtaccttattcgccaggtcctggctggcaccggccagctgctgcttgagttcggcctcgcgctgtaccgacgcggcgtgctggttctgcgcattgatcaggtcggaataggtgtctgcctgggcaggctgtgccgagctgaacgccagacctcccacacaggctgcggcggccaccagtgccgccagtgcgggcttgatcacacgtacgttcgtcatatgtgaatagtcctttcgctcacttaagccaataccataacatgcgaacctgagaggcttgcacacgatgtcatcacatttctcgcgggtaagccggtcgcgttacgccctcaaataacgccgcaacgagatggttgaagcgatgatggacagcagtatcgcgcccacaaccaggaacggcgatatcaccagtaccgtgagctgattcacataaggaatccatgtaacggatttcgccagccagccggtgacgaacacgttgacgatagccgaaagcatcaggcacgagagcaccgagccgatcagcgaggcgatggtgccctccagaatgaacggcagacgaatcgtccagttcgaggcacccacgtacctcatgatttcggtttcggttcgtctggatgcggcggacatacgaatggtggttccggtcagcaggatggcgaccaccaccatcacgccggcgagcacagccgtaaccgccgtggctcggttgagcacggcgaacaccgggtcgaagatctggcgctgatcggtaacgtcttccacaccctccttgccagagagcacttcggagaccacctgatatttggtggggtccttgagcttgagccagagggagtcctgcatatcgtccgcggtcagcgtacggccttggaattcaccgttcgggtactgcttggtgaaggtgttgtcgtagaaatcctgcttgctgacatagtcgatgttggagaccacgtcgttgagttcatcgcgaatggttttctgcagtgccgtgatctcattggctgagggcgatttgccggaagcacagttcgcggactggctggtgccgtcggggcatagccataccacgacctcgaccttgtcgtaccagtcgcccttggctttggtgatctgcgcctgagtaagcaccgaagcgccgatgaacaggaatgagatgaaggtgaccagcgtcagcgacagcagcatcgacaggttacgggtgaggttggcccacgtttcggacagaatgaatcgtgctcgcatgatgatcccccttactccttagcgccctcagcgggttgatcgtcggatgtttggtctgcggcggactgctcgtcagcaggctgctcgtcggcggactgctcgttggccggcggtgcgggcggttccggcggtgcgggcggctccggcggggccggcggctcggcggcggatgacacggacgtatcggcaaccgcggcggtcgcggcggactcgtccttgaacgggtcgaacgcctgggtgctttccagggcggcggcctgctcatccaacggaatgcccttgccccaggtcagcgtgtcttccagcggcgcaaacgtctcgccatagcggccggtgcggccggaatgcacggaattggccaaacgggcgatgccttcagacggctcgtcactgccctcgatggccttggtcgccgccgccagcacatgatgggcggtgtcggacttggcttcgacttcggcatccgggaagaacagggcggaatcgtaggagccatgagcctcgtcacgcacgatcttgccgttgtgcagttcgaccacgcgcttgcgcatcgagttgacgatctcttcgttatgcgtggccatgacgatggtggtgccggtgcggttgatggcgtccagcacttccatgatgcccagcgaagtggtcgggtcgaggttgccggtgggctcgtcggccagcagaatctgcgggtgattcacgtaggcgcgggcgatggccacacgctgctgctcgccaccggagagctcatgcggatagttcttttccttgccggtgagtcccacggtattcagcaccttgggcaccaacgatttgatggtggaccgccgcgtgccgatcacctcaagggcgaacgccacgttctcccatacggttttgttattgagcagcttgtaatcctggaacacgaagcccagcgaacggcggtactgcggcacttgacggttggtgatgcgccgcagatcgttgccggccacgcgaatctcgccgctggtggcctcctcctcgcgcaacagcaggctcaagagcgtggtcttgccggagccggacgcacccacaaggaacacgaaatcaccgcgttcgatatcgaggttgatgtcgtcaagcgccggtcgggtgcctttgggatagatcttggacacattgtccagtgagatcagtgccataatgctgtttactcctcggtttcggcggcgcggcgctgttcatggcgccagcggatgccggcctcgatgaacgcgttgatgtcgccgtcgaacacggcctgggtctggctggtttcgtagccggtgcgcagatccttgaccatctggtaggggtgcagcacgtaggagcgcatctgatcgccccagctggccttgatgtcgccggcgagctccttcttcttcttggcctcctcctcgtggcgcagcacgagcagtcgggactggagcacggccatggcggaggcacggttctgaatctgcgaacgctcatcctgcatggtcaccacgatgccggtgggaaggtgggtgatgcgcacggccgagtacgtggtgttcacgccctggccgccggggccggaggagcagtaggtgtccacgcggatgtccgtatccggaatgtcgatgtgatcggtggcctcgaccagcggcaccacttccacggcggcgaagctggtctggcggcgaccctggttgtcgaacggggagatgcgcaccagacggtgggtgccgccttccacggacagtcggccgtaagcgtagggggcgtccacctggaaggtggcggacttgatgcccgcctcttcggcgtaggaggtgtccatgaccttggccttgaagccgttacgctcgcagtagcgcaggtacatgcgcaacagcatctgtgcgaaatcggccgcgtcgacgccgccggcaccggagcggatggtcaccacggcggaacgttcgtcgtattcgccatcgagcagggtctgaatctccatctggtcgagatccttctgaatctcgccgatttcgctttgtgcctcgtccagagagtcctggtcgccctcctcgtggccgagttcaacgagcgtttccacatcgtcgatgcgctgggaggcggagttcagacgcttcagctgcgattccgcggcggacagccggctggtgatcttctgggcgttttccggatcatcccacaggcccggggccgcggcctgcgtttcgagatccttgatatcggccttgagccggtcgacgtccagcgccttggcgatggattcgtatttggcgcgggcttcgccgatcgcctgggtaaagtcaaattctgccatcgtggtttaccttactgttgattctttgagattcttggggaagtcacgtccttgttgacagccttcgcacattcctctggcgttggcgggcattgccgcgccacacacgcatccgcctgcaatccatgctgccagaaggttccgggcctgccttgccgatagccggccgggcgacctcacaaatccctcgcatcagacgtgttcaactgcgggcacgaatatgcgaaggcaacgtcaaagccccgcgtaaatcgccgggatgatcagggagccgagcatggccacagctatgacgacacacaccacacgcacgatggtgcggcggcggttctcacgctgctgtcggccgtcctgatagttactcacgagaccaatagtgtactcaccgcttacgaccgcaggacttgccgccgacgccagccctgccggcgggcccccacggccctttcctttgcgctttcagcgccgccagatggtgtttcatggccaccagcatgatgtgcgaatcctcaaggcccaagtggcgttcgttgtgggcggaatcaagcgcgccctgacgtttggcgtaggcgtcgagcgtgttgtctccgtaaggatgctcgttggtgggtaccgcgccggggtcccactgccggctcatcggcagggtatcgatgatggtgatgcgcccggcacggtagctttccgcgtatccggcgacgttcagcatgaaccagctatgttcgaaggtggcgttatgcgccacgtacggctgctgggtaagccgcgcgagcaggccggcctgggcttggggccattcgtcgaagagtcggtacccggcctcgctgctgcggccgcgtacatcgatgccggtgagtttggcgatgagggcgttgccgagcgccgcgttttccggcggcacgccaaaagcgagacgggactggccgtaggcgtcgccggcggcgtaatagccctgctcataggcgtatgtctcaggttcgccggccgggcgcggactggccatgttcatgaactcgaagccgacgtcgatgatgtagtcacgcgccggatcgatgccggtggtttcgatgtcgatgcccatcaccgcgtccacgtcgcggccgggcagataggcgtcgcgccagtcgggcttgggatggtggccggtagcgttgccagacgaggcggcaccacccggcgaagtcgcgccggagagattggcgcgggccatcgccgcatcgcccgcacgcttctggaagcgctgggccttacgtcgttcggcgcgtgcgtcaagaatcaccgccgtacggtcttggatatcgtccaaggcgactgttgtggggaacttgacatcgctgttttcggcagcagtgtttccggcagatgcgtcaccggtttcaccgctcagattcagcatgccttggtcatcgttcgatgggcggctgccggagtacggcctgagcacggcaacggtagtcctcccccgccgttcgcgactgaccacccataggtgttgctgttcgcccagatgcaacagcgtgttgatgttgtcgttgagccgacgattggcgtaggcgagcgcgcgaggcagacgataggagccgatgaatcgatcgtaatcggtcatgaatgtgctgttgcattgggcgatgattgattccagatgctcgcgtgtggcgtaatcgaccttcaatgcgtcgtggatagcttgtggcgtcagttccggttggtccaacccgagctgaggctgtgctgcggtttcgccatattgctcaccatctgcagcaagcgccagcaatacgctgatgccatgcatcaggtccagcgaacgcacccagtcccagtcaatggtggtgccgtcggcgtctttgggcatggacgccgcccattggggaatgtctcccttggcggcgtccagccatgtgcggtcgatcatagtgcgaagccgagttcttcggcggcctcggtgggtaccgggtcgtcgcaccaataatcctcgaggttttcggtggtggtcagcgaacggatttcggcgcgatcgatatacagttcgccgctcaaatgatcggtctcgtgctggaagatgcgtgcgggccagccgtgcaacggctcgctgtggtgcttgccgtcttcatcatcccattcggcggtgatgtcgagccaacgcttgcgcacggcctggtatccatcgaagctcaggcagccttcgtagaacgaggcggttttgtcgctggtgggtttgtagctcggattgatgatcacgtggaaggggaattccgcgatttcgcgcggatcatcctcgtcgtcgcgcacgtggtcttcgaccacggcgagcgcgagccccaagccgatctgggtggcggcgagccccacgccgggcgcctccagcatggtggtgtgcatcgtatcgatgagtttggcgagcgtacgcttggaaagctggccatggtaggccaccgtccgttggcgcaacaccggttcgccggcctgcacgatgggcaggagcttctccttgccgccggttttgatgagttgttcgacatcacggttgagttcgaggtcgactttggcgttctttccaaacattgcttttccttagggaagggtgctacagcgcgagttcttcggcgacgatcttggcgaggcgggtgcagacttcgtcggcgtaggcctgggtggcggcttcggccatcacgcgtacgagcggttcggtgccggaggggcgcagcagcacacggccggtgtctcccagcagttcctcctcgcgggccacggcatcctggatgcgcttgttggtggcggcggctttcttgtccacgttcggcacgttgatgagggtctgcggcagctgcgggaagtcggcggcgagctccttcaggctcttgccggacttgacgacctcgttgcacagggtcagtgcggtcagggtgccgtcgccggtggtggcgaattcgcggttgatcacgtggccggactgctcgccgccaagcgagtaatcgcccttgagcatttcctcaagcacgtaacgatcgcccacggcggtttccacggtcttgatgcccatgtctttcagggcgagcttcagaccgaggttgctcatcacggtgaccacgagggtgtcgtggttgagcttgccttcgcgctgcttggcacgggccagaatgcccatgatctggtcgccgttgatcatgttgccgtcttcgtccacggcgaggcaacggtcggcgtcgccgtcgaaggccacgcccatcacggcatcggtggccttgaccatggcctgcagctgctcggggtgggtggaaccggcgttcttgttgatgttgtagccgtccggcgaggcgttgatcacgattacatccgcaccggcacggcgcagggcttcgggagccaccacggaagtggcgccgttggcgcagtcggccacgatcttcaggcccttgagcggcttgggctgggttttgtcatcgttcagcggagcgatggtggccaccagatgatcgatgtacaggttggtggcggtggtctggtcgtggctcacgcggcccacgccggcaccggtcgggcggtcccagtcctggccgagcacggcctcgatgtcgtcttccttctggtcgggcagcttgaagccgccgcgtgcgaagaacttgatgccgttgtcgggcatcgggttgtgggaggcggagatcacggcacccatttcgacgttgagcacggaggtcaggtaggccacgccaggagtggggatgatgccggcatcgatcacgtcgaagccgccggcggccatgcccgcggacagggcggaagccagaaaatcaccggacacacgggtgtcacggcccacgagcgcgcggcggcgtccctcaggctgatcgtcttgggtgccggcgtcgccgagcacacgcacggcggcatcgcccaaatccaacgccagacgtgcggtcaaatccctattggccagtcctcgaacaccatcggttccaaacatcttcggcatatgaagttccactccttgtatcgcgttacccgcaccatcgtagtcgttgtgctccaccctaggacccgactcggcaaaaaacgccacggaatctgctctaggaccagacaatggcattcccgagccacaccgaaccctacccaatcagacgaatcagcgaatcaggcgcgtcggccttgaatcactccacgggtgcagtgtatgccagctgtgccacgaacagcccatcatctctcgtgacgatttgcgcacggccgggaacggcacgcttcggcttgaccttgccgataagctgcccctcgttgggatcgccggacagcaaaataccggtcatgcccaaatcctggaacgattgcagcagaggatcatacatggctcggctggcaccaccggtacgccgggtaatcacgacgtgcaggcccaaatccgacgcttgcgccaaatatggtgccaacggcttcagcggattgccgcgactggtggcgaccaaatcgtagtcgtcgacgagtacgtacacttccgatccggtccaccatgaacggttgcgcagctgttccggggtcaagtccggccccggcatgcgggtcttgaggtaatccgcgaggtcgaggaactgttccgtggcagtgtcgtcattggtgatgtacgccccgagatgcgagtccggtatctgtgcgagattggctcggcggtaatcgaccatgaagatcttcgccttaccatccgggtagcctcgcacaatctcgtgcacgagaagtcgcaacagtgaggatttgccggatttggcgtcaccgaatgcgtagaagtgcggctctttctgcagatcgagcacgaccggtgccagcgcgttctcattaataccgaggacgacccttcctctggtcagcaattcggcggccttcggttgcttcataaccgcggaaatcatcggttcgtaaggaagcttcgtgggtagcaagcgcagctttggaccgggcttgcccttccacgcggcatgcaccttgttgacaagatcggcaatgccatccgacacggtggctgcctcgtgattgctgtcaatacgcggcaaaacggcaagcgtatgcagtttcgccgggctgagtccacggcctggcgcgcccttaggcacggtcgtcgcgatcctgcggtcgatttgggaatcgccgggatcgccgagacgcagttcgagcttggtgccgatgaggtcgccgatgttggctcggatttccatccaacggttggcgctaagaattacgtgaacgccgaaagtcaggcctcgcgccacgatttgctgcacctttggttccagctcatcgtaatcgccgcggaacacaccccatccgtcaatcaccaggaacacatcgccgtaaccatcatccacttggccggctgccctgcgcctgcgataagtatccatgccgtcgatgcgctgttctttgaagaactgctcgcgagcgtcgataatgccggaaacctcggcgagcgtacggcgtactttctcttcctcattgcccgcggcaacaccgctgacatggtcgagtccttccagcgtggtgaacgtaccaccgccgcagtcgatgacgaagaactgcacctccaatggcgtgtgagacaacgacaacgaggtgacgatggatcgcagcatcatgctcttaccgctgagcgggccgccgacgaccgcaacatggccgccagcgccggacaggtcaagcgccatgacgtcgcgcttctgttcacgcggcttgtcttccaacgcacaaggtgccatcagcgcgccgcgcttacgccacgatggcgaaatcaggccatattgcgcagtgacggtgaggtccggcatgaactcgtccaaggtgttcggcacgaccagaggcggcagccacaccacgtgcgccggcctgcccttgcctcgcatctggtcgacggcgtactggaacgtcgtggtgtctccatccaagcccttgggtacgccggacacgtacgcagcacggaatctggtgatggttccggccggtgttttgaggtaaccgatacccggcaggcttggcagttcgtatgcgtcggggatacccagcactgcgcgggattcggacgcggagaacgttttgaggccaacacgatacgacaaatgttcgtcaaggccgcgcaacttgccctgttcgagtctctgagaagcgatgagcaggtgtacgccgagcgaacgtccaacagcaccgatacgcacgaaggactgtacgatgtcgggttttgccttaaggagttcggagaactcgtcgaccactaccagcagcgacggcagtggatcgaggtccgtgcgcccgccgttgacgcgcgcatcctcgtattcggtgatgttcgccagattaccggcgtcgcgcagcagttcctgacgccggttgatttcgccgtccagcgcatcttccatacgatccacgagggaggcctcgtctccaaggttggtgatgatggacgagatgtgcggcatgccgcccatgcccgcgaatgtggcaccacccttgaagtcgatgagcacgaagttgagctggtcgggcgaatggctgagcgccaaagacagcaccaatgtgcgcaacacctcggatttgcccgagcccgtggcgccgacgagcacaccgtgcgggcccatgccgtgctggcccatttccttgatgtcgagatatgcggtgctggtgtcgtcgtgcagtccgataggcacacgaagacgttccttgcccgtacggtaggcccacagtttggcaaggtcaatatgacgaatatcgtcaatacccagcaatgccggcaattcgttggatttcttgtgcccggcagacgaagcggcctgtgcggattccgcatcctccacttcgtccggggcgctggcgagccgctgagcgatggcgagggcttctcgcaccgtaagcgcatccggcttgatgtcgaatggcttgatggtcgtggagaacagctccacggtgccttcctcatgggtttcgagcacattgaggccctcttcaaccgttgtctgagagaacagcacacgcagtacattgtcttcttcaaggtcgccccattcgtcgggcaggtcgatcacggtgacgccgtcaagaccatccgaagcgaatagctgagtttccttggcgagttgctcccggtcaaacccgtcgttgaccaccagcacatgtggcacgatttcatagtcgctaccggtataccggttacggtcaagcgcctgcgatcccacgagcaggtcaaccgcgtgtatgttcgaggtgaccatataacgcccatgccccactgtggaggcaagtgcctccgccggttcttgggcgagttcgtcgttcaatcccgccgcttggggcagcaaccgcacccaatcccactggccgatgcgagcctcggaagccaatacgacgatacgcaggcaatccggggcatgccaggtagccgcttggcacaacaccgcgcgcgcaagcgcctccgtacgctcaagatcgcccagcagctccactcgtttgaactgccgcatgttgacaacgtatggcatattgcgcaacgattcgtgcgccagcatgaaccggtgagcggccgatgccgaaactgggtctagttgtgccaatggcggcagctcaggcgcttcgagcgtgatgcacagaggctcatcatgcacgccgaagcgcagttgcatgaagtccccatcggattggatacgctcccatcggcgtgcgggttcctgcgcgatggcggtaagcgattgcggtgccggagcattccacaacgccgcgttacgctgtttgcgcccggctgtgcgcactgttttacgcaagcccgacaagtaggtaaggtattcgcggcgtgacgaggtgaggttcgccatgcgctgggagcgttgacggaagccgttgaccaccacgaatcccagcgaggagaccatgaacatgccaccggtgagcatgccggtcaggccggaattggtcatgagcatcatcaccatggcgctggcggtacccagcaacggtaccagcgaggtcagcagcgtattgacgccgtcgctgggctcaagttcaggcggctgctggagcacgacccgcccttttggagccttaggcccttcaagcctgttctgttgggtttcggaagtcatgaacgccgccccctgcttttcgccatgatgatgctacagcccatatcgccgagtgagatacgcgcacctgattgaatggcatgtcgttgctgagcaacgagatcgatttcctcgccgtcttcattgacgacgcgggtgccattagtgctgttaaggtcggtaatccacatatgtccggcggtgatttccaaacgcacgtgattacgcgataccgtgccggtgcgatcgggaacagccaacaccatatcaccgttctgttgcggtgatgggttacgcccgagcaccacattggagggaatgaccaacggctcgcgcgagccgtcttcgaagtaaatggtgatttgcttgggtggcacgggcggcactgtgccggggcgcgcaggcaaggcattgccaaccggattggcagccggggtgggcaacgcgacatgcttcgccctcttcgtggaaggctgcgacacgggaagcggcatgggtttcgccgcagatactgagggaacggagggcacggaaacggcagaagccctcggtgcggcgggaaccgcacgaacgttggggactggggaaacagccggcaccgatgacatcgacggcactgcaagtggtgccgcgggcgtctttgggatcactggagcgggtaccggtgccgaagcagatgcggatactacagatgctaaggccccggaggtagtcgactcgtgcatcgtggaggaggaaatcgtatggaaccgaagctcctgtgatggcatcgcagtcgtgacttgcttgtggatatccacctcggcgagtctggcgaccttatccgcccatccctgcttaagttcagatcgggagaacaacggcgaacatatcataatcaacaatccgatgacgaataccatcgaagagaccgtaagcaccagatatttgacgaaggctctactgagtcccgctggcagtattccattacggtggtcgttctggcattcaacacgcactgtacgcacaccaagtgctactttgcccggggtttcgccgcgcacggcctcccatacggcaagcacaagaaccatttccacggctatcatcacgcataccaccagattgtgagacagcaccatggccactacggtgcccagcgccacgcagcatacgtcgatcagtgaagcaacgcattgtttgccggccgaggccgcacgatatccggtaatggtacgttccttacgcgaaacgactgatgttgctgcggccgctaccatgacatactcctgagaaactcaagtgcgccacctgcgaggaacgaggctgccggtatcagcatcatggagatgaagcacaacgcatcgccgattcgcgatagcgccagagaatggaacccattgtgctgcaccaccatgctgaatcccaacaccagtcccaacgcggcgaacgtgaccatacaaatcaaggggatcattgcctccccttcgggaattgcctgagtggcgtgcccaacccagagcaggggaatcgcaataccggccgcgcgcatcacatatcgttcgaatggtcgcccggattgacgcggcttcagttcgaagaacagcatcagcagcatactcagcaccagaaagccgatacggtcatacaggctgtggtagtcggtccactgtgccaatgcggcatatcccaatacactcagcaccacgcatagcgtgaaccccgtggagtattgtgccaggaacgaatccatatcctgccgaacatccttgcgggtcagcactcgcgcttcctcgggaatgcttccgcgcaccgtccatcgccgggtcatgtaggtccgccattccaccagataacgatcgggcacatgcaccacgatgttcggcatcatctggataccgcagacgcttgcggcaaccaccatgccggcaagcaactgcactgacagatcaaacagtacggttgccgcgctggccaaggccaatggcaatgccacgaacgacaccgcgctcaccacaccacgcaccattggctcgcgcacgcatacggacatcaacgccatatccgccaccgcgatgcctgatgcgcagaacacggccacggttgccggattacccgactcaagcaatgtggagacggtagcgcccgcgcatatggaaaaacatgctccggctactaccaaccacaccgccatcacacggttatgccatacgatttggcggcggcaacggctattacataccaatgccgccacaatgaacacggcaacgagaacgaacgtcacccaccgagacgagcctgccatgcgcatggcaggagtcagacgcatgaacagcaacgaggtcatcgccgcaaacagtacggcgacaatcaacgccaccctgttgaggtcgcgtcgagttaccccctcgtgctcgctgtgcatatgtcgttccttctgccgcctcttctctcaagacgccattatatgggtttgcggcccggtgtgtgctcttccgtctaattacggccggcttgtgcctcgaaagcatgcagcttgcgcataccggcatcgagttcgctacgacctttggccgcctcgttgtcttcatcgtcggtgtccgtaacatagtcgcgcacatataccatgctagcttcgaggtagccacgcacttcacgggcctcgggcgatttgtcgatgccggcgtagatgtcgtcttcgcaggtcttgcccatatcgatgcgctgttgcagcacctgccaggcacggccgtactcacctttgcgccgcttctcctcgatgtccttgcttttttcggcgatggtagcgtcgacctttgccttctccttttcgaatcgggcacgttgctctttgatctggttggataaatcgtccatctgcttcatgaacgcttcaaattccggggatgccatggttgctccttttgctgttcttccgggtatgcgtatacgtccgaatagggattaacggccgccgaacgtaccgccgcctgaacctccgctggagcttcccccaactgcaacaactgaaccacccgtggaaccggatccactgccaaaggtcatcttcacgccttcggagacgttcaccaactgctgcatggtgccaatgcagttcgcgaatccgctaaatgcggtgtacaggttgttcaggcagttgacgatatccataccccactggatggcctgtgtgacttcggcggcagccgtcactgcgaccagcaccggacccgcaccggggatgatcagttcgccggcgataagcttcagcaaggatatgatttcgtcgatggtgtcgagaataaggtcgaatgcagcctctgcgttctgcgcgagcgcattcaatgcctgcgacatttcggtgcagggctggcaaccttgacctgccacctcacctacggcattgttgcgttcaacaaatttatcggcggaggcaccagaccatgacgtctcattcacattgctggacatatcttggatggctccttgtacgccggaaagcgaagccgacaatgcatcccacttggcggcagtgtcttggagctcgtcccagtcaccgaagaatggcttcttcacccactcatcaacaatgctcacgccaaagagatacttagagacgaagtccacaacggtcacggccatgcgcacacgggatattcctatgctgattttgccgcttaactcatgcgctgcttttcttaccgcattgttctttatgtctttagcaagctgatcggaggccgattggacactggcagatactcgtcctaaaggaaaagcatcaagatgcagcatattatcggcagcatccctcttataatcgatatgcttcaatatctctcttgggactgcaccggtattcgacagaccaactttctgcccaagcacgtcgataagttttccagcctgcttggtgtcggcgaactcacctacatgctggtaaaaccgtaaatcacgtttgatgtcgccgaggtcatccggcacatcgacagtaatgggaccgaactgaagatcgttgttgtagtcatcatcgttgctgtcagccattatgcgatgctccttacgttaccggtgttgattccagtttgctcgggcaatgtcatgacatccctgtcggcgtagagcgcctgcagttcttccaccgagcgtccaagagggtcattgcgggagatttccgcccagacgctcgcctcggcctcctgctgcatcttctcgtaagcggccgccgagtctccgatgcgtacggaggcatcataatcgccgtcgttgtcgaagtcgatggcggcgtactgggaatcgccatcttcgaatacgctcacgcgggaatcatctccactgtccggagtgagggtgatgtcgtcacgaccgtcattgtcggcgtcaaccgtaaacgagttgcccttattcgcagtgttgttgtcgctacccgggggcaacggcacggtggacgagtcctgcttggacagggtgaccgatccatcgtcgtttatagaagcatgcgtaccgccctcggtgaggttcacggaatagtcgtcggtcgcatcgccatcggtgtccagaccaacggtattcgtggtgtccggtcgggtgactccaggaacatctggctgatgagttccagttccgggattggtgtttcccgttccgggagtagacgttccaggattccatggagttactggcacagtggtgttctgatcatcaccggaagcgtccacagaaccagtattctgccccgcattcacatcttgatcgtgacctggctgcgctgctgatggggtctgcggcgtcgccgacgattgaggagcctgttgcaccggctggtactggccggaatccgtgccggagccagctccaccgcccgagccagagccaccgccagaaccgcccgaaccggcaccgcctccgaaaccaccgcccccgccaccggtgcctccgggcattccaggatcaacagatgactcattgttgttcttgttctggttgtctcgaatttcttctagcagctggatgattttgttgagcagttccttattcgactgttccgtggctttggtgtctttggcggtgccttctactgcgctggaaatcgaattcagcatcgattcgatattgcccaaatagctgacggtggaatctttggcaatgccatagaacggcttaacaaaactcagcagaattccgaaattcggacttcctgaactgacaaattggcttttcgcgctggcgaattgagaggccgcctgattgaaggaatcagataccgtgcccaaatcatcagggtctacctgcataagcgatgcagccataacgcatcattgcctttccccctagttccttgtactcttcacaattggttaccccattgtgttctccattgtgccatatgtacagcgttcgtcaatgtttcctacagattcaatcggcgattcctaactgaattctggggaggcatgccatcataggcgtgttcgccgtaggtcaagccacctgaatacagccacatcccgtaatgcgcgccacgcggatcggacgacaaaggaaaacgaggatcacactgatccggccacctcaccgga

SEQ ID NO: 203 - DNA, 8365 bp, Unknown
  R101_18m  MAG No. k141_17736
caatgggaatgggaaacttatgggcaatggtgtcgatttgcgtatgctcgccaacaatggcggcagcgtggtaatcagcgattacggagcgcatctgttgcgctgggccccggccgggcaggcggatgtggtgtggacgccgagtacgtggcatatcgaggccggtaagtcgctcggcgggggagtgccgatctgcttcccgtggttcggcccgggttttgcgcatggcaagcagctggcactcaatccatcccacggttttgcacgtctgcgtcggtgggcgttggacgagggttcattcgacgacagccacatacggtatgtgttggattcgcagcagctgaacgacaatgaagtgccttggttcgatgacgagccgggtgctcagtttcatgccgtgtatgacgtgcaaacgggcaatgcgctgaccatgagcctgaccgtgaccaacaccggcacggcgcctatgtcgtacgaggccgcgttgcattcctatctgcatgtcggcgatgtgtccggtgctcagctggtcggattgcagggagcgacgtatctggatgccactgaagaagggtttccgccgaaaacacaggacgcgcaagtggtgacgtttggcgagcagccggtgaatcgtgtgtattactcggatgcgcgtctggaactgcgcgatgacatgttggggcgtgcgattcatatcagccgtaccgggtcgccgcaaaccgtggtgtggaatccgggagcggacggcgacaatatgagctacaccaagccgggcgaatggcgcggtttcgtggcggttgaagcggcggtatgccgcgaccgcatcgtgacgctgggcccgggagaatcccatgtgatctcccaaacgctctccgtaggcagcttgtaggagtagctcggcgcagcgtccatcctccaccgtaacgcattccggggaatgttgcgcgaagaaaggggccgcaataacgcacaatgccctgtgtgctggaatgatccagtacacagggcattggcttactgaacggcggggaatactaccgccgcttgatgagtggggcctcattgttgggcttcatgagtgatgaggcgaacttcttaagcgaacttcgccggcgtcagtcactggccttgccagggtttctgtgcgttgtcatcggtgggagccgtgtgcggagacagcacggtggacccatcatcaacgttttcgggaatcggcggaacctggccgtactgtggggcctgagcgtcgggctggccgtactgcggggccggggtctccggctggccgtactgcggaaccggtacctgaccgtaatcgggcgtaggcacagcgggctggccgtagtcaggagccggtgcggtcggctgaccataggccggggctggctggttgaagtcaggagcgggtgcgttcggagcggcgaagttcggagcggcctggttgaagtccggggttgcgggagcgccgtacggtgcgccgtaagcaccctgaggcatcggggcagctactgcgtcatcgtcgaaacgtgcgccttccggcttgctgggcatagccatgaacacgatgtagacgattgaaccagcgagcgtaatcagtccgccaatggccatggcaccgaggccgccggttgccatggctccatagctggagttgctaaggctgccgaaggcgccatacagtgctgcgccaccgccggcaaccatgatgatcatgccgagggccatcgcgccatagaagatggcgacccaccagccgggcttgtccgtgtcatgcagacggcgaacggcgagcgccagactgggaatcaggatggccagactccaaatgctggaaaggaacccgagcttgtcgtccgtggcactgctgaggaggctcagcaggacgctgatgccgacagaggccaacgtccaccaccagaactcgctgcgggaggcacgtcccttgaagaccacatacttcttccagaaacggaggaatgcctcagggaaggggcagtcgtaatacggcttgttcaacggcacggctgctgtggcagtgggagcggcgtactggttgtatgcgggtggcacctgaccgtaagcgttggcgtccggtccgggctggccgtaggtaggagccgcgccgggagcggggaattgcggagccgcattcgccgcgtacgggtcggcggcgggctgaccataggcgggagttgcaccgggcgctgcgccgggtgcggaagaatcgggagcgggctgcccgtatgcgggctggccgtaggccggctgtgcgggggctggagcgttgaattgcccataatctggctgtgcgggggccggagcaggtgcgccgtattgcggcgtgctgggattctgctgggccggggtaccgttgggcgcgggcatctgcggcaacggcacgttgttgggatcggtcattgattcccctttcataagacgattgcgtcgactcctattcttccatcgtttgggtaaaaaactcaacaattgcgccaaatggtgtcgaagccttgcgtgcgggcgtgtggatggcgtcaaagtaggtgtcaaaacaggtgtgaagacaggcatcaagatatcgggcactaccaaagacaggcaaaagagatttcgttggaaaatggccgttttgggatggtgttggcccgaaatgtcaataacgaagcaaaagagcgaggagcgctgctctccgcgtccggcgcgcgcggcacaataggggactatgactgatgctgaaaacaccaaacccgaactgcccaagaacgttcgtgttcgcttctgcccgtcgccgaccggaaccccgcatgtcggcatgattcgtaccgccctgttcaactgggcggaagctcgcgccaccggcggcacgctgatcttccgtatcgaagacaccgacgccgtgcgcgactccgaagaaagctacaaccagatcctcgaatccctgcgttggctgggtatcgactgggacgagggcatcgatgtgggtggccctcacggcccgtaccgccagtccgagcgtaccgccatctacaaggatgttgccgccaagctgctcgaagccggctacgcctacgagtccttctccactcccgaggaaatcaaggagcgcaaccttgccgccggccgtccggccgagttcggctacgatggctacgaccgcaacctgaccgatgagcagaaggccgccttccgcgccgagggccgcaagcctgcgctacgtatcaagatgcctgatgaagacatcgccttcgacgatctgattcgtggcaccatcgagttcaaggccggctccgtgccggactacgtgatcgtgcgcccgaacggcgacccgctgtacacgctgaccaacccggtcgacgacgcgatgatggaagtcaatgtcgtgctgcgtggcgaggacctcctgagctccaccccgcgccagatcgtgctttaccgttaccttatggaactcggcatcgccaaggagatgccgctgttcggccacatgccgtacgtgatgggccagggcaacaagaagctctccaagcgcgacccggagtccaacctgttcaaccaccgcgacaacggcttcatccgcgagggcctgctcaactacctggccctgctcggctggtccattgcaccggaccgcgacgtgttctccatggacgagatgatcgagaagttcgacgtgcgcgacgtcaaggccaacccggcccgcttcgacatcgacaaggccatctccatcaacgccgagcacatccgtatgctcgagcccgaggacttcctgcgccgctcggtgccgtacctgcaccgcgatggtgtggtttccgccgacaactgggatgccctgaccgaccgtgagcgtgaggtgctgaccgccgccgctccgctggttcagccgcgcgtgcgcctgctgggcgaggtcgccggcatggtcggctccctgctgtccaccgaggagtatctggagcctgcggacgacgccaagaagcagctgaaggattctgccggcgaggtgctggatgccgccatcgccgctctcgagggcgtggatgaggtcgattggaagaccaacaacctgcatgagaccctgaacaaggctctggttgaggagggcggctacaagccgcgtctcgccttcggcccggtccgtgtggccatgtccggccgccgcgtctccccgccgctgttcgaatcgatggagatcgtcggcaagccgatcaccgtcgcccgtctcaagggcctgcgggcgcatctgtgatgcgtcgtccaccgcacgccggcggatgatgggagcgtgacgcatggcgggcatccgtacatacggatgcccgctttcgcgttgcatggggtgttcccgcagaacggcggaaaatggcgcgacacgccgggatttgcgtgagagcagggtagcgcgtaatatatctacctgttgcgcggttcgcctcgcagccggttgaaaaactgaatatgcccccatcgtctagcggtctaggactacgccctctcacggcgccaacaccggttcaaatccggttgggggtacgacgaacaactcttcggagttgctacgccaagccaaattggggtgtggtgtaattggcaacacagctgattctggttcagccattcttggttcgagtccaggcaccccagccaataaccctcgcggatttgcgagggttttttgtttttacacgtcctgctcatgagatacggccgagagggtaatcctgaatagacaactctggggcaaagactgggctatagtcccaatccgtgactcaaaaacggcagaaatcccgcgtccgaacgtaaggggcgcgggatttctgccgtttcgggccgtgcaggaccggccgacatcgcgcgttgccgcgacttgagcgctgtccgatcctgaaaacgtgagggagaccgacctcgtcttacttcttgaccgcgttgacggcgtcaacagccttctgcagcgacgtggtgtgctcgtggtaccacgtgacctgctgttcgagtttcttggtcgcggcctggtagcccttggtgtcgtcggccacgcagccttcgtacgtcggcagttccacggtcagttccttggacagcgcgtcgagagcggaggcgtccgagacgtctgccttggtcagagcggcggcttctgcagcatcgccattgaccaagttgttgtagtcgttggtggcgttacgtacgtcttccgaggcggcggcgcaggcggccactgcgctatcgtactgagacgcgctgtatgcgcgggtgccgaacaccgcgaccgcggcgataatcgccaccgccacgatggcaatcactatagcgacccacttcgtcactcgcttgttgtgcggctgtgccgtcgcttctgcttggttctgggattcgggctggttgccgttcgcctgctgtgcgtcagtcatatttacctctacttctcactgcccctgtttgtaccttgcggagggcctgtttcaaacaacgggtatccaacatatcgaggagagccgagattgccgggcgtttcctactggttgcgctgtggcgtggccgtttttgtctcatatggcgaaagtatgcgccagaggctattgccggccggtgacccacggcgcatccgaatggacgtgcggaatcatcatcgcgatgaccgccagcagacacccgagcatcaccatcaagatgatgttctcgtgtccgtgcgcctgcagaagcgcgccggtcagcgcgccagacgccagcgccagcattacgaccgcgcgccgcccgagcttcgactgctggtggccgtgtgccgaagcgtctgcgacgacgccggtcagcgtcatcgtgagcacggtggtgggcaggtccggcaccgacagcttgcgggcggtggagttctggatgcccattgccggggcgagcagcacgatcagcaggatgatgtgcaggtcgatgtgccgtgcggtggggaagttcaggctcggctgtgaggcctgtgaggcctgggtggtctgtgcaagccgtgcaatcgaggagacgccggacgcatcgtctgcggggccggtgatgagctggttcaaaagatagacgccgattagcgcggcgagtacgaacgacgcctgcacgcaggtagaaaccaacagatgcttggcccggttctcctcgaatcgccggatgatgcgcccgccgataagcgcgccgaccatgaaggagacgagcgtcagcgccgacgtccaccagacgaagccttgggcatgggcgatcgaaaacccaagaaacacgatgttgccggtcacgttggccacgaacacatgccccagcgacaggtagctcagcgcgtccaccagcccggcgacgaacgtcagcaccaccaaggcgggggagagcagaccgtatctgtcttccttgcggggaaccaacgtgcgtcctgcttcggcaagatgtgatgtcatggttgcgacgaggctccttttcgggattgaaattatggcgagaacatgcgtcggtcgacgccgccactctactctctactcccgtacggttcctccggtttccgctcgtgcgcagatcgtcgggacggagaagacgccggtgatgcagatcgatgtgccgaaatcccgcagcgtggtctcgaccaagtcgggcaaggtgttgcgacgccgtatgaaggtggatggtacgccggagagcgtgccgatgtacccgtacgagatcgccacgcgcctgtccgatttgggacgtttggacttttccgcgcagccggtgccggatgcgacccgtgatgatttcgatccccttgaacgcgaccgtctgcgccggattatcggcacctaccaatccagtgaccgtaatttgttggaactgaccgatgaggagctggagaaatccctgcaattgacggtgaccgtcgatggcaagaccatgccgacgctgaccggtttgctgctgctgggcaagggggagtctctgaaacgcttcgttccgactcatcgggcgtctttccaagtcatgtctggtacggatatcaaagtcaaccaagactatgccggaccattgctgaagaccatcgagcaaatcaacgacatgttctctccttggaatccaagcgtcgagctatccgtcggtctgttctcaatgatggtgccggaattcgaccatcgggcgttccgagaggcgctggtgaacgccttcggccatcgtgactacactctgctgggacgtgtgcgcgtgcagttggatgatgcggggcttaccatcgccaatcccggcgggttcgtggagggcatcaacatccataatctgcttaccgccgaaccgcatggtcgcaatccctgcctgatggatgctctgaaacgaaccggattggccgagcgtacgggacgcggcatcgatcgcatctgcgaagggtcgctgcactatggacgtcccctgcccgattacacggcgtcgaatgagcgtaacgtgtccgtgtacctgcagcgcagcgcacccgacgtcgaattcgtgcggatgcttgccgaggaacaggagcgcaccggtaagactatgccggtcaacggtctgctgattctgaatatgctcaggaacgaacggcgctgcacgttcgagaccatgaacaagaaactcgatatgagtgagcagcgtctgcgcgctatgctggggcagcttacggaatccggcatgatcgaaggttctggcaacggttctcggcggacatacactttggggtctacggtctaccggcgcaccggcaagaccatcgagtacgtacgtcagacgggcatcgaccgtgtgcgatggccggagctcattatgaaattggttgcagagcagaatgatgtcatgcgggcggatgtcatggaactgctgcatgtcgatgcgaaccaggcgtactaccagctgtccaagctcgttaagggtgggaagctgagggtcattggccgtggcaaggggacgcgctatacgatcggtggcgttaccgggcgaaagtgatgtgctggcggatgtgcctgtatgggtgttttgtgctgggcatcgtccgaacttgggaagtcgtttcggtacttaggaaggtacctaggaacctaggaagtggtgtgggtaaggttcctaggttcaggtatgcgttcgtgtggcgttcatcggagggggtcagggggaaccttcgcgctgggccgaccggtattcgctgcgatgcgcttgcgatacggaggctgggattgttgcgaaccaaaacgaaaaaactgcgcggagaacacacggggaacgacaccatgggcgctgcgcccgtccccgccagcccatcaccctccacccgcgacgaggttgcgcgaagcgaaaaccttcccgaaccatatcgcggcccgagtcgcgccatagttgcaccacaagtcag

SEQ ID NO: 204 - DNA, 3499 bp, Unknown
  R101_18m  MAG No. k141_17781
cgcgcaaaattggtttggagccatatgagaagtagacgtgttggaattccactgccggaggacatgggctgctgtgtaccagcggcatatgttcattgattgttgtgacgacggtgtcagggtccttttcttcgggaatatccaaattatttcacgtcgcatacggtgaaggcgaagctggtgagggtgccggtggatttgccgttggcgaggagctgattgatgtcgggcaggtccttgttgtcgctggtctggttgagggcgtatcgggtgccgtcgggcgcggtgaagcgcatgacgggatcgcctttgccgttgtgcgtgcagctgacggtgccgtggtcgacggtgaggggccatgtgtggccgagctggtcggcgctgatgtcctgggggttgctggtcgcggtgattgtcttgctgccgtcggtagggtagttttcggggtgttcgatgccgtccatgcaggcggtcagccccagggtcatgatggtggcgaggcttgtggcggtgatggttcggatggcgtgtgtcgtgttggtcatgctggtttcctttgtcgtgttcggtggtggtcggggtgcttgttcgtctgccgtcaatgctggtcggggtgttcctcgatgagggccatgtagccgtcctccaatgtggggtccatggggtgcgcgtcggcgggcgggttgtcggtgatgacgcggtagcgtacgccgcgtgcggtggtgacggcgttggcgacgatcatgccgtccggtggcggggtgttggatggctgggtgagccagacatggcccgcggcgtgtccggtgaggtgttcggtcggcccgtcatagcggatgcggccttggcgcaggacgaacacgtatgggcaggtctgggcgatgtcgtcgaggatgtgggtggacaggatcacggtgcggtcgccgccgaggctggcgagcagcgtgcggaagcgcatgcgttcctcggggtcgagtccggcggtgggttcgtccacgatgatgagccgggggtcgcccatgagggcctgggcgatgccgacgcggcggcgcatgcctccggagaagccgccgatgcgccggtcggccacgtccgtgagcccgacccggtcgatgagctcgtgcgcctggcgcatgcgttcccgggtgtcgtcgatgcctttgaggacgcccacgtagtcgaggaattcgagcggggtgagctgcgggtagggttcgatgtcctgcggcaggtagccgagcgtgcgtttgagcgcgcggcgggtcctcgcgtccttcagatcgtggccgtccatgagcacctggcccgatgtggggcggatgatgccggcgaggatgcgcatgagcgtggttttgcctgcgccgttcggcccgatcaggccgaccatgccgtgcggcaggtcgcaggtcacgtcgtccagtgcgcggggcttcctcgggaagtccttggtcaggtggttgatggagatgaacatgacgtcttctttccgtgtggtgttttttcggtggggttccgccggtgccgttcagcgcgttgtgcgcgggcgtgccgagcaccatccgcccaacgccatgagcaggacggcgatgacgagctgcgcgatcagggatatggccgcgttggcgggcgtgccggtgaccgcgaggatgcctcccgtggccgggtagacggggccgagcccgaaccatccggcgccgacggcgtcgccgatcacgttgaggatggtgccgttgatggtcggcacgggcagcatcggcgaggagaacacgagcgcgaaccatgcgagcacgccggcgatgcgcgcgacgatcatgggcaggatcgcgccgagcagcgaggacaggctcatcgcggtcagcacggccggcccggtgatcgcgagtccggcggccaatgcctgcggtatggcccgccacgagccgtgcagggtctggatgacgccggcgcaggccagcagcaggagcgacggggtgatgaggatcaggaacgcgccgagcgtgcgtgccgctgtcagcaggggcgcgggtgtgggtgtggagtcctccagttggccgatgccgagtcggtcgtggcgtgtgtggaagtcggtgaacgcggccatgtaggcgatcggcatgaacatggccatcgtcttggccatgaatgccagatcgcccgcgccgtggtcgtgcgggccggcaggggagatcacgcccagcagaagcgcgaacagggccaatgggacggccgcggcccatagggagcgttgccgccacacgatgatcatgtggacgcggatcaatcgcgggaagccgatgtgcatgttcatatgctcctcctcgcaagcgtcacgttgcgttcctcgtcgcccagcagatgccacgcgatcccgacggcgatcacggcgacggtgagcgggatgccgcgttgcgcgaccgggtcgagcacgtacggatcccacaggagggcgaggaacatccataccgcgaccaccgccatgaccgtggcccgcgtggacgcggaccacgcggcggccgcgaacccggccgcccccacgaccagcaccgcgccggtcggcgcgatcaggcttatccaccccgtgtcctgcggccacaggcccagtacgtgcaacggcgcgaacatgagcacggcgccggcaagaccggacacggccgcgagtgcgaaccgcgtggcctgcacgcgcctccaacccacgggcgtggactcgctcgcctcgaccagcgggtcgccggtcaacgcgaccgccacgcacacgcccgcgccgatcaccatcagctgggcgagccagttcaccaccgtcagcgtctgcgtgcgcgaccacacgccggataccatgatgccggcggccgccaccgcgatcccgcaggccacgggcattgtcagcaatcccatgccgatgcgtctggcctgcgcgcgaatcattcccgccatgccgtccctccttgaagtgcgaagctcgacggccgttccttatcgtccgtcacctgataggtagcggacggcagccgcatggttcacgcgacacgccgaacggccgccggaggcccgtcggcttcaatccggtcagacggccgcggccgccatgcgcgcctcggacaatcgtccggagaacgccaccgccgccgcgcacgccatcagacccgtgacggccagcagcggctgcccgaatggccgggtcatatcgatccagcccgcggccggcaggcccgtcagcccgagcaggtccgtacggatcacggcgaccagcagcaggccgacgccgaagccgacgcccgtggagaaacggatcgcgagcatcgcgcccacgccggcgaccagcagcaggggcgacagccatccgaccagcagcacgccgaacgtcccatacccctgcgcgcccatcacggcggtcaccatcaggccgaacacgacgtcgcaggcgagtatgaacaccagccggaccagcgtgaccgcccccgtacccaacggggtggccgacgagatcatgtccgcgcgggaa

SEQ ID NO: 205 - DNA, 33047 bp, Unknown
  R101_18m  MAG No. k141_18088
gacaaccacgtcgaccagttccttgagcagctgggccgcaagccctacccgtacccgaccatcgagatccgtaaggccgattccctgttcgactaccagtatgaggacttcaaggtcgtcggctaccagcatcaccccactattaaggcacctgttgcggtctgatgctgattaccatttcgtggacagcgaagactgtggaggtgacggaccccgagtcttcgctgtccactacactaaggcccagttccgcaatccaggaggagtaagcgaaatggagcatgacagtagccgtagcggctatcacgaacccgagcccggatctgccgggctgtctgccactgaagaagactggggtgacgattatcccaagaccttctcggtgaatcttatctgggccgaagcccgcgacaaggaaggtcgcgccggtgccatcggcctcaatggcggcatgccttggcactgtgccgaggatatgaagcatttcaaggagctgaccgtctcccatccggtgattatgggtcgtaagacttgggaatcgctgggggtcaagtaccggccgctgcccaaccgcgataacatcgtcgtttcccacgatccgatgtaccgtgcgccgggggccactgtggtcaccagtcttgacgacgcgctcgatatggcccgtcaggaggcgattccggacgacggtctggatcgttcggagatttggatcctcggcggcgcccagctgttcgccgaggcgttgccgttcgcggacaaagcctatgtgactgatctggccgtcactgtggatgccgacagctatgcgcccgatatggcgtcgctggtcgaggccgggatgtggcgggaagccgaagtgggtgagtggcgtacgcccgccaaggaggagtccggcatcgattcctatcgtttccgtatcttggtcaaaaccaagtaagcatgcgaatccggcttgtgtcctttatggcggcatgagccggattcatattcattcgaccccaaaaacacattcgggccgtgtgcggcccggtgaagcccgattgaggattgattcaaagctatgagcaatacccagccctacaccgtaatgaccgtctgcaccggcaatatctgccgttcgcctatgggcgagatcattctgcgtcacttttttaatgagcgcggtcttggcgaccaggtgaacgtggaatccagtggtgtgtccgacgaggagtggagccacccgatcgacccgcgtgccgtgcgcgtgctacgcgaacgtggctatggtgatgagattccgcgtgaccacttcgcacaccgcatctcacgtgaggaaatcgaccgtaccgacctgttcctgccgatgaccgcctcccacatgcgcgccctgctgcgcatgctgccggccggcaagcgcgccgaagtgcacatgtaccgcagcttcgacccgaatctgcccaagccgaagcccggccgcgaggatcagattgatttggtggatccgtggtacggcggcaagcacgagttcgaggtcgccatcgaccagattgaggaagtcgctccgtacatcgtcgattgggtggcgaagcagctgtaggaatcggcctgtggccgatgctgtgtgtttcgcagtcttacgaccgcgggtctctacctccgcttcgctgcgttcagcacctccctcacagagggaggtggtcgccgaaggcgaccggagggagagatcaacgaaggagaagccgagcccaacctcagagcaccagctgcaccagtagcatgtatacgatcgtgccgccggcgattgaaagcagcatactgcgtttccagacgtgcagcagcacgatgacggtgcaggcgatgagttccggaaggccgtgtgaaccggtcagaatcggggtgttgcgcagtgcgtataccaccagcagaccggtcatcgcatagggcaggactcggccgaaatattcgatgacgcgcggcggctgcttggattcgggaaataccaggaacggcagaaaacgggtgcacatcgtccccagcaccaccgtcacgatggtgagcgcgccttgccagatggtcatcgtcatcgcgtctgtccttccttctgctggttcgctgcgtggctcatggcacggtctgccgtggcttccggggcgtcggcggccggccgcaacacatccagatgcgggcgcaacgcgacgaacagtatcagcatggcgatcattgagggaatcatgaaatcattggccccgaatatcagcaggcaggccagcgacgtcagcacaccgatgacggcggacagtcgctcgcgatgcttgccgtcgagccactgatcgaggaaaatcaccagaaacagcgcggtcagtacgaaatcaagaccgtcggtattgaacggcagatgcgcgccaatcagcccgcccagtgtggcgccggtcacccaatacagctggttgcacagcgtgacccagaagtagaaccagcttcggtcgataccggcggggattttcgcggtggagttgatggcaaaggtctcgtcgcacatgccgaaaatcaggtacggacgcttccagccgagccccttgaatttgccgagcatggatagtccataaaacaggtgacgggcgttgaccatcagggccagcagaaagccggcgagtgggttgaacgcggagagcagcagattcaccgtgacgaattccatcgaaccggcgaagatgaacgcgctcatgcacatcggccatacaaacgagaagcccttggtgcccatgagaatgccgtatgaggcgccgagaaacaggaatcccaggcaaatcggtatggtcagcggaaacgccgctttgagcgccggcaaccaggcgttggtgttggcggtgtctgccatgtggatgatgttctccttgtgcaactggtctgccggccgatattcgccgataatgccatatgtggttatacacgcatggtgccgataaacgaggtgaggacggtgtcgggactctgtgcgcgaagtcacagtgtggatgatgtcacatcgtctacggtgggacagtccttgtggtgggcgtgaacacgtgctgagatgaaagcatgagcacatatcaaggtaacgaaccatcgcaaatcgtctacaccgctacggcgcaggttacgggcggccgcaacggccacgccgtgagccatgagccggaactggagttcgacctggacacgccggtcgccatgggcggcaagggtcagggcacgaaccccgagcagctgttcgccatcggctggggcgcctgcttccaaggagcgttggcgcttgccgccaaggagcagcgcgtggcggccaccaagctggccaagagtcaggtgcgcgccagcatctcgctcggtcctgaaggcgagtccttcggcctgaagggcaagattgaggtagttctgcccgatcttgacgatgaggctgccgccaagctcgtcgagcgtacgcaggagctgtgcccctactccaaggccaccgcgggcaacgtgcccaccgaggtcgttgtggtgaagtcgctggactgaagccttccgggttgaaacccgagtccaagcattcggcccgtttccttcagggaagcgggccgaatgctttcaggcctggtcccgcgaatacgaaaagacctcggtcgctatgaccgaggtcttcaaagaagtacccccagagagagtcgaactctcgttgtcagattgaaagtctggtgtcctaaccgttagacgatgggggcgaacaactcgagttactttacgggaggttgttcggttatgcaaatcgacggcatttcggcgtgtcgcaatcagtgcagggcgacggcctgataggtgaagtcgtgaatcacgcggccggcggccaggcccttcttttcgaagttggtgagcacgcggccctcgaaccgctcggattcggtgaagtcggcgtgcggcatgtcggcggccatgtcggcattgcccttgcccacgtgctccagcgggaggctgacggttatgctgcccaggttcttccagccatcgaggccgtccatcacctcgtgcacgtgcagggcgtagtcctcgatgtcggtggcgatgcgccagacgccgtctgtgaccagcgcgcgatgaatgtcgccggccatggcctcctgcacgatgcggcgcttgtggtgcttcttcttgggccatggatcggggaagaaggtccatacctcggccacggtgccgggcgcggtcaccttgaacagctcgggcgcattgacctgggccacacgaatgttggtcagcccctgcttgccggcgagcagcagcgtgtgggccacaccggggtcatagacctccaaggctaggaagttcgtctccggatgggccgcggctgcggccgccacgttttctccctgcccggtgccgatttccacaatgagcggattgtcgttgccccatgaggactccacgaacgcgcggtcgagcgtgacgccttcgcgcacgtccagcaggttgccggccgcaatatccaacagatatgtgtcggcatagttgtcccaggcgcgctgcaggcgatcgtccaaacgtccggagcggcgcacgaaggaaagcaccttgtgcagggggtgcgccggtgcctcggtgtggtccgcggccatcgcggtgacggaatcgattgctgtggattcgggatcggtcatatattcctcggattttccttgtgcgccgcaccgctgttcattcattaggtcgatttggcgttcattaggtgggtggtgtgcgataccaaccaccatatcaagccatttacccggtgttcgtgcgggccggctccgggccgacctacctaatgaacgccagatcgacctaatgaatgcagatattgcggacgacaccaccgttttgtgcgattatgttcgtgtgatatactcaaattgtttcaaaaggtaacaaagcggaccaaaagtgaacagccgctgaactccacacggccgacacttgcaacccgcataaggaaaggtcaactatgacagttctcgtcaccggaggctgcggctacatcggcgcgcatgtcgttcacgcacttcatcaggccggcgaaaaggtcgtcgtcgtcgacgatctgagctacggcaagcccacccgcatcgaaggctcccgtctgtacggcatggatatcgccgctccgggtgccgacgagcgtctggctgaaatcctcgatgccgaaggcgtcgactccgtgatccacttcgccgcccgcaagcaggtcggcgaatccgtggagaagccgctgtggtactaccagcagaacatcaacggcatgctcaacgtgctcaccggcatgacccagtccaagaacgccaagaagctcgtcttctcctcttccgccgccacctacggtgtgccgccggtcgatgtggtgcccgaggacgtcgtcccgatgctgccgatcaacccctacggccagactaagctgttcggcgagtggatggctcgcgcctgcgagcagccgttcggcatccgcttctgcgcgctgcgctacttcaacgtggccggctgcggcccggtcgaactcgaagacccggctattctgaacctcatcccgatgctgttcaaccgcctcaagcagggcaaggcccccgccatcttcggcgacgactacccgaccccggacggcacctgcgtgcgcgactacatccacgtctccgacttggccgacgcccacatcgccgccctcaagtacctcgaccgtgacgagcgcaagtacgacgccttcaatgtcggcaccggtgaaggcacctccgtgcgccagatcgtcgacgaagtcaagaaggtcaccggtctgccgttcaccgaggctgtcatggcccgccgcgccggcgacccgccgcacctgatcggctccccgaagcgcatcaacgaggagatgggctggcacgccaagtacgacgtggaagacatcgtcaagtccgcgtgggatgcctggcaggccaaccccgaacaccacatcgacgtcgacacctggaagcaggctgactgagattgacgattgctttgcggtggatgccgtgaagtgcttctgttcataagggcgtgaccggggttccggtcgcgcccttcgtcgtttgtggatgtttatggcagacgtgtccgtgtgctggtgatagcaaaaaccttgaaattacgcggaacacgccgaaatttgcacgaccggcgaatttcagtaatatatacatctgttgcctcacgcaagtgagaacaatggccccgtagctcagttggttagagcgccgccctgtcacggcggaggtcaccggttcaagtccggccggggtcgctggaatggttatgaaacccggattatccgggtttttgactgttcatggctctgtagctcagttggtagagcgagcgactgaaaatcgctaggtcaacggatcgacgccgttcggagccaccacaatgaagccccgccttgtgcggggcttttgcatatccgtcacgtacctactccggcgggctggccggtcaatgcgaaggctcgcgttcgccaacaactgtcttcctcaccgcaactacgcacgccaacagcaccaatgcgaacatcgggttagggttaagtaaagaaacgtgggtcttatccgcgcgtgtcatggtcggtgcgatcgtccgcctcagccgtttctggggctgtggcgctcatagagtcagtattgcagaaaaagcacccgcgagatgcgcgcgcaaagagaatcgtgtgggacggcacgtgattttgccgatttttgacgtgccgtcccacagcgttcgaagaacgccctcagagctgagggcaaagaacggctctattctgcggttctcggcttatgtcatgcgggatagcagatgcgtcaaccgattgacgtatctgctatcccacacttttgtgggacggcagatgaacaatggtaaaaaccgcgtgccgtcccacaaaaaggaatcaggcccgccaccattggcgcagggggtaccacttgccgtccgggtggcccacgcgatccggcttgacggccaggaactggtggatctggatgccgtcgagctcgaagttcagagcgcaggcggccatgtacataccccataccttggcgcgttcaaaaccgacctgcttgaccgcgtcgtcccaatgctcggagaggttctggttccagtgatgcagggtgagcgcatagtgctggcgcaggttctcctgatgcaccacgttgaagccggcgtcatggatgcacgattcgatgaagccgggcgcgccgaggttgccgtccgggaagatgtaacggtcgaggaattcgtcggtgccgggcttgccgtgaggcttgtcatggctgatggtgatctggtggttcagcagtcggcccatcggcttcaggagacggaacatctcttcgaagtagctctggtagttcttgacgcctacgtgctccatcatgccgatcgagcagataccgtcgaagtcatgctcgggcacctcgcggtagtcctgtacgcgcacttcggccagatcctgcagcccctcacgggcgatccattcgttggcgtacgcggcctgttccttggagagggtgacgccgagcgccttgatgccgcgacgggcggcggtgatgaccatcgaaccccagccacagccgatgtccagtaagcgctggccgggttgcaagtccagtttgtcgagaatcaggcgcagtttgttggcctgtgcgtcttcaagactcatgtgctcgttgtcgaataccgcgcaggtgtacgtcatggaggggccgaggaagtcggcgtagaactcgttggacatgtcgtagtggaagctgacggtttccgaatcggccttttcggtgtgcggcatcaggccacgcttgatgcggacgaacttgctcgggccctcggtggcgggcaccggcggcttcttgaagccgtgactcagaatgccggcggatacgcgggcaatggatgcgggagtgagcgggcgaacgtatttggccagcgacaccagcttgcgcatcgccggatacgggtcggcgtagtcaatgtcgtccacgtcgaaatcgcccagaatgtatgcgcgcacgatgccgatttcattcgggtgcgcgagcagctggtacatgcagttcggcgtggcgattttgaccttcaaatccgcgtctgccgggccgaaatgcgagccgtcaaaagcgtcgatacgaacgggagcgtcggggtcgagaaacagggatgccatctcgccgaccgtcatagccttgccatttgccattatctgcctcattctcttatgatgatcaccccaattgtcgaggtatcttagtcctcttcaagagactgaaaccgttgaatacaccatctggtgaaccagttcgcgttcggctgatgaaacacgaatggaattaggcatctcgcatattgattgtgtacgcgcgaagtaagcggatgagagacgagtttctcggagagcaccaagcgactccggaaaatggtcttatcgttgagatctcgggcgattgaactggtttggtcaatggacaataattcgacaagtgcggaattccgccatttcttgccattattttcagtgttgttctttcagcgtgttttcaggtgaatgctcatgcgcggagtagactggggaaccgttggaccactcaaagagtgagtggaccaccagttaagacactagctcaaaaggagagtccctatggtataccgcatgattttcaaccagactgcatacttcggacgtggcgcgatcaaggaaatcccggccgtcgccaagcagcacggcttcaccaaggcatttatcgtcactgatccggtactgctggagaccggcaccgccgagaaggtcaccaaggttctggatgaggccggcctgccctacgaagtgttctccaacgtcaagccgaacccgccggtcgagtgcatcaaggacggcgtcgccaagttcgccgagtccggtgcggacttcctgatcggcctgggcggcggctccccgcaagacacctgcaagggcatcggcatcatcaccgccaacccggagttcgccgacgtgctgtccctggaaggcgtcgcggataccaagaacccgtccgtcccgatcttcggcgtgccgaccaccgccggtaccgcttccgagacgaccatcaactacgtggtcaccgataccgccaacaagcgtaagttcgtggctgtcgacccgcacgatatcccgatcgtcgccttcgtggacccggatctgaccgactccatgccgcgcggcctgaaggttgccaccggacttgacgccctgacccacgccatcgagggttacattaccccgggtgcctggagcctgtccgactgcctgtccatgcagactattcgcatgattgccaagaacctagccaagtccgccgacggcgacattccggctggcgagcagatggcgtacgcctcctacatcaccggtatggcctactccaacgtgggcctcggcctggtgcacggcatggctcacccgctgggcggccgtctgggcgtggcccacggtgtggccaacggtattctgctggccccggtcatggaatacaacaaggactacacgggcgagaagtaccgcgacatcgccgacgcgttcggcgtcgaggacgcctacaccggcgacctggagaaggtgcgcgaagaggccgtgcaggccgtccacaagctgaccgtggatctgaagaacccgaccacgatcagcgaggtcggcgccaccgaggctgatctggaaccgctggcccacgacgccttcaacgacgtgtgcacccccggcaacccgcgtcaggcaaccgaagaggacattctcgcgatctacaagtcgctgatgtgattcgtcgatgacggtaaacattagctccctctgatgagggagctgtcagcgtagctgactgagggagagaagttgcggcgtagccgctgaataataggtatcggcctgcgtccgattcaatgttttagcgactgcgtcgcagtctcttcctcagtctcacttcgttcgacagctcccttatcagagggagcttgcataagcagagagggctcgtatatcgagctacttttcgtgcttttcgtcgtagacttcgtcggtgggggtctcgtcgtacagctgcttgccttgcgcctccgccagtttcatctgctcgttgatccacgcggcttcagcaggattgatatccgcggaattcagcactttctgccacaccgggtagaacatatgcatcgccggatacatggcggtgaacaacacctccggcttatgcgtgcgcgtatgttgcggatgcgcatcaaacgtattcttaaaacgtcgcatgtagttcaggaatgaactcagcgacgtgtccatccgtcgcgcgctcatcgcggcgatcatgcgcggcgagtacacggttttcagattcttgcccatcagatgcagggaaatatcgatatcctcgtgcatcacatcggccttatctcggcagacctcattcgcgatttgatgccaggccgaagcgcgcaaggccatattcgagccgaacagcagcggctggccgccatcggcgcggtagattcgcttgcgcaaggaattgtcgcctttcaacccgaaatggcgtgagggcatgtcgtaatacatcaccggaccagtggcacccatcgcggccgggtcttcggtgaagatgccggagaccacctccacccagtcaggccggatcatacagtcggcgtcaaaacggcccagcacatcgccggtcgcggcgttcaggccaaagttgcgggtgggaatcagcccctgttcatcgttctggtgcaacagtttgaccggggtctcgggatgttcggcgatgaactgttcgacaatcgcgcaggtgttgtccgtagaacgattgtccaccaccagcacctcatgcggcatgatggtctggcgagtggcgttcagcagacagtcgcggatgcgttcggcttcgttccacgctgggatgatgatcgaaacgttgagcataacatcaacaatagaaaagcgggtgtacgccgccggcgtatccgagcttcaaacccctcgctacaatggggagccatgagcgaacgcgcgcgaaacataaacagcaccgacacgtcgagaagcggtgccgcagaagccggggcagacccggacgacgagaatcgtatcgactttggtactttgttccccgccaagggagattcccgcaggccaccggaatggttcggccgcgcgctgctgtatgtggccctcgccgtcatcgtattcatgttctgctggcgctcgtggggcgacatctcctatctggtgttcgacatcatcatctcgctgttcctggcgctggccgtcgaaccgctggtggtggcgctggtggctcatggctggaagcgtggcgtggcttccgccgtcagtctggtgggcgtggccgtggtcgtgggtgtgctgctcacgctgttcggcaatatgtttgtacagcagatgattgccatggtccgcggtttgccggcaatgtatgggcagattcgtgagttcgtggaccagcacgccacgttcaagatgccggaaatcagcaatcttggcatggaaatcttcaacaatatccagacctcgtgggtcaccgatttcgccggcaccgccatgagtacggtgggtggcctgttctccttcctgctgaacctcatgaccgtggtaatgaccacgtattacatctccgccgccggcccaaagctgcgccgctccttctgccagtggctggcccccaacacgcagcgtcgattcctgctggtgtggaccgtggcccaaggccagatttcgtccttcctgttctcccgttcgattctggcgctgatcaacgccacctgcaccgccatcttcttggagatcctgcatgtgccctactggctgccgttggccctgttctgcggcgtggtatcccagttcatccccacggtcggcacctatatcggcggtgcgctgccggtgctgttcgcttggggcaaccgcgggtggacgtacgccgtggcggtgctggtgttcatcatcgtctaccagcagatcgagaacctgattctctcgccgaggatttcgcagcgcacgatggatatcaacgcggccgtcgccttcctctcggtgctggcgttcggctcgctgttcggcgcattcggcgcgttcctggcgctgccggtcaccgcatcgctgcaggccatcttccgtgcgtacaccaagcgctatgagctgattgactcaccgctgatgaacgatccgactccggagaagaagtccaagatcgtcgaggcgtccgaggcgttcggcgagcacgtattgcagccaatcggcgagcacatgccgcgtgcggccaggggatccaccaaccgcgtgccgatgaatgaggaactgcgtttgctgcaggaacagatttatgcgattccgtcgcacgagacgaaagaatccgatttggacgattccgccaccgtggcgattccgaagaacgtgctatcctccagcgctcgcaagggattacgcggcactgagccggatacggcggcgattccgcagcgtggtgccgcggatacgcagcagtctgagcagcccgagcagcctgagcggtccgccgaacagtctgagcagcccgagcaacgcaagcaaaccaagcagtctgatcaatctgcctccagcaatcctagggcagggtggcgctgatgactctgctttccgtactcgatattcttctgatgatcgtcggcggtgccggcatgatatatcagggactgtgcatcgtgatgtccctgttcgccaagcccgtgcgcttccccgacgccccgatgaccaaccggtatgccgtgctgatctccgcgcgcaacgaagaaaaagtgatcggcaaccttattgggtcgattcgcgatcagacctacccgtccaacctcatcgacatctggctggtggccgacaactgcaccgacaacaccgccgacgtggtgcggtctttgggctgccatgtggtggaacgccacaatcttgagctggttggcaagggatatgcgctgacgtatctgttggggcatatgctcgacatcggtgtggccgatgattatgaggcctacttcgtgttcgatgccgataacaagctggacaagcactacttcgaggaaatgaacaaggcgttctgctccggattcaagattctgaccagctaccgtaattcggtgaatctggcggataactgggtgtcttctggttctgcgctgtggttcatccgtgaatcgcgattcctgtctaactcgcgtatgattctcggttcctcttgccatgtgggcggtacgggattcatgttctcccgcgaggtgatgaagcggaacaagggatggaagttccatctgctcactgaagatcttgaattcactatggattcgattctgcatggcgaccgcatcggctattgcggtactgcgatcctctacgacgagcagccggttaccttctcgcaaagttggcgtcagcgtttgcgttggagcaagggattcctgcaggtattccgttattatggctcggcattgctgaaacgcgcggttcgcgaacgtgatttctcctgcatcgacttcaccttgatgctgtgtccgtttaccgtgttgggcgcgattcgcgcggtaatgggcttgctgttcgccgcgtgtggcttcgtgagttggccgagccagctgcaatcgctggccagttggtccagcggcatcatcatatcggtgttgggcctgatggcattggctgcattgaccatcattgtcgagcgcgaccagatcggtgccacgaacaaggagctgctcgcctatgtgctcagcttcccgatttacatactcagctacgtgccgatctccttccaggccctcttctccaaagcccagtggaagcccatcgcgcataagggttgaccgagtccgctagttggagccgctcagcggggcaatccaacagcaacccgggggtttgcttcgctgagggttggctggtgggatagagtggatgtatgagcttagacaatactcaaaggaatgtcggatttcagccgccgatgatgccagccgccgcccccgcgcctgcacagccgtcgcaaccgcagccacaagcatggccgccgaatccgaatgcggcggtgtccattcgtggcctgttcaagcacttcgaccggaagatcgccgtcaacggactcgcgctcgatattccggtcggctcgttctatggacttgtaggccccaacggcgccggcaaaaccaccacgctcaatatggtgaccggtctattggtaccggacgccggcaccgccatgattttgggccatgacgtgtggagcgacgtgaacacggccaagcgcatgatcggcgtcatgccccagcccgaccagatcttagaccgactgaccggtttgcaattgctcgtctactccggcatgctgcgcggcatgagccgcgatgagaccacgcgtcgcgcccaggacctgctcaatgctttcgacttggccggggccgccaacacgatggtcaccgattattcggccggcatgaccaagaagatctgcctggcctccgcgatgattcatagcccgcgcattctggtcctggacgagccgtttgaatccgtggacccggtgtccagcgccaacctcaaagacatcctcatcgaatacgcgaagaccggcggcacggtgattatctcttcgcacgtgatggcattggtcgaaaagatgtgcacgcatgtggccgtaatcaacaacggtctggtgtgcgcggccggcacggtggacgaggtcgccgccggcgaagaactcgaagaccgcttcctgcaactggtcggcggccgccacgaagccgcccatctcgcatggctcgacggcgggcaagcccaagcccaagcaccaacttcggtccagccggtccagcccattccgcttacaaccgccacgcccgccatacccaccgatgaggcccgccgatgatcagcagcgccatcaccctggtccgcctgcgctggacgctcacgctcgccaccctgcgaaaatcggcgtggcagaccgtcgcctatgtcttttccgccgtactcgcggccggcaccatcatcggcaccggcgtgctcgcatggttcatcggcatactgccgcccttcaccgtgaacgcggatggctttccgctgaacatccttggttccggaggcatcgtcaacatagtcgtcgtgctggtcggcgcgaccatgaccatcttcatcggcttcatccagctcatgatgcttggcgaaggctccaccatgaacccacgcaaattcgcgctctacggcatcgccgaccgcaacctgcaattcggcttgctgctttccggcctgtccggcatccccgcccttaccggcgtggcctcactgatgctctggacactggcctatcggcatatgggaccagccgtaatcatcagttccctcctcgccgcagtgctggccgtcatcaccatgatgagcatctccaaactgctcatcgccctatccaccacgctggtgaccagcaaacgcggcaaaggcgcgttctatatcttcatcgtgctgacgttcgttatcatctgtcagttgccgaacattctggtcaactccggcgtggccttcagcctcaacaccgaaacctggggcgcggcgaccaccatcgtcgcatggacgccgttcggcgcggccttccaactaccgttcgacgcgcttaccggagcctgggcggtgctgctcgcccgcatcgccatccttgccgtcacatggattgtctgcttcgccgtctgcacctggtgtctgagacatgaacggctcaccatcggcgcaaacagtccgtccgagaccgccaaaggcatcggcgcattcgcatggatgcccgattcggcatccggcgcggtttccgcacgcctgatcacctatctcaaacgagacccccgtcaagccatgaccttcgccatgccggtcctgttcctgatcatcttcgccttccaggcacacggcatcagagcggtcgtctggcagtcgctgatctggtgcggctggttcatgtccgtcgtggaaagcaacgggctcgcatatgacggccgcggcttcaccatggaagtcatcgccggcgtgcgtggccggaccgacagaatcggccgcgtacgcgtctacgtcggcatcatggtcgtctacatggtgctgctctatctcgccggcatcgtgctggtcggcgcactgaccggacgctgggcgcagcccgatgacctcgctaccggcctgatcttcctcgccacgggcatgggcatcgccttgagcggactgggcgtggccgaagtcacctcctgtgtactgatgtacccggtcgcctcaatggacaagccgttctccgcgcctcaaggccgcgccatggcccaaggcttcttcccgttcgtctacatgcttggcagcctgctgctcatgctgcccactggcatcgtggcgctggtcatgctgctgacaggagccgaaggcggcatgtggctggcgattattccggtcgcgctggccaatggcatcggcattctggcactcgggacatggctgggcggtaagctgatggatgcgcgaatgctctcgattgtggcaacactcgactcgttcgcctcattgcagaaatgattgccttggcataaggagcacgatggtatctacagcggtatcacgccgtcagcgacgtgaagcgcaacggcggacccaacgatcgcatcgccgaacactgaccgtcatcatttccgcactgaccaccatcgccctgttcgcggggtactgcgccgccgacatcaccgacgtggcccccggattgttgacgttaaaacctgtcaccgcacctgttttcgccaatccggccaccgccaaatcaggcggcaccatcgccggtgccctgaacgcgaacaaggccattgattccacggccgcttctgcactggtcaacgaattgctgtccgcgcaaggcgtgggaaacgatacgtcggtgatcattgaagacgcccaaggcaccgtcgctgccgaacatgagtcgaacactccacgcgagcctgcatccacactgaaaacgctgaccgcgctcgccgcctcatccaccctgaacatggcatccaccttggatacccaagtgttcctgacccaatccgatgacggcaccaatacgttgaccctcaaaggcaatggcgacatgctgctgtctgcaggcgattccgacgcaaaccataccaacggacgtgccggtctgaacaccttggccaaggccaccgtggccgcgctcgcccagcgaggcatcacttccgtcaatctcgagtacgacgacaccctattcggcgactcacgcattcccgcaggtctgtcggaaggcggcgcggtcttaagcgactacaccgtctacttcacgccggtctcatcaatggcgattgatggaggccgccaatacaccgccgatacgcctgcgccggccgaccctgatgattcggccggatacccggaactgtcccagcacaccgccagcgacgtggccacgaaattcgccgaactgctccaatcgaacggtgtggccgttaccggagacgtgacggcaaacaccgctccatccggcgaaacgcctttggcctcggtgagttcggcaacactgtccgaaatcatggcatacacgttgcgacattcggacaatacgctggccgaggagttcggtagactcaccgccttggcgaaatcagcgacaaacagtcctgaaggcggcacggaagcggtcaaatccactctgaacgatctcggtctcgatacatccggtctgaccatggccgattgctccggcctgtctcccggctcccggctcaccgtacgcacgctggcggccgtccaacaacgtaatctgaccaccgagagcggtgctgctggtgcggaaggtctatccatcgcggggttggtgggcacggcgcaggatcggtatacggatgatgccgtggccggtctgctgcgcgtcaaaaccggcagcctcggcacggtcacgtcgatggccggcaatgtgtcccgtaccaatgggggagcgttgtcgtttgccgtggtggtcaacaatcctgaggattatgccgccgcgcgtagcgccatcgactcgttcatcaccaagctcgcggggctgtaaaagaggcatcaagggccatcaagggctacaaaggccgtaaacgtccataaacgcacgagtgcctataaccagaaaagggtggtgagtacatggcatattccgcacgattgcgcaaggccgtaggcgcggtccgaacaacgctgagcgccgtggaactatgcgatgtgcaggctcccgaattcgcgcagcatggggaccatgccgttgcctccgatgcaccactcgtgctcgtggcctgttcaggcgggcgcgattcgatggcgctggccgcggtaagccatatcgtatgcacgtccatgggcgtgcgttgcggtgtcgtgattgtggatcacggcttgcaggagggttccgaacaggtcgccggcgaggccgcggatcgttgccgtgcgttgggactgggcccggtcatcgtgcgcaacacaaccgtgcaggcacgcggtgagggcctcgaagcggccgcacggcaggcccggtacaacgagctgtgcaccgcggcgcgtgaatcaggtgccattgccgtgctgttggcccacactatggacgatcaggcggaaaccgtattgatcggactgctgcgcagccgtggcgtggatgcgttggccggcatgccgcaggtcttcacacgcagtggcgtgacttttgcgcggccgctgctgacccttactcgagacgaaaccaccggcctctgtgaagacttgggtgtggaatattgggatgaccccaccaatggcgatgcggtagacggcgagttgccggacgactatccgttgcgctcgcgggtgcgccacgacctgctgccggccatcgaacgattcgctggattcaatgtcacccgccatttcgccgaaagcgcacagctggccagaatggacaaggagtatctggatcagcgatccgacgaggtgatgggggaggcggttacggcagttgaccggccggcatcgtcgacaacggtatcgaccgatacgccacgagcctgtgctgcagacgataccaacgattcgggccatggcatcggcctgatgatcggcgtcaaacgtattgcacgtgagccagaggcgattcggttgcgggtcatcgctcacgcgctgagccaggccggtgtgaacgccagtgccgcccagattgccgccatcgaccggctggtcgtcgattggcatggccaaggcggcgtctcacttcccagaggttattcagccaatcgcaagaaacacgtcattcgcgtgtgccaagatggagcgcatgcgaatcgctgacgttgaggaagatattgaccacgagctggtcagcaaagaacagatcgatgccaagatccacgagatggccgctctcgcgagcgaggattaccgcgataagaatccgctgctcgttgcggtgctgaaaggggccgtgaatacgctggtcgcgttcacccaggccatgagcattcctgtgcagatcgacttcatgagcctttcgagctatggctcgggcacagtgtcgagcggtgaggtcacagtcaggcaggatttgtccgccgatgttcgcggacggcacattttgattgtggaggatattgttgattcaggacgcacgctcgcgtggctggtcgcagaactgaaacgtcgtggtgccgcttccgtggaggtcttcgctttgctgagcaagccttcccgccgagaagtggacgttgatgtgaagtacgccggctatgagattccggacgagttcgtcgtcggcttcggcctcgactttgacgaacgctaccgcaacctcgattcgatcgcggtcctcaagccgtccgtctaccaaggagtgcaagcatgagcttcccgcaagggccgggtaacggcaataatccgaacccgaacaacaaccgtaacaacggcaacccgttcaccaacccgttcaaccgtggcaataacgggaacaatggcaaaggcaacaacaacgagaaccggccgatatggcagtccccctggctgtggggtgccgtactcgtggtcatggtcgtgctgatgttccagatgttcgccggcggtggcacgaagaccattgacaccaaagatggtttcgcgctgatcaatcagggcaaggccacctacgccgagatcacggacaacaagcaggtcgtccgccttaagctgaagaacgactacaccaagaaaaacgccgacaccggcaaggtgaccaactacggcaagaacgtgcagttctactacaccttcgcgcagggcgcacaggtggccaaggccgtggagaacggtgatctcgaaaagggctggacctcgaatatcgagcagaccagcatgatgagctacctcatcacctcgatcctgccgttcatcatcttcttcgccctgttctggttcctgatgagtcgcatgggcggtgccggcggcatgctcggcatgggtggcaagaaaaacagcggcaagctgctcgacggccagacccccaccaccaagttcgccgatgtggccggcgaagacgaggccgtggccgaagtcgaggagatcaaggacttcctcaaggatccgtccaagtacaaggcgctgggcgctcgtattccgcgtggcgtgctgctgtacggtcctcccggcaccggtaagacgttgctggcccgagccatcgcaggcgaggccggcgtgccgttctactcgatggccggctccgacttcgtcgaaatgttcgtgggtctcggtgcctcccgtgtgcgtgacctgttcgatgaggccaagaagaacgcccccgccatcatcttcatcgatgaaatcgatgctgtgggccgcaagcgtggctccggcatgggcggtggccacgacgagcgcgagcagacgctgaaccagctgctcgtcgagatggatggtttcgacaacgacaccaacctcatcatcatcgccgccaccaaccgccctgacgtgcttgaccccgctctgctgcgtccgggtcgattcgaccgtcaggtgggcgtggccgcccctgatctggaaggccgtgaggcaattctgagggtgcatgccaagggcaagccgttcgtaccggacgtcgacctgcacatggtcgccgtgcgcacgccgggcttcaccggtgccgatctggccaacgtgctcaacgaagccgcgttgctgtgcgcccgtgccggtgcccagttgatcgacaaccgcgccatcgacgaggccatcgaccgcgttcaggccggaccgaagcgcaagtccaagggcatggctctggaagagctgcgcaacaccgcataccacgagggtggccatgcgctggtggccgccgccctgaacaacaccgacccggtgaccaaggtgacgattctgccgcgaggccgcgccctcggctacaccgccgtcatgccgacctccgaccgctactcgcagtcgcgcaaccagctgctcgaccagatggcctacgcgatgggcggtcgcaccgccgaggaaatcgtcttccacgacccgaccaccggtgcctcgaacgatatcgagaaggctacgaacatcgcccgtacgatggtgatcgaatacggcttctccgacaagctcggtgccatcaagtggggttccgacgatgaccagaccactgtgatggacggtctgcagccgcgcaagtactccgatcgcaccgccgaagtgattgatgacgaggtgctcaagctggtggagaccgcgcacaccgaggcgtggaccatcatcaacgacaaccgcgagatccttgacgagctggtccgccagctgttggtcaaggagaccctgaacgagaaggaacttgcggcgatcttcgcgccgatcaagaaggctccggttcgtccggtgtggttgtccaacgaccgccgccccgactcggacaagccgccggtggagattcccgaaagccttaagcgctcggtcggcatgaaaccggaagagtagacacgatgacgattcggcccgacctgttcatgtggtttctcacgtacgcaggccgggccgacgtcgttgtggacaatgacaagggagagatgagatgaacgaatatatagagtcttgccagcgggagaaacgcacatacgacgaggaaggcgtgcgcgaggccgtacgtctgttcctgaagtcgattggcgaggatcccgagcgcgaggggctggtggaaacacctgaccgtatcgcccgcgcgtgccgcgagctgttcgccggtctgcaggcttccccggccgatgtgctggagaagcacttcgacgtggataccgacgaactggtgctggtcaaggacatcgaactgtattcggtgtgcgagcatcacctgctgccgttccacggcgtggcccatgtgggctatattcccgccaaggacggggtgatggggctgagcaagctcgcccgactggtcgaggtgtatgctcgccggccgcaggtgcaggagcgtttgacccagcagatcgccgacgcgctggtcgagtatgcgggcgcacgtggtgtgattgtggtgaccgaatgcgagcacctgtgcatgtctatgcgcggcatcaagaagtcttccgcccgcacggtgacctctgcggtgcgcggcatgctgcgcaatccggccacccgagccgaagccatgagcctcattttggataaatagtgtctactaagctccctcatcatagggagctcacttgggacctacatagaaggggaaacataatgactgatttgcaggcgttgcatgacagtacgcgcaccatggtgatgggtgtgctcaacatcaccgaggattcgttctcggacggcggcctgtggctggacccggccaaggcggcacagcacgggcgcgacatgatggccgccggcgcggacatcatcgacatcggcgccgaatccacgcgccccggcgccaagcgcgtgtccgaggccgacgaattggtccgcatcaccggtgccgtcaagacattgattccggccggtgccatattgtccatcgacaccacgcgcgcatccgtggccgccgctgcgctgagcgagggcgcccagatcatcaacgacgtctccggtggcacgctggatgccgaactgccgcacgtggtcgccgaccacgactgcctgtacatcgtgcagcattggcgcggttggctcgccggctccaagggcgcgaaccccgatcaagacacctccgtctacgagcacggtgtattgaccgacgtacacgacgaactcatgcgccaagtcgacggtgtgctggccgccggcgtaaagcctgagcgcattatcatcgacccgggcctgggcttctccaagcctggcatcgagcacaacctgccgctgctgactggactcgagaccttccgagccaccggatatccggtgctgatcggccagtcccgcaaacgcttcatttcggcgatgcttaccgaggcgggcgctgccggtgctgatgggccgatcatggcccagcgcgatgacgtgaccgcagccttgtccgccctgtccgccgaacacggcgcatgggccgtgcgcgtacaagacgtggccaaaagccgcgccgccgtcatcgccggcaacacctggcgcgaatacgcatgattcccctggctccctgttttggttgcttctaggccttggctcccctcgggcgaggggagctggcgccgaaggcgactgaggggagcatttgagcagaaagccttaccaatggacaccatcacacttaccggcgtacatgccaacggcacccacggtgtgctcgcctttgaacacgaacggccacaaaccttcgtcgtggacgtcaccctgcaccttgatctggtcgccgccggtcaatccgacgatctcaacgacaccatcgattacggccgtgtggccaaggatatcgcggctgtcatcgaaggccctcatgtggacctgatcgagcgtctggcccaacgtatcgcggataagatccttgccgatgcgccggccgtcgcctccatcgacgtcaccgtgcacaagcctcatgcgcccatcgtcgtggcttttgcagatgtatcggtctccatctcgcgcgtgcgtgccaccgataatggacgcactgctgaagagcatgccatccataacgcggtggtggccttgggcggcaatgtgggcgaggtggaatccaccttgcgagcctccgttcgggagattgacgcgctgctcggcacacaggtgaccggtatttcgccgctttaccgcacggccgcgtggggcatggctgacggtacgccggatttcctgaacgccgtggtggagcttgaaaccacaatgggcagccacgaattgctcgccgcgttgcaaagcatcgaggcgaaccatgggcgaattcgtgagaatcattgggattccaggccgttggacttggacattatcgactttgatggcatcaccagcgcggatccggatctggcattgccccatccgcgtgcttggcagcgcgcgtttgtgctggctccctgggcggcgctgaatccgaacgccaaacttgccggagcccatgaggggcctgtagccgatttgctggccgccgcaccggaccgtaacgccgtgcagctcgagagcgaagactggatgctcggcgggcatgcagtcaagcaagaatcagcgtcggagtcggaacccgtctcacgcaaggcgattatttcgctggattccacctcgcaggatgtcgaacggctgttccgcgaaaccatcgtttccatcgacagtgttcctggcaatcaggtacagggcatctcgccgctctaccatgtcagccatttcgacggcccggacgcgatgagcgcggtcatccaaatcgaaaccaagttgccgcccgccgacctgattgccgtattgggcagcatcgaaagtgttcatgatctggcagtcgatcttgaccttgtcgacatggaaggcgtgacttccgacgagcccaactgcagcattccttggccgtcggcccgtaaccatgcgtcggtattggcaccttggctggatatggacccgaatgctactctgggcggcgacccggtggccttccttttggccatggcaccggatgccggacaggtcggattgctatcggacaactggatactgtcgaacagttgagctgatggcagaaccagttacgaacggtaggctagaaaccagacggtgacggaccagtctccggcctcgaacagccgggcacggcagtgacgaaaaccaaatcaagatgaacagcccaggcgcgagggccgttcgcaaacagcaaacagcaacgcaacgataaggaggccggacatgaaaacacggcgaacaccatggtggcagtatgtgatcggtgccgtgctgggcctgttggcgggtatcggtctggcctcctacggcgaaagctcgggactgtcgctgattggtgcgccttggattgtgaccggattgctggccgtgctgggcgttatcgtgctgatcttggccctgcaagtgcataaatacgcgaatatcgaccccaagaagcgtccgcatagcttcatcaatcccactatcgcggtgtatacgctggtgctggcaaaggcactgggattggcgggcgcaacgctcgccggctggtatggcggtcagatcgtgatgagcctgagccatatcgaggcggatttctatgcacacgccgtcaccgagtgcgcaatcgcggccgtggtgtgcatcgccgacatgatcatcggcattatcggcgaatggttgtgccagctaccgccgaacgaaggccccgaaaacccgaaaatcaaggaagccaagcgccgtagcgacatagcccaggcctacaaaagataatccgtgataagccccctctgacgagggggccgtaggcgtagccgactgggggagagaagaagaaaaaaccacaccatcggccaagccgattaccactattcctgcggcacgcgaaccatagcttcctgagcgatggccgccaccaagtcgccattctgcgcatacactttggcgatgccgagtccgcgtccgtgcgcggcgatgggcgtatcctgcacatataaatgccactcgttgatatcgatatcctgataccaccacatcgaatggtcgatggacgcataggaaatgcccggtgtggaaatcgacagtccggcgcggcgcagcaccggctccatcatcacctgatcgcagccgagtgccagcatcgcacgatgcatgacctgcggcacatcgacgtggccatcggccttcatccacaccatctgcttgccggaatcatgctcggcggaatccttgtccgcgcgcagcatcacggtcggcgtcacgtggcggatatcgaatggcgatttctcgacatagaaattggcgaacggcgacttttcggcgaacggctgcatgagttccttggcggaagtcaacgtttcgggatcgggcaggttttccggcatcggatcggcaaattccacaccctcctgaccggtctcctggaaggaggcgatggccgtgagaatcgacccctcggcttgggtgacgttgacccgacgagcggagaacgagcggccgtcgcgaaggttctcgacgtcaaacagcaggtcttgacgaatatcgccggcggcaatgaaatagccatgcaccgaatgcggcaggcgtgaagggcccacggttttggacgcggcgatcaccgactgggcgatgacctggccaccgtagacgcggccagtggggaagtacatactctcgccattgatgtatgtgtgattgcggtaagcggaaggctcgcccaacttcagcaccttcaccagatggtccaatggagttacggtggttgcctgagccatggcgttcctcgattcctgttctgctgtgttcgatattcggttatcgtattccaacctatggttggcagtctatccggtgggggttaagagttccgggagcgaaatgtaacgagactgtttggaaggtaaacggttggttatgcggtgcgttgccgctacgttgctgctgcactgccggtgtgttgccggtgcgttgccgtaggtgactgtgggattttatgggatgcggggcggggcagtcatggggggcaattatgagaaagccgcccctgagggacggctttcgacgtataaagctcgttgtggcactaatgccggcgtatctcagccgcgcacaagcttcttgtgcaggcggtgcgggcgggccgcatcctcaccgagtcgggccaccttgttctcctggtaggcctggaagttgccttcgaaccagtaccacttggccgggttgtcgtcgtcgccttcccacgcgaggatatgcgtggcgacacggtcgaggaaccaacggtcgtgggaaatcaccacagcgcagcccgggaactcgagcagcgcgttttcgagggattccagggtctcgacgtccagatcgttggtgggctcgtcgagcagcagcaggttgccgccctgcttcagggtcagggccaggttcagacggttgcgttcaccaccggacagcacgccggtcagcttctgctggtcggcgcccttgaagccgaagctggccacgtaggcgcgggtcggcacttccacgccggccacctcgatgaagtcgaggccgccggacacggcctcccacaggttcttgttcgggtccaggccttcacggttctggtccacgtagctgattttgacggtgtcgccgatcttcagctcgccgctggtcagcggttccaggcccacgatggtcttgaacagcgtggacttacccacgccgttcgggccgatcacgccgacgatgccgttgcgcggcagcgtgaaggacaggtcgtcgatgagcacgcgatcgccgaaggccttgtggatgtggttggcttccagcacggtggagcccaggcgcgggccggccggaatctgaatctcggagaagtcgagcttcttgttgttgcgtgcctcgttttccatctggtcgtaacgttccagacgggccttgttcttggcctgacgggccttgggggaggagcgcacccagtcgagctcgttcttcagtcgcttggcgagcttggcgtccttggctccctggatctccagacgcttggccttggtctccaagtaggtggagtagttgcccttgtacgggtacaggtggccgcggtcgacctcgcagatccattcggccacattgtccatgaagtaacgatcgtgggtgacggcaatgacggcacccttgtactggtgcaggaactgttccagccacaggatggactcggcgtccaggtggttggtgggctcgtcgagcagcagcagatcaggggcctcaagcagcagcttgcacagggccacacggcggcgctcgccaccggagcacacgttgaccggggtgtccggatcggggcactgcagggcgtccatcgcctgctcaagctgggagtcgaggtcccaaccgtcggcggcgtcgatctcggtctgcagcttgcccatctcttccatcagggcgtcgaagtcggcgtccgggttggccatttcttcaccgatctcgttgaatcgggcgaccttctcggcaatcgggccgaacgccatcttgatgttctcgcccacggtcttggtgtcatccagcggcggctcctgctgcaggatgccgaccgtgaagcccggggtcagcgtggcctcgccgttgctcacggtctccaggccggccataatcttcagcagggtggacttacccatgccgttcgggcccacgacgccgatcttcgcgccgggcaggaagctcagggtcacgtcatcgagaatcacgcggtcgccgtaagacttgcgggccttgatcatctgaaatacgaattctgccatataagtgtcttatcctgtcttatcgttgcaatttcaacgttttgccgggcttggattccgtgatgacacactgtggaacgatgcgtccggtttcgggggttccgaacgacccgtttgatgccgcccgtccctggattttccgtgtcatcgcggcgcctcggtcccaagcaaaagcaccttgtggattatcccatatcccgtctacacgatgcaatggggttctggcgggcgggaattagcgattcggtcatcgggaggagacgtggaaggtggcggcgatgccgtcattgccgacgccggtaaatgggcgctgggcatgccctgtttcctgagcgagagcccggccctgtatcgtctggcgatttgtcgatcgttgcgattccggcgttctgtcgggctttcatttcgaaatgacgcatctggaatagtgcggccgtctttggtgctcctctcttcagtgatccgccgaggttacgcccatggctgaacgcccggaatgtcccgcgaaatccggcgagacggtctaggccgcggatgtaccgtgaatggcgcataggcgtgtcggtcgccgcaatcatggcaatgagaggaaaccccgttatggatcatgcatcccgatctcagcatcagactcaggccgatgcgtcttcgatctcttcaacgaatccgacggcctcgtcgccgctgcccacccaagcgccgccgtggggcgcgctgtgggtgatggccctgggattggccatgatcgtgctcgacagctcgatcgtcaatgtctccatccccaccatcatcgacgacatcggcattaacctgaccgacgcccagtgggtcacctcgctctacaacatcgtgcttgccgcgttgttgctgcctttcggcaagttgggcgatgccagggggcgcaaactggtgtttcaagtcggtaccgtgatcttcgtggcgagttcgatgctcgccgccgcctcgcagggtgcggggatgctgcttgccgcccgtgtgctgcagggcatcggaggtgcgatgatcatgccgaacaccctgtccacggtgtccgccctattccgtggcaagtaccgtgccgtggcgttcggcgtctggggtgcggtgatgagttcggccgccgcgcttggtccgctgctcggtggcgtgttcaccgagaccttgggatggcgttggatcttcctggtgaacctgccgttgggcatcgcggtctttgtgtcggccatcttcctggtgccgcagaccggtgggaacgcctcggtcgccggcgccgcggatgccgcacgggatgcccgatcccatcgtgtcggtgtggatatcccgggcgtggtgttgtctgccctgacctcggccctgttggtgttcggtcttatcgaaggcgagacctacggttggtggaagcagacctcaacgcagttgaagctcggcgggttgagctggaatcgtgactggttgtcgccggtgccgatctgcctgatcgccggcgcgcttctgatggccgtcttcatcgtcttcgaatccgcgcggggcaaagccggtcggccggtcatgctggacatgaccctgtttcgcatcaagacgttctcgtggggtaatctggcggccgcggccatcgccgccggcgagttcgcgctggtgttcatgctgccgctgtacctcatcaacgcccgcgggctcaacacgctgcaggccggtgcgatgctggccgtgatgggcttggggtccatcgtcgcaggtgcgcaggcccatgtcatggccgccaggctctccccggccggcgtgattcaactcggtcttgtgatcgagatcatcgccgtcgccttggtcgcggtccttatgcctgtggggttctctgtgtggtggcagcttgttcccatggccgcgtacggtctgggtctgggcttcgcctccgcgcagctgaccagcgtggtgctctccgaagtgccgatcatgcagtccggcgaagggtcggccacccagtccacggttcgacagctcggcaccgccgtcggttcggccatctccggcgcgtcgttggccatggccgtcaacggaacattgccggcgcggctcgaatccctcgggctgcccgccaaggtcggcgacggtctggcccaggcggtcagtggttcggcgggtggagtgatcggcgtgttccgcagcggtgatggaccggcggcccgattcggcgacgaggcgccgaagattgccgatgcgatgacttcagggttcatcgaaggaggtcagtggacgcttctggtcgccggcatcatgctgttcatcggtttgctggcctcggtggccgtgcgtcgtgccgcgttgtcgcacaacgtgcgttgatgcatgacggctacggtcttatggggagtgcggccgtgcgcggtcgaacggtgtggtccgcataccgtccaccgcgcctgcggtcggttcgccggtggaaggaacgatgtatcagacggcgtgtcgtaatccgatgatgctgtaacatatcctcttgtgcctcagcgaggcacgcacggccccgtagctcagttggttagagcgccgccctgtcacggcggaggtcaccggttcaagtccggccggggtcgccaccaaactcccgatgcatgtcgggagtttttttgtttcctgccgttcttcgatgccatccgcaaggacggtgaaagtgattgcatccgattcgacacgccgtccgcaccgatgccggcgttaaggggcgcccgtttgcaacgggtgaaatgcatgaggaagcgcatcggtggaatgttcgcgacgcatgacgaaccacggaaaaaccgcggtgggaggtcatggcggctcgctactattttcgctatctcgcatgttacgaaagtcttcaaggagtaagccatgaccacgctcgccattgatatcggaggaaccaagatcgccgccgccgtctgcgatgaaaatgacagcatcatccagcgctggcgcgtccccacgccgatggacgccgacgccatcaaccagcacatcgccgaggtgtaccgcgaggctgtggccgccgggcacaccgatatcgaggccgtcggcatctccgccgccggcaatgtgagcgcggatcgcaagacgctcaccttctccgccaacattccggcatggatcaactacgatctgtccgagcacgtcggcgcgctgatcgaccatgccgtgccggtcatcgtcgaaaacgacgccaactgcgccggatggggcgaattcgtgcacggcgccggccagggtagctccaacatggtcgcgctgaccgtgggcaccggcctcggcggtgccatcgtgatcaacggccagctctaccgcggctccttcggcatggccgccgagctcggccacctgccgatggtcccggacggcgaccactgcggctgcggcctgcgcggctgcgccgaacgttacacttcgggaacctcgctggagaacttcgccaagtccgccgtgcgccgtcgtcctcaggacgccaagcgtcttctggaactgtgcggcggcgacatcaccaaactggaggggccgatggtgtcccaagcggctcaggaaggtgacgtactcggcctgtatgcgttcggcaagatcggtgaatggctcggccgcacgatggccgccgtttccgccgtgctcgacccggacctgttcgtgatcggcggcggcgtggtggccgtcggcgacatcctgctggagccggcccgctacaactaccagcgcttcttggaaggcagcgcctaccgcggccatgccaagatcgtcgcggccactgcgggccaggatgccggtctgatcggcgcggccaacctggctctgcgctgacgatgtcgctccggcaacgggacgttagtctaatggtgagtcatggccggtgccatggctcactgccgcgctgatagtgcggtcgatgagtttccgctgcctgaccatggaatcgaattccgggttctcagcgattttctcgtactcgtgttcggtggtcacgccggcgatttcggcgataatctcctcataggacgtttcgacggttcgatgcacgccggtgacgtgcccctgacgtatcacgacaatgcggtcggataccgcgaacacatccggcagatcgtggcagaccatcaccacggaccggccttcggagcgcagtc

SEQ ID NO: 206 - DNA, 24125 bp, Unknown
  R101_18m  MAG No. k141_18679
cctaacggtatccgttcagtgagtcagactcacttcttggacatctcggtgtaggtcgggaggttctgccaatcgaaggcgtagccggacttcacgctgagggaagccgcgccggaggcgttggagtagtacagcgggatggccggaaggtcgttgaggaggatttcctcagcctgctggtacagcttgttggcgtcatcgacggacttggcggcggcggcctgcttgcacatgtcgtcgaaggccgggttcttgtagtcaccgtcgttggagccgttgccgtcagcagcagcggtggagtacagctgccacaggtagttctcggcggacgggtagtcaggctgccagccggtacggaaggcgcccttcatctgacggttggtgacggcgtcacggaactcctggaaggtcgggatcgggttggtggccgcgtcgatgcccaagttgttcttgagctggttcacgacggcgtcgtaaagcggcttggcaccaccatcggcgttgtaggagaaggtgagctggccgtcgtacttggagatggcgtcagccttggcccacagttccttggccttggaggcgttgaacttcaggttgtcggcacccttgagggagtcggagtagcccggggtcttcggggaggtgaactcggtggcggcggcggcgttaccgttgagcaccttgtcgatgagctggtcacggttgatggccatggagatggcctgacgacgcagctgaccttcctcgtcgttcttgaagtgatcaagggaggacgggatggtgaaggtctggatgacggagccgacctcggagtaagcctggaccttcttgtcggtcttgaaggtcttggtgaaggcggccgggacggattccatcacgtcgaggttgccggcctgaatgtcacggtaagcggcggagtcgtcggtgtagaccttgaaggtcacgccgtcgttcttgggctgctcgttacccttgtagtcagggttcttgacgagggcgatttccttgttgtgatcccagtggtccagcttgtacgggccgttgccgatcggcttctggccgaaggccttcgggtccttgtagaaggactcgggcagcggggcgaaggccgagtagccgaccttaatcgggaacacggagtcggactggttcaggtcgacggtgaaggtggtgtcgtccacgaccttgaggccggagagctgctcgtcacccttgaggccatccttctgcagatcgtcatagccggcgatggtggagaagaaggaggagcacttctgggcgttcttggcgttggccacgtaggaccaggccttggtgaaggactcagcggtcaccggagtgccgtcggtgaacttccagccagacttgatcttgatggtgtactgggtggcgtcatcgttcggggtgatggactcggccacttcgttggaagccttgccgtccttgtcgaaggagaccagacgggagaacagcaggtcgaccagcttgccgccgccggtttcgttggtgttgcccgggatcagcgggttctgcggttcggagttgtacgcagtgatgatgttggagccagcggtgttaccggaggcagcgttgctgttggagccgccgcaggcgctcagcagcatggccacggagcaagccatggcagcgaaagcaagagctttcttcttcatatgatttctcctattcattaggttgcaggacgtctcagccccgcctcatgcaaacggggctggattccccgtcaccgtgagacttgcatctcacgatgtctcgaacaatccaaccccgttgctgattacctgtcatttttgcgcacttgggagacaagcagtgtattttttgttacacccatgtaaaattcaggggttcttgccggctaggttcagtctttgctgagtttgttaaccaatgtccacatagtggtcatgcccgcggaaaggcctgtccgtaacggttcttgagctgctcgatggagacgtgcgtatagcgttgtgtagttttcaaggaggaatgcccgagcatctcctgcacctccctcaaatcggctcccccatccaacatgtgcgtggctgccgaatgacgcaacgcatgggggctgatgtccggcacgccggcctctcgggccgctctgtgcacgatgtcacgggctatgcgttggtcgatacggccgcctcgtgcgccgaggaacagggcgttggcagcacgggacttgactgcatccgttgccgtacgggccagtaccggccgcccctgttccagccaagtctccagcgcacgctgggcgggtagtccgaacggcaccacgcgttgcttgttgcctttgccggtgactttgatggtgcgattggagaagtcgatgtcggcgatatccatcgacaccagttcggcgacacggatgccggtggcatacagcagttcgagaatcgcggcgttgcgctgcgattcggcggtgactcgggcgttgtcgcgcttgtctgcacgggcgggtgcctcactgcggtttacggtatcggccgacttatcagctgtcttgccgctgccgctgccggacgcggctgccgctcccccatcgtccttgtactggtttgttgcaacggcatgttcagcgacatccaataattgctcggcctgggattcggtgagcaccgcgggcagcgtgctgggaatcgagggagtcatcagtgtggcggccgggtcggtggtggtcagcccatgctcataggcccacgcgaagaacccgcgcacggccacggttttgcgggccatgctgctgcgggcgtgatcgcgcgattccaccgccatccagctgcgcagatcatccagcgtgatctcgttcagatcggtcacgccgcgcagctcgaacaggtgcaggcatgccgtgagatccgcgcgatacgctttgagcgtattcgctgacaggccgcggttggacttcagataggagacgaaggagtcgatatcgccgtcgagctgcgtagatgacactctcgttctcctccgaattctttatggccttgggttacggccggggtggcgtgttacgccgctccggcacgggtttcaatgtggcaatctgttcctgatggatggtcacgttctgggccgggcgcgaaccattggcggcggcgtcacgcaccatctccaacgtgtatccatcccaggaaaccacatgccccacatagtcgcggaacttcatacggtggtcgaccgggtcaatgccgtcggtgatgcgcaccaccacgcgggcaccggccggaatctgccttggtaacgtcatacgtcatcatccccttaaccatccgccgcattcacttcgatgcgtttcccgaaaaacggtacagactaccttactcctttgggtctttcgaacagcggagccacacggtcttctcacgaaaacaagcgggaacttcatccccctcgcgcagccttcttcgtgacgggcggcgaggggaacctgcacacgggctacatggcggggcgcagttacatggcggggcgcagttggacgatggcctgacgcggatggatgaaaccggtgatggcttctccccggcgtgcggagaacagcaaggtctgctgccagccggcttcggggacggcgagctcgcgttccgggaatccggcggcagttgtgccggcttgctgcgcggtggccgtaccagcttgtgcagcggtgatgccggctcgcgtcacggcggccttgtaccggcggaaggggtcgccttcggcgaagaatcccatcacatcctgctcgccgtcggcaccagcgtgcagttggtcggccatatcggtcagacgtgccgccatgcggcgcagcagcacttcgacgttcagcgagtcttcctcgaccatcgcgcgcgtgcggtccgggtcggtcagggacacgcgggtcatgtccctccagcagccggcagccagcgcggcggcgatgttgcggtccgggttggcgaccagttcgttgatcagcgcggtggacaccacatgcggcatgtgggagatcatcgccgcggccttgtcatgcgtttcgtcgtccacgacgatgacgcggttgccgacgtccttggtgatcatcgcggcgacgtcgaggaagcggcggtagtccgtggactcgtccacggtgatggcccatagggcaccgtcgtacagatgcgggtcggcggcctgccagccggacagttcgttgccggccatcggatgggcgccgacatagcacttccccagcgcggcagccttgacctgatcgcggaccatgcccttgactgagcccacgtcggtgagcgtggtgttcggatggtcgcccataagcggggctagggcggcgaggattgagggcatcgccttgagcggattgcacagcacgaccacatccggctcggcatccatgagttcggagagcgtgctcttgcagaaaatgccatcggcttcggcctgggcgtaggggtgcgagcgatggttccacgcgatgacgcgtacgccgcgctcggtcaggcggcgtgcgagcgagccgccaatcaatccgagtccgacgattccgactgtgtctaccacagcagttccttccttgctccctcggcgtactgccagccttccgacgcgcgattggtgatgtggacgccgccctcgggcagcatccaggcgtcgaccggcgggttcgggcgttcgcggcgtgggtagacggccagggtttttgcccagtcgccgtgtccggcgatctcttccagtgcggtgcggaatcttggctcccagggggcggcgtcaagggtggcgatgaagctgtaggttccgtcgtggcctttgatcgggcgcgagatgaagctggtcatgttcagccccgcatcacgcaggacgtccagcaggtcggcgagcacgccggggccggtgaccagcgggatgaaggtgatgatggtttcgaagtcgccggcgtcattgcggtgggcgcgggcgttgaattcctggaccacatcacgcggggcgatgacaaggaattcggtgtgcgcgccatcgaaatcctgcacatgttcggcgagggtgtcgagatcgtagagttcgccgcagatgctggggccaagcgccacgcggccgggcttcaggtcgcggcaggcggcggcgttggaggatgcgggttcgggctgcaaatggtgttcggtgatgaaccgggtgcattgggccaggccgtgcgggtgggcgctgacggggttgccggtgcagtcgcagatgctgtggccgcgcacggtgaaggcgttgaaggccacgtccacactgatccgggcgaagccggccgcgtcgggggcgtcgatcagcgcgtcgagattcgggaccacatagccttcgacgttgttttcccatgcgatgacgccccagccttggcgcgactgtacggcctgcatgatcgcgggcacgtcgggcagggcggtgaggtcgaagtcgccgagtgtggcgaactggtcggcggccgtcattgccgcctgatgggtgaaggtgccttccgggcccaagtaaaacagtttcatgcgtgccataaggttctatggtagcggccgtaatcccctacgctcgccgatacgcgacgcattcgcggaaatgtgccgccatatatagttacgcgcgcgattcagaatgagtgggaataacgaaccagcgggcgggaagaatgagcaggacgacttggaccagtatcaggccgtacagccagatgtagccggcatgctgggagaagaacggcatgtcgccttggaatccggcgacgatgaccgccttgccggatgtggtggtcagtgccatgccccatgcggtcagcgaggaggcgatgaggtgcagggccagtccgaccgcgcccatgcgcgaacgggcgcaccatgtcgatagggcgatcagcagaaatgccagcaccagaccatacggaatactcagttctgcacccatacggtgggcgaacgtgcccacaaaggcggaagccacgcccgccgcaatcgtgatcaacgatttgaccagcgcgttctggcgatacgaccacggacgcagttcagtagtgctcttcacagtcatgcgtttcagtataggtggggatatgacttggcgaggaataaacttggctcccctcagagaggggagccagagagaatggtcggctacagtcgcaccagatcacttaccctgctgggcggcgttctggcggcgctgcttggcgcgccacttgtaccagtcctcacggccgaggatgatcttgcgcacgcggatggactccggggtgacttccacgcactcgtcctcgttggcgaagtccagggactcctcaaggctcatcttgatcggcggggtcagggtttcgagcacgtcagcggtggaggaacgcatgttggtcatgtgcttggccagcgtgatgttcacatccagctcgtcgggcttgttgttcacgcccacgacctgaccctcgtacaccggggactgcggttcgacgaagaagttgccacgggcctgcagacgctgcatggcatacggagtggccacaccctgacgatcggaaaccatggaaccgttctgacgaatggtgatggcaccagcccacggagcatagccagcggagatggaggaggaaatgccggtgccgcgagtggcggacagcagagccgtgcggaagccgatcagaccacgggacggcacggtgaactgcaggcggacccaaccggagccgtggttggtcatgccgtccatacggcccttacggtcggccatgagctgggtgacggtacccatgtactcttccggcacgtcgatggtggtgttttccatcggctcgttgaccacaccgtcgatcttcttggtgaccacctgcgggcggccgacggtcagctcgtagccttcgcggcgcatctgctcggcgagcacggccagcgccagctcgccacggccctggacctcccaggcgtcggggcggtcggtgggcaacaccttgatggagacgttgccgatgagctcgcgatccagacggtccttgatcatgcgggcggtgagcttgtggtccttgccctcggtgccggccagcggggagtcgttggtgccgaaggtcatggagatggccggatcgtccacgtggatgagcggcagcggcttcgggtcgttggggtcgacgatggtctcgccgatcatgatgtcgttgacgccggcgacggccacgatgtcgccggggcccgcggactcgaccggggtgcgctcgaggccctgcgtgcgcagcagttcggagacgcggaagttctcgagggagccgtccacacgggacaggccgtaggtcttgcccttctcaagggtgccgttgtagatacggaccaaaccgagtcggccgaggaagtcggaggagtcgatgttggccacgtgagcctgcagcggggcgccttcctcgtattcgggggccgggatggtggagatgatggcctcgaacagcggctcgaggttgtcgttgtccggcaggccaccgtcggcgggctggttcacggaggcgtagccggccttggcggcgcagtagatgaccggcatctccagcagctggtcgaggttcaggtcgatgccctcgtgctgcacgtcgtcggccaggccgagcagcaggtcggaggtttcgccgacgacctcttcgatacgggcgtcagggcggtccaccttgttcacgcacaggatgaccggcagcttggcttcgagggccttgcgcagcacgaatcgggtctgcggcagcgggccttcggaggcgtccacgagcagcacgacgccgtcgaccatggagatgccgcgctcgacctcgccgccgaagtcggcgtggccgggggtgtcgatgatgttgagggtgatgccctccgggtggccgtacttggcggccagcggaccggtgtattccacggccgtgttcttggcgaggatggtgatacccttctcgcgttccagatcgttggaatccatcacacgatccggcacttcctcacgctcggaaaacacgtgcgactgctgaagcatggcattgaccagggtggtcttgccgtgatcgacgtgagccacaatcgccacattacggatatctccacgaaccgccatcgaaacctctcttaatactgattttcttgcgtaatcgttcggtacttgcgttctcgagtacttgctcttggatatcaacctgtacctacacacaaaccgtcacgatgttactggcacaccttgacacacaacgggcccggctttctgagaattagtcacatgtcatctggcttgcgagactttttgtattccacactctcgactcccctccctgaggggagctgtcgccgtgggcaactgaggggcgccaagtgtatcccctgaatctcccctgaatcatccctgagtacagcaccgtcatgggtagttactgagtaacctgatatccaacgatagttactcagtaaccttcgcccaaggcaaaccgtctatgcaaaggggatgcggtatggcaatcagagaagcgctattagcactgttggagcgaggcccggccagcgcctatcagcttaagaaggacttcgaccgcaccatcggtctgacttggccgctcaatatggggcaagtttccactacgctgcagcggttgaaccgcgacgggcttattgaagagaccgcgccgactactagcggatccaatgatgtcggcaccgcagcggccgcaccattatggcgattgaccaattccggcgcccaagagcttgaccgatggtggcgctcccccattaccccggaacaacgcggacgcgacgaactggtgatgaagctggccgtcgccgtggaaatacccggcctcgatgtttccgaactcatccaacaccaacgccacgctttgcagcaactgctgcacgacatcacccgactgcgccggcaaacaccgcccaccgaactcgccacacgtctagtactcgaccaccatattttcatcactgaagcggaattgcgctggctcgataccgtggatgagacccagctgcgagcacaactggcgcagcaccccgtttcggcacctctcacggcaagctcagccgcactcaccgccaccattcaatagtgcataggagcacatcatgacttctcccgttctttcttctctcccgcaatcttccccatgcgcgctggaattacacgacgtcactcgcgttcacggcaaagatgcacgtcgtgtcaccgcgctcagtcacgccaatctcacgcttcgcccgggtgaattcgtggccatcatgggccccagtggttccggcaaatccactttgctcaatcttgcgggcgggctcgatgtgcccacgcaggggcacgtgctggtcgaaggccgcgatctggccacactgtcagtggccgaacgcgcggccatccgccgcaaatcgataggctacgtgtttcaggatttcaatctgctgccttccctgagcgcagccgagaacgtgtcgttccccttggaattggatggctggaatccccgcaaggcacgtgaggccgcgatgcaatccctcaatgaagtgggggtagccgatatggctgatcgccgacctgaagacatgtccggcggccaggcgcaacgtgtggcgattgcccgcgcactggtcggcccacgccgtctactactggccgacgagccgaccggagctctggattccaatgccggcatgacgattctcgaagtgttgcgcacccgcgcagatcgcggcgcggccgtactgctggtcactcatgagcctcgcttcgccgcctgggccgaccgcacggtgtttttgaaggacggctgtatcatcgatgaaaccggctccagcaatatggatgatttgctcaaccttgaggaaaggggagcatgatggcacgcgcagccctcaataatcttgccaatgccaccgtcggtcgctctgcccaaattccccatgccgctaggccaagccttggcgcacgttgcaaccggtatcgggccgcgctgcgactcggctggcgcgacgcactacggcacaaggcccgcaccctactgtccttgctgctggtaatgctgccaatcgccgcaatggtggcctccatcggtatgaccaccaccataccgcccaccagatcgcgtgcgctggcgacaatcccggctgatacgcaggcggtcatcaccgccaccgccaggccccgcaccggccaaccgttccggcagtcacccgaaagcggcggcacgtggcaggacgatccctcccagcagccggcctcggccgccgagcttgcgaagattctgccgcaacaggatcggctgctcccgtattggcagtcgtccgaactcatcgccatcaccggcaccgcgttgcaacccggcgaacagaccaaggctgggatcgacgtgaaaagcgggaacgacattgatctgaacgcggcctccaccgcgaccatgaccgaggcttcacctgaggcattgcaacgaatgttgccgaagctggtcaagggttcggcgccgcagaataatacgcagattgtcatcagccgcacattggcggataatctcggcgcttctctcggtagcacggtgacgttcgtcgctccgccgttcgatggctggatgagcctggacgggcgcatcggcgaggcggtggccgacactcagcgtgcttggacagtcagcgggctgaccgatgaatccgaagccgcggcatggggcttggaaggctggatgtcagccatattggaatctgatggcgtcggtgtggatggccattatttggtggtcggtccagagccggtcacgtgggcgcacacccgcagcatgaacctgttgcaggccatcgtcatttcccgccatgtgctgactgacggctatccgcccgcatcgcagctctacccgatgcagatcgatgcggctaccatgttgaaccacatggtcactgtggtcatcaccatgctggtgggtatgttgctggtactgtttctggtcacgcccgcgtttacggtgtcggcagatcagtcacgtcgtgtgcttgggctcgcggccgcatccggtgctgcaccacgtgacctcagtcgaatcatttcctcgcaaggcctcgttatcggcgccatcggtggcgtgctgggctcggcattgggattcgcgcttaccttggcggccggccctgcgataggcgcattgcgcggatccacgccgctggagatcctgcacggattctcgtggaactcgctgccgatgggtattgtcacggcaatcatcattggatttgccgcgacgattgcgccggctcggcatgtggcgcgtatgcatccagtcgatgcgttgaaggattgcccgacaagagaggaaatcggctacggtgaatccgcgaatggcgtggatacgaagcttcgccgtaatcctttgagactgctccgtgttgcggttggtccgattctggtcttggtctccatcgtatgcgccgcgctcagtctgacattgccattgcccacgctggccgatcacaatccgggcgcggttccggccggaaccgaaacgcatatggctctgcttgttgccacgattttgttggctgtcatagggctttcgttgtcgattcgcacttttgcacggtggtgcggcaaagcgggttcccaactgaacatcggcgcacgcctggcactcagggatgcagccgagcatcatcgacggttcgttccggcggcatgcgcggtgctgattaccatgtgcatcgcctcgtacacactggtaatcaccggctccatggtggcggaccagcgaaattccacgatgacgatgacgtatggaccgtcggggatggccattggggccgacgtgcatgtcagcaatgagttcgaccgtgctgtggtgtcggatgcgatacaccggcttggcaaagagacgccgatacacgctcattacccggtgtacaccgaggatgtcaagcgatggtcaaagctcaatgatacgaccgaagtcgattccgacaagttgaacgccgaacacggctacatgtatgccgctgcattgctcccggccggtcacacttgtgataacccaacgatccaagagcaaccggacacgtccacatgggtgggccaggatgccgcttcggccctgtatccaaacgttccgatacgttgtgtgccgatagaccgatcccatcagccaacgtattcgaatatactgccgagtttccgcggcgtgaatctcattatggatggcaatgcgatgcgtttgtccggcttcccgaacgcggatgaggcggcacaggtgcttgatgcgggcggtgtggtggtcggcgatgccggcacaatcgacgcgggaggtatggtgcgtgtggccatttcgccgaatccggcaattgcaaacgaatctcaggccacacatatcgagaagcgcaaggccatctacgtgcgcggcgcgtacccgctggtgatgggcccggcaacagcacaggcgctcggcatcaaacaattgcagtatctgggtgagtatctagacttcgccggtggcaactcccccgttaccgtaaagaaggcctcagcttatgcaatcgaaaatctgccgctggcatccacgagcactgacgggaatcgcctgccgtggggtgacaatatggcattggtgcccattggcctgttggcattgctggcactgatggccacgctcgtttcattgctgctggctcgcacgcaggcccagcgcgacatggccacgatggtcgccgtgggcgcgccaccccgattcctcagacgttacggcctgacgcaggctgcggtgattctgctggccggcgcgccagtgggcgtggtatccggcgtggcgttgggatggctgcatgtggcatggaaccgcaggatcggtgtggacggtcattggctggaaaccgtgccgatctggggattgcaggcggcgctggcattcggcgtagtggtaaccggactgctggtggcgtggctggtcacaaaaccaccgcgcaatctcacccgtcgttccctcgattgatcagtgacatacggcaacccttgccgtgtcattcgggagctataagacaaaaagtggcccacacattggtgtgggccactttagtagcgaaggctgaagtgcaatcagtcttcgagattgaggcctttgcgctcgggcaagcagagggctgctatgcaggcgaggatgaaggcggcggcgaagatgatgaaggccacggccttgttgccgccggacagggtcaggaaccacggcatgaggagcggcgcgatgatggcggcgatgcggcccaccgcggcggcggcaccggcggccgcgccacgcaggcgggtcgggtagatttccggggtcacggcgtacaacacgccccacgcaccgaggttggaggcggacagcaacatgccgaacacgagcacgagggccactgatccggcctgcgagaacgcgaaggcggccacggcggagacggccagaaagatgcttagcgtcttgcggcggccccagacctccaccagccaggcggccaggaagtaaccgggcagctgggcgatggagatggcgagcgtgtagccgaatgacttggtcagggagccgaactggtcggcgagcagcgacggcatccatgtgaacgcgccgtagtaggagaagttcacgaagaaccacgtggcccagatggcgatggtgcgggccaggcacttggagccgaacagctcgcgcgtcttgatcttcggcagcggcttgcccttgggagaggttaccggggccactcccccggcttcctcgaagtagcgcacggccttttcggcttcgtcttcgcgacccttggcttcgaggaatcgcacggattctgggatgtgcacacgggtgacaatcgcgtagagcagtggcagcgcgccgatggccagcgcccagcgccagccccagtcaccggtgttcgggatcacgaagtagccgattatggcggcgatgatccagccgacggcccagaacgattccagcagcacggtcatgcggccgcgctgtttggtcggcgaaaactcggagaccagcgtggaggcgaccggtagttccgcgcccaagcccagtccgatgatcagtcgggcgccgagcagcatgccgagcgaccaggacagcgccatggcgccgttggcgatgccgaagatgatcagcgtggcggtgaacacggttttgcggcccacgcggtcggcgatgaagccgcccaccgccgcgccgatggccatgccgacgaagccgatggacagcacccacgacttttcggtcggggtgaggttgaagtgcgggtcggctgcgatggcggcgaccacgaaggaaacgaggccgacgtccatggcgtcgaatgcccagccgatgccggaggcgacgaggagtttacggtgcgccttgttgaagggcagccggtcgaggcgctcgttgcgggtgagctgcgcgggttgcgctggagtggtggtgctcacgtcgtttcctttctggtaagtggcgtcagatttagtgtcgggtcaggtcggtgtaggactcttcgatggccaagctgatgcgttcgacttgttcgcgggtcagcggcttgcggaaggtcatgcgtaatgccgatttggcgatggacggttcgaggcccatcgccagcaacgtggcaggaatctcgtggcgcccgatggcgcaggccgagccggatgaggcagcgatgccgcgcgcgtccagatcgaccagcagcgcctcgccagtgacgccgggaaagacgaaggaggcgtgaccgggcagacggcgcacggggtcaccggtcaggtcggcgcggggcacgacccggcgaaccgcatcgatgagcatgtctcgggacgcgaccaattcacggtactgcgcctgcatgcgcgcattcgattcattgagtccgatggcgagcgccacggcaccggccacgttctgtgtgccggagcgcaggccgcgttcctgcccgccgccggacagcaccggttcgatgggcgtgcggccgcgtaccagcagtgcgcccagacctttgggcgtgccgaatttgtgtccggatacggacagagcgtccacatcccagtcacgaaaacgaatcggaatctggccggcggcctgtacggcgtccacatggatgggcacgccgtgcgcgtgggcgatgcggaccagttcctccacgggttccacggtgccgacctcgttgttggcaagtatggtggagaccatcgtggtacgttcgctggcctcgccgtcgagctcgcgttcaagtgcgtcgagatcgagatgtgcttgcgcatccacgggaatgcgcacgacttcgaaaccgaaccattcgtgcagccatgccgccgattgggccacggccgggtgctcgatagcggaaatgatgatgcgcgggcggctgcttgccagttgtttgccatcggtttcgtcgagtccgtagaccggccgcaagcccagtttgcgcatgcgcgccatggcgatgcctttgatggccagattgtccgattcggtgccgcctgaggtgaagatcacgtcatccggccggccgcccaatgccgcggcgaatgatgcgcgggccgcgtccagcgcgcgggccgcggttttaccgggctggtgcacactggccggattggcgtaggcctcagtcaggaacggggtcatggcctcgatgactgccgggctcactggttcggtggcggcggcgtccaggtacagttcgccgggttcaccggatgcgttgggggtatcggccatgactagttccaatccaatccaaggtcgatgctgcgcaccgagtgggtgagcgcgcccacggagatcacgtccacgccggtgacggccacggctggcactcgctccaggctcatgttgccgctggcttccacgatggccttgccgtcgatgagctccacgccgcgacgggtgtcgtcgagcgagaaattgtccagcatgatggtgtccgctccgccggcgagcacggcgggaatctggtcaaggcggtcgacttccacttcgatatgcgtggtgtggcccacctgttcgcgcacgtggcggatcgcgccggccaggtcgatgccgcgcgcggcgagcgccgccagatggttgtccttcatcatgaccgcgtcggacagtccgtagcgatggttgtggccgccgccgcagaccacggcgtatttttcgaacgggcgcaggccgggcgtggttttgcgcgtatcgacgatgcgggtgcgctcgtagcggcgcggccgggtgacgggtccgtcataatcgtcgccgtagatggcgttcaccgcgtccacgaaagcggcggtcatggtggcgatgccgctcatgcgctgggtgaagttgagggcgatgcgctcggcggtgagcaggtcgcgtaccggaccttccacggtggcgagtacctggccacgctggaatcgttcgccgtccttgatggcggcggtgacggtgacggccgggttctgcgcggcgaaggctgcggcgaacacgtcgatgccgctcatcacgccgttttcgcgcgcggtgaggtgggccgagccggtttcgtccgcggggatggtggtctcgcaggtgatgtcgccgtagggcgcgtcttcggcgagcgccgcttcgacggcgacgcggatgatgtgtgatgtgagcatgggtcagtccttgatgtaggcgacggagtgggcccagttgtcgactggctcgctgtagtcggtgcgggcgtgggcgcctctcgactcggtgcgggcgagcgcggcggtggcggccacatagcctacggtgagcatgttgcggttctccaaagcctcaacgctacttgcagcgccatcggcgtttatatcagcctgggcgtttgcggcggcgaggccttggccgagttcggcgatggcggttttcagtccggcctcgtcgcgcagtacgccgacgccatgccacatggtgttctggatgcgggtacggtcccagaccttgtcggcggcggtatcgtcagcagcagccgtagtggcaggagcggccagcgcgatcggcgcatggtcgaacacggcaccggtggcggagttcaggaacggttcgggtgcccagaccgcgtcgtcaccgtccgcgacggcggcaagaccggcgcggcgtccgtagacaagtccttcgagcagcgagttggaggcaaggcggttggagcccatgacaccggtgcgggcgcattcgccggccgcgtacaggccgggaatggaggtccgggcgtccagatcggtgcgaatgcctcccatgtagtagtgcgcggcgggcgccaccgggatcggctccttgctccagtcgaagccaagcgaacgcgtataggcatcgatggtcgggaatcggtgggccaggaagctggctaggtcggggttctcgcgggtcatcggcgagacgtcgagcatcacgggcttgccaccttgcgcctgcatcacgcggaagttctcgcgggccacgacgtcgcgcggtgcgagttcggcgcgcggatcgatgtccttcatataccggtggccgtgttcgtccagcagcaccgcgccttcgccgcgcacggcttcggagacgaggaagtgctcgcccacggccatggcggtgggatggaactggtagaactccagatcggcgacctgggcgcccgcacgccatgcggcggcgaggccgtccgcggtggcgaccggcggattggtggtgtacgggtacatacgacccgcgccaccggtggccaagatcacccggccggcggccagatccttgtcctgcccgtcgatcagcaggcggacgccggcgatgtggccgtcccgcacgatgagatctttgaggaaggcgttctcgatgatgtggatgcgcgggttcttgcacaccatggcggagacgtccagttcaagcactttgccggtggcatctcccccggcatgcaccacgcgggcgcgcgaatgagccgcttccaggccgcgcagcatgtgtccctgcgcgtcgcggtcgaagtggacgccggccgcggcgaactcgcggacgcgctccgcaccctcacgggtgaggatgtccacggccttcgggtcgcacaggccatggcccgcggccatggtgtcggcggcgtgcagcttcgggtcgtcgtcggagaaaatggccgcggcgatgccgccctgcgcatgataggtgttcgattccaccagtccggccttggttaccaaggtcacgtcgtgtccggtgccggccacggccagtgccgcggacagtccggcgacgcctgcgcccacgacgacgatttcagtgttgctcattgtgttgctttcctctgtttttgcgtcatctgctcccctcagtccgctacgcggacagctcccctcatgtacgaggggcgccagggacggatcacgggtgaacgcgcagcatgcgctccagtgccaccttggcttcgcgggcggtgtcttcgtccacggtgatgcgattgaccacgttgccggcttcgaggttctccaaagcccaagccaggtaagccgggtggatgcggtacatcgtggagcaggggcagaccaccgggtccaggcagaacacggtcttgtccgggtactgcgcggccagacggttcaccaggttgatttcggtgcccacggcaatggcggatccggcgggtgcgttggcgatctccttgacgatgtacgcggtggagccagtgccgtcggcggcgtcgaccacctgcatcgagcactcggggtgcacgatcaccttgacgcccgggtatgccttgcgggcacgttcgacctgttcgacggtgaaacgctggtgcacggagcagaagcccttccacagaatcatcttggcgcgggcgtagtcggccggatcggcggcgccgccctgtgccttgaacgggtcccacagcggcatctcgctcagcggaatgcccatcgcgcgggcggtgttgcggcccagatgctggtccgggaagaacagcacgcgcttgccgcgggcgaacgcccattccagcacggcgtgcgcattggacgaggtgcatacgatgccgccgttgcgtccgcagaacgccttcagcgcggcggatgagttcatgtaggtgaccgggatgatctgctgcaagccatcggagtccggctgggtgccgcagatctcgccgagctggtcccagcattcctggacctggtcgatgttggccatatcggccatcgagcagcctgcggacaggttgggcagggtcacgctctgttcgggcgtggagaggatgtcggcggtttcggccatgaagtgcacgccgcagaacacgatgtggtcggcgtccgggcgttcggtggcgttcttggccagctggaaggagtcgcccacgaaatcggcgtgcttgatgatctcgtcacgctggtagaagtggcccagaatcaacagtttggagccgagacgctgcttggcgtcggagatgcgctgctgcagttcctcgtcggaggccttgcggtactcgtccggcagcacctgctggcgcggcgcgttggcgggcagacggtcgagcatcgaggcaccgggaccgtagctgggtgtggtggtgtcgaagtgccatgggtcctgggtcagtcctgcatcgcaggtgctttgcgcgcccagcttggcgatgatctcgtcaacggacggcgcagtggatagtgcggtcatagcggttcctttcctatatacgtctgtgatgccggcccgaagcgggtcggcgggaaaaatcagatgcgcgcggatgggatcagcgcgtcgagagcgtcttcacgctcgccttgtctggacagttccacgatgtcgtcgccatcggattcgtggggcgtgccattctcgacaggtcgtttggggatgtagcggtagacggtggccggtcgttggcggccttcgcgcaccttctccccggtgtcttcaagatctcccgaggcaagcattttgcggcggaagttcgccaagtcgagggtttcgccgccaatcgcctcatagacgccgtgcagttggcgcagggtgaacgtggggccgagcagtcgggtggccacgtcggagtattcgattttggagcgcaggcggagcagcgcgtagtcgatgatctggcgatggtcgaacgccagctcgggcagttcgtcttcggggaaccatcgtacgttgtcaccgtcctcgaagcccgcggcctcggtctggccgacgagcgcccagtacacgacggataccatgggcaatccgccatgggaccgggtcgggcctccaaaggtgtacagctgttcgaggtatcgcgggtgcaggtctgtggtcgattcgagggccgcgtaggcggactgttccaacgaccgatcggagcgcaggtcgccgccgggcaacgcccagcagcccaggaacggctgacggacgcgcttgaccaggggcagccagagacgggaatgggccgagttcgcggcgttgccggaatcggcggcactgttgccggtatcgcctttcgggccgagtgccagaatcaccactgacacgccgacctgtggcggtgcgctgcggcgctcggacacattgccgaatcccatgccatgcctctttccataccggttgttctccccgcattgagagcatagcactacttatagtcacaatgaccataaatcacatattggatggtctagcgcacgaatattggtcaggtagcgggccccaatcgctacgaaatcacgtccgtatcccccgatttcgactgtgtcatttcggcgacggacgggaggaacggcgctagggagggtagttcgtcgagactcttcaggcccatttggtcgaggaaggattcggaggtgaccaaaagggctgcgcgggattcggggtccacgccgtcttccttgataaggccgcgtaccgtgagcgagcgaatcacgccatcggagttgacaccgcggatcgcggccacttgggctcgggtgacgggctggcgataggccacgatggcaagcgcctccagtgcggcctgacttagtctcgcagtctggccgtcggtgacgaatgatgagacgaccggctcgaacgcggcgcgactggcgaactgccagccacgagcggtgcggcgtagttcgaagccgcgcgggcggatgccacgggattcatcgccctcatagtcatcgtgcagggcttgcaatgcctcttcgactgtgttgcggtccaatgccaaaatgcgggccagctcggtggcggtctgcggctggtcggcgaccatcagaatcgcttccagacatgcgggcagcccgccgggaaaatcgtctaccgtgaaatccacgtattcggggcgcgtctcctccactcccctcacctcggcctttgcggattcagccgtcgattcggcatccgccatgtgctcggttgcattcgttgcgtcaatccgttcagtcaccagtcgccgtccttacgcaaaatcgccttcggaaatgttcacgtcgttcatcgtttcgtctacgccggatacccacctcaggtgcagttcggcaaacggaccatcttgctgatactgcagcacaccttgtttgaagaacacgagcacggccatgaaccgagccaccatctcaatacgagaagtgcagtcccgggtcaattcgctgaacgacatcgactggtcgcccttggattccagtgccgcgatcagccggtcgcgcaccaccagcgattgggcccgcagatcgaccagcggcacgtgcagctggtggatcgatacttcggaggcgggcgcgttggcgatgacctgggcggccagttgggcgagttcgagcggggtcagcgtccataccagctcaggcaacatggcggcaatgccctcgtccatggccgccggatgcgggaatcggccggcattggcggcgatacgcgcccggaaatcaccggcggcctgcttgtaggcgcggtattggaggagtcgggcgaacagcaaatcgcgttcgcgcagcgcctcgagactttgctcgtcgtactggttgtcttcgccgccgggcagaatcgccacgcttttggcctcgaccaaaatagaggcgatgtcgagaaaggcgctggcctcatccatgtttttcgtgaagtcgagcccgcgcacgtatgtcaggaattcctcggtgatcgaggagagggaaacttcggtcagctcgagtttgttgttggcgatcatgccgagcaaggcatcgaacggaccggaatagacttcgaggttgacccggaagccggaagtggcggattcctccgtgctgatttcggcttccgcggagctcccctcagtctcgctacgcgagccagcttccctcagagaggggagccgagaaagggaagtctcattcatcgtttatcgaaacaatcgttacgccacgatgccgcgagcaatgagctcacgtgccacctcacggtattcctttgatgtcttgtgctcaggggcatagaccaccacgggcgcggcggcaaccgtggaatcgggcagtttgatggagcgggagatgaacgtgtggaacaccttttcgctgaacgcctcgtaaatgcgctggcagacctcttcgcagtgcagtgtcttggtgtacatggtgatgagcacgccatccacttccaatgcgggattgatgcgggactgcactttttcgatggactgcataagtagggccacgccacgcaaggcgaagaattcggcggccacgggaatgatcacgccatcagctgcggcaagcgcgttcacggtgagcaggccgagcgatggctggcagtcgacgatgatgagatcgtattccgacttgagcttgcgcagcacactgttcaggatctgctcccggcccacttctgtgaccagttggacctcggcggcggacaaatcgatgttcgccggaatcacatcgatgttctcgaatgcggtgtgctgcaccacatcatgtgggtccacggaaatatcgaacagcgcggtgtaaatcgtgttctccacggtattcgcgttgacgcccagtcccacagtggcggcgccctgcggatcgaaatcgacgataagcacgcggcggccatactgggccaacgcaccggcgatattgatggagctggtggtcttacctacgccgcccttctggttgcacatggcaatgacacgcgccggaccgtgctgttgcagcggttcgggtgcggggaaggtttcgtattcacgtccaagcaaatcggtaggcatactgtctaccttatcaacatccgggttcgctgggggtgcaacgacatacgttcccgccataggcagcgttccttgacggaatgcgctgtctttatcgcggatgtctcgccagtcgtccatcgttgccctcgccccctttgccgggaatacctgctcgcctatcctaatgtactcgccgggctcgcctcggaacaccgttttgcagcgggcattccagtgttccgaggtttatggatctcgtctcgtactatgtcgatgcgcttactcggtgcgcagtgcggtggccgggtcttgcttggctgccttgcgcgagggaatcaggccgccgatcagcgtgagcaccacgcttaggatcaccagcaccacgccgccggtcaccggcagggcggcattgacgtccgcattgccgatgaagtgatgcaacacggcgttgatcggaatatcgagcagcacggtcaagcccacgcccaacaggccggagcataggccgatgatgccggtctccgcattgaacacctgggacacgttgtgcttcgaggcacccattgcgcgtaggatgccgatttccttggtgcgctccagcaccgaaatgtaggtgatgatgccgatcatgatcgaggaaacaatcaacgagacggacacgaacgcgataagcacgtaggaaatcacgttgacgatggtggtcaccgagctcatcatgagccccacataatccgtgtaggtgatcttgtctttcttcgagacggtgttgttgtagtcggtaatcgcgtcggcgatgtggtccttgtcttcgaagctgtcggcgtagacgttgatcgagctgggcgcgtcacgactcaccacaccgaatgcggcgaggttgtcgtcgtaggtgccggtcgacacgtactggtcgtagatcgcgacaagcacgtcgttcgaagccgtggcgatatacgagtcgaaactgtcggcgagctgctgttcgctcatcgcggccatcgcgtcggcctgatcgcc

SEQ ID NO: 207 - DNA, 10067 bp, Unknown
  R101_18m  MAG No. k141_18793
atattcatggtgtcccacaccgtccgacgggtgtcgacagccgcgatattcttcatgtcgtggataccccgaaaatcggtatacccggttcgggcattcataattgtgttgccgatggaccacccatggcctttgctccaatctccgaatctcttgaactgaccatcccagaaatccctcatcaccgtgttgtttgggttagaatgagcggcattcgcggcctgtttcgcatcctgccaaccggaaacgaaacgattccacgccctgccactgttcttcaacgaatgctggataccgactacggtgttatgcattccctcacctagagcattccatccctgccttatcatccccttggcaaagactttcgcgccgtcatgattcaaagtatccaacacatgctcccgcgtttgcattgtccactcgcttccgtcacttagtagcttatggaatccgcgattttcagaagcttcttaccccacttagtcggctgccacagtcttgcgcgtaaagctttttgtaaattgcgttaatcaccaccatgtctctcctcaataaaaaaatcatttgtgatgttctatacgtttgaggcccgtgccggcgtcgatctgagtaaggctgagattgatgtcaataagcataatcgaaccatcgacatcacgctgccagcacctactatctagtcagtttcggtggacccggattcattgagattctttgatgaagaatcttcactatttaacggcaatgaagtttcagatacagcagatgccttgaaagacgccaaaacgcagtcggaaaagaaactgaataagggggatttgttgaagaatgctaatgagcaggcaaaaacggtgattgaaaagatgtattcatctattgcagaaatggactcgtatacggtgaatatccacacaacagagccgaaaaaaatagtctacattgttgccaagcgctgttactcatgctatgaggcatgagtaacagcgcttttttatggtatagcaaggtcaattatttatcgtcaaaaatcagttgggaactgatttattcttggaggttatgcagtcgcgtcataggaaaaacgaggaattgagaggactcttatgatttcctatgtacgaaacgtgggtaagacggtacttgcagcggtcgttagtttggtgttcatcgttggcgctgcaggctgcggtaacactcaaaaggatgacggtccagactatgcggatgatgaggcgatgtccataatcgcaaaagcgtatcagaagcgttcggatgttctcgaccagtacgagcagaagaaagataccgattccgtcaagcatgtcaaagatgctgttcaggctgaaatcgataacgatgagcctttgaaagagcggcagttcaaggattcgaagttgcaggagaaagtcattacttatatcaacctgcttgaggattcacaaaaagtgaacgaggattattcctatctcagctcggattacagcaccgaatggactaaggtatacgataagcgttcggcattgctcaaggattttgtcgataattacaagctcacggtagacagtaaatatcaagatccattgaatgatattgttgccaacggttcgtccgtcaagaaaaagacggaaacggaagacgcgctgaataatctgattgcctctgcgacttttgagaaaactgatgacggatatggctactacgcatactcagccgtcatcgaaaacatcagcggaatcgatttcggtaccgtcaacttgatattggctctatacgatgccgatggcgtgaaggctgccgaagtatacgccagtactaatgcttggcctgcaggagaaaaggtaaaattcgaaaccggtagcgatgccgatgcggcgcaggtgaaggcatctgtcgaccactatgaagtagacgattaagcgtatccatacacaacagatagtgatggcccacagggaatcttcctgtgggccatcactattaaacgtcaatatcagtcaacttacgccgagaactgtttgccgaattccgagaagagctggcggcgggcgaagacgagcaggccgagcagcaccagcagggagaccagcccgctgaccatcaccagcacatcccacggagcccagccgagcggaatgaacgtcagcggcagtaggccagcgacgatgtcgaatgccagatatttggcgtattggtcgatggccttggcccgcagcacgataagcagtaccacgtcgaagacaagtgagaccagacacatgatcggtatgacgaacatggtgacgacatgattcatcgtcgccacaaaccagaccagcgcaatcgccagcatgatatagaaatatcgaaacatgaggcgaagcggccgcggcgcgtgcagaatcgcactgttgatgaacagcacgctgatgatcagcgcggccgccgatgcactggcaatcggtatcggccacgaaaacagatagctgaagaagccatgcagcagcagaatcgcgccggttacaaacgtgatgatctccaccgccaaacgcctcggacgcagatagatctgttgcgcggggaatgcggcgggagaggcctcgccgtgcaattcgttctgacagagtgggcaacgggccatatcgccggtgaaatcgacgttgcaggcatcgcaatgcttcatgccgacgctcctttctccacatgcgcgccggcgatgttcatacggccgctgatgccctgcgcggcgagaatccgacacaggttcttgatgacgttcagatcatggtagacggtggagatgccgatgctcaggtcgtcgccaaacgagcagaccgtgaaattcaggctggccggtgtggtgaggaagctcaccgaacgcacatggctcgcgagtcgttcgtccaaggtgactcggccaaggttcgagacggtggtcgtggtctcgcggtcggcgatgaaccgggccagctccagcacccagtccttggcaggggagggcgcgagacgcagcgccggattcttttccagcgcaatcatgcggttcatatgcgattcgacgcgctcgcgactggtggcatggtcgagctgctcctgcacatggcgggcgatgtcggccaacggctcatcggtcagcaatccacccataccgttgccgtgcgcggtgcgggcggcggactgctggccgtcaccggtcgcgtctgggcccgttgcggaagttttcgcggagtcctcatcggcttcgataccggccggcgtgtacgccacgtaagtcatgccgtagaagttgcgcacggtctccgacctgaagaaggcgcgcaagtcgaccggaatatccacgcgaatcgcgcgattgcgggcgcgcgagggcatgacgtcgcgaatcgcgcacagtatcgcggcgatgaggtaggaggtgaggctcactccgcactgatgcgctgcaccaagcaccttgctggcgctgacgtgatattccatgaacgtgggcgcgtcccggtcgatggggccggccagccggtagatcttcgtgccgggcgcggcaccggccttgtctttctcgtagtatttgtcgaagctgttttcggctttgtcgctgtccgagccgtcgtaatccgaaggcacgcccggcacgtcgtaccgctcggcgatgtaggcgtgcaacagtgacttgaacaggttgatggcgccgcgaccgtccgaaatgatgtgcgagacctcgagattgacacgattgcggaaatagcttacgcggaacagcatgcttttgggcccgtaatgcagtcgcgagcatatcggcagatgttccggctccaccagcggccggccgtccgactgttcgaggtaatgccagaacatgccgttgagcaggtgcacgttgaagctcgggaactgggcgatggcatggtcgagcgcgtgctgcaggatgtccggggcgatgtcgtccgccagctcggccgaatagcggaacacggtctgcgaggagcggccagcctgggaggagtagaacttgccgatgttgtctagtcggtaccaagtacgtcttgccatgcgtcgcctccctccggtgcgttggcggtggtgccggtgccgggagccggcaccagcggtgtgtcgtcgaggaaatgctcgatgatccggtaagtggtggacaccagccctacggccgacgtgttgagcagataaccgtggatgccgtcgtgaatccggtaacaggagacgttgtcgttcaccaattgcagacgacgggcgtacgcttcgtcctcgtctctgagcgggcagtattcggcggacaacaccagcgtgcgcggctgattgctcaggtcatgcgcggtgagcggcgcgaaatacggattggtcaggtcggccacggacgaacggtacatgtcgatgtagtcggccatgtcctgtgcggtgaggatgtagtcggtgccgttggtccgcaccgattcgaacgggctggtctcgggattgtagtcgttgccgaccaccgggtaaagcagcatctgcgtgcgcggcatgaactcgccgcggtcgcgggccatgagcgagacggcggccgcaagattgccgcccgcgctgtcgccaaacagcacgatgctgtcgggatccggtgctgggattgtcgcagatatatcgcccccgccggtgggggctgtcggcgcagccgactgggggtggtcaacatcaacagaaccacccaccccagaaatcggcaattccccagcaaacagctgccgggctacctcatagcaatcctcaacagcagtagggaagcggtattcaggagccagccggtactcgaccgagatcacacggcgttgcagacgtacggccatatgcgcgcaagcctgcgtgtacaggttgatgccgcctgtggtccaaccgccaccgtggaaaaacaggatcgtgccacgcggcgtgactgagggaagttccgtgttggcattgccgggaataccgtcggtgttgccgctcgacgtgctttccttgatgggtattttgggtaggactttgggtaatacggcgggcagaatcgcggatattgccgaggccactggcgtgccattggcggaagattcctccagggcttcgggcaggggcgctccataggcgaccagcggcgtgaacactcgcaatggtacggcatatccatccgccataggcgcgaaggcgtcctcgacacggcatttcggattggcgggtgcctgcttggcgataagctcttccgccacgcgctgcaatttgtacgacttgcccgcgttgggcttgatgtagctggcggccttcatcgcggcgaacaatgcctcgttgatcggcatgacgacaggtcctttcagcggcggattcggtagtgcgaacaccccaaccttagcccatgaccggcatgaacaaaaaagggaaggaacccgagagttccttccctgtgtgccgtatcagacgcgatacgcgccgattatcaggcggcgaagtattccacgccggcctcgaagatcggctggtacttgttgccgggcacgttgacgtacaggccgttgccggaacgctccgagtggcccatcttgccgaacacgcggccgtccgggctggtgatgccctcgatggcgagcagcgagccgttcgggttcacatccagatccatgccgggggtgccggtctcgtccacgtactgcgtggcgatctggccgttggccctgagctgggcgagtacctcgtcggaggccacgaagcggccctcgccgtgggagatggccacggtgtggatgtcgccgaccgaagtcttggacagccacggggagagatcggaggccacgcgcgtgcggaccagtcggctctggtggcggccgatggtgttgaaggtcagcgtcgggcaggcgtcggtcatcggcacgatgtcgccgtacggcaccagacccagcttgacgagcgcctggaagccgttgcagatgccgagcatcaggccgtcgcggttcttcaacaggtcacgcacggcctcggtgacggccggcgcgcggaagaacgcggtgatgaacttggcggaaccgtccggctcgtcgccgccggagaagccgcccgggatcatcacgatctggctcttgttgatctcatcgaccaacgcctgcgtggattcggcgacggcggccggtgtcaggttgttgatgatcagcgtggtcacgtcggcgccggcgcgctcgaaggcggcggcggaatcatactcgcagttgttgcccgggaacaccgggatcaccacatgcggcttggccacggaagagccgacgtacacggtcttcttcggcgcgtggaagtcgatggtctcgacggtcgcgcccttgtcctcgcccttggaacggtacgggaacacggattcgatgccggactcccaagcttcctgcacagcgttcaggtccagcgtctcgccggcggccttgaacacgtactcggaggtggtggtgccgatttcgccgatctcgaccaaattggagacggccggaagcttggcatcgtccgccagctcgacgatgaacgaaccatatgccggggtgaacaggtcgtccacggcgatgctgtcgttcagagtcacgccgatgcggttgccgagcgtcatcttgaacagggcttcggcggtggcgccatagcccggcgtagagacggccagggcatcgtggaagtcggtgagctcctcgatcacggagaacacctcaagcagcgcatccttgtccggggtcagaccgtcggccaggtagcgcggcgcgatgcgcacgatacggtgatcggcgtccttgaattcaggggaggtggcgcgcttcatgttgcccacggccacggcgaaggagatcagcgtcggcggcacgtcgagatcctcgaacgaaccggacatggagtccttgccgccgatggcgccggcgcccaggtccacttgggccatcagtgcgccgagcacggcggccgccggcttgccccagcgttccggctcgtcgcgcagcttctcgaagtactcctggaagctcaggtaggccttctcatgctcgaagccggccgcgaccagcttggccagcgactcgaccacggacaggtaggcgccggtgaactggttcttggacatgatgtacgggttgaagccccacgccatcgccgaagcggtggtggtctcgccgaacaccggcagcttggcgaccatggccatgttcggggtgagctgacgcttgccgccgaacggcatgagcacggtgcccgcgccgatggtggagtcgaagcgctccgaaaggcccttgttggaggccacgttgatgtcggtgaccagcttgttcatacgctcggccagcgtgccctcgccccacggggtctcgtaggactgctgtgcctcgacatgcacggtctggtgcttggaagcgccgttggaggccaggaactcacgggacagattcacgatcttgtcgccgttccaggtcatcaccatgcgcgggtcctcggtcacggtggcgatcaccgtggcttcgaggttctcttcgcgggcgtagatcaggaactcgtccacgtcctcggcggccacgtccacggccatgcgctcctgggattcggagatggccagctcggtgccgtccaggccctcgtatttcttgggcacggtgttgaggtccacgaacaggccgtcggccaactcgccgaccgccacggacacgccacccgcgccgaagtcgttgcagcgcttgatcagacggcaggcatcgccgcggcggaacagacgctgcagcttgcgctccaccggagcgttgcccttctgcacttcggcgccgtcgagttcgagcgattccacgttatgcgccttggacgaaccggtggcgccaccgatgccgtcacggccggtgcggccgcccagcaggatgatcttgtcgccgggggccggggtttcgcggcgcacatggtcggccggagtggcggccacgaccgcacccacctccatgcgcttggccacgtagccggggtggtagatctcgtcgacctgaccggtggccagaccgatctggttgccgtaggagctgtagccggcggcggcggtggtcacgagcttgcgctgggggagcttgccttccagcgtctcggagaccggcacggtcgggtccgcggcgccagtgacgcgcatcgcctgatacacgtaggaacggccggacagaggatcgcggatgcagccgccgatgcaggtggccgcgccaccaaacggttcgatttcggtggggtggttgtgggtctcgttcttgaacaggaacagccagtcctcgtcgtggccgttcacgtcaaccttgaccttgacggtgcaggcgttgatttcctcggactcgtcaaggccggtcaggacaccgttcttcttgagccacttggcgccgatagtgcccatgtccatgaggcagacgggcttggtgtcgcggccgagctcgtggcgcatcgccagataacgctcgaaggcggccttgacggtggcgtcatcgatggtcacttcgtccagctcggtgccgaacgtggtgtgacggcagtggtcggaccagtaggtgtcgatcaccttgatctcggtgatggtgggttcgcggccctcctcgctgaagtacttctggcagaattcgaggtcggccaggtccatggccagaccgcgctcgtcgatgaacttctggccggcttcggcgtccatctcgttgaaaccggcgatggtctcgaccttgccgggcaccggcacctgggtcttcagggtttccttggtctccaggctggcctcgcgggcctcgaccgggttgatcacgtaatgcttgatggtgtccacgtcggcgtcggtcagttcgccttccagcgcgtacagcttggcggagcggaccgtcgggcgctcgccctgggagatgagctggatgcattcggcggcggagtcggcgcgctggtcgaactggccgggcaggaactcggtggcgaagaccttggcgccggcgaagtcgggcaggtcgtaggccacattgtccacctggggttcgctgaacacggtgggcacggtctggtcgaacagttcctgggagatgccttcgacgtcatagcggttcacgatgcgcagggccttgaggccgttcagtccgaggattgtgcgcagttcgcccgcaagctgctgggcttcgacatcaaagccgggcttcttttccacgtacacgcgaaaaaccatggaaatcctttcttgaaattattgaaaaattgaagaagtgcggtaaaagaacttggctcccctctctgaggggagctgtcagcggagctgactgaggggagttgtcatggcggtgaacgtcttgacctcccctcagtcgcctatcggcgacagctcccctcagagaggggagccagctgtatgttctgctacctgcacctaaacgacttattcggcgacttcgatgccttcggacttggcgagttcggcgaggcgctcctcgatctcttcgtaggccgggatgatgctgccgagaccacggcggaacaggtccttgtcaaggtgctcgaccttgccggagtggtccttctggtcccacagacggcaggaatccggggtgatctcgtcggccaacagcagcgtgccgtcggtggcgcggcccatttcgatcttgaagtcgaccagcttgacgtcgatcttggcgaagatctcgatcagggcctcgttgatcttgcgggccagcggggcgatctcggcgagatcctcgcgagtgcatacgtcgagggccaccaggtcatcgtcgttgacgaacggatcgtgcagatcgtcggtcttcaggaagtactcaagcaccggctccttgagcggcaggccttcctccacgcccagacgggagcagaagtggccggcggccacgttgcgcagcacgatctccaacgggaacatgttcaccttgcgtaccagctggccggtgtcgttcactcgcttgatgagatggctgtcgatgccgcgcttcttgagcaggtcgaagatgatggtggtgatgaggttgttcaggcggcccttgccggtgaagtcttccttcttttcaccatcgccagcggtggcggtgttcttgtattcgacccacagaacc

SEQ ID NO: 208 - DNA, 6293 bp, Unknown
  R101_18m  MAG No. k141_18955
cctcgccttcggcatcgtcggtagtggtgcgcaggccgaggcgtatggtggcctcgtaggttttgtcatgcgccacgatggcgttgagcagtcgcgtggcgtggccgaaggcgatgaccagcgtgccagtggccatggggtcaagggtgccggcgtgaccgaccttcttgatgtgcaacgcgccgcgcacggcggcgacggcgtcgaaactggtcacgccttgcggcttgtcgatgatgagtaggccgctgggtgttgtatgaagcacactactcctcgtcggactcgaactcatcgccctcggcttcggcctcgtcgtcgtgcttgtacggatcggcgtcgccggcgtactgggcggtggcgcgggcgcgggcgagttcttcgtcacgcttcttggccacggcgagaatgtcttcgatctcgtgagcctcgccgggcacttcatcgaacacgaattggagctgcggagtcaggcgcaggccagccttgtggcccaccagagaacgcaggtgacccttggcctgatcgagcgcctgctgggcgcgcttgcgttcgccttcctcgtggccttcgtggccgagctgggtccagtagaccttggcgatctgcagatcgttggtcacacgaacttcggtgacggtgatgctggcgagtcgcttgtcatgcagttcgcgctcaatggaggaggcgacgacacgctgaatcaaggccgcaatacgtgcggcgcgcgggttggttcctgccataggaatttccttttctagacttgagccccctctgacgaggggctgccgaacgcagtgaggctgggggagagaaaatcatggaactaccatgtctctcccccagtcagcctgcggctgacagcccactcgtcagagagggcttaacaatgactacttgcgctcgacttcctgcatctcgaaggtctcgatgatgtcgccgagttcaatgtcgttgaaggtgccgaggttgataccagcctcgtagccttccttgacggactgaacgtcgtccttgaagcgacgcagcgaggagatctcgaggtcgttgaccgtggccacgccgttgcgcaggatacggcacttcgtaccacgcttgacctcgccgtcctgcaccatgacgccggcgatgttgccgaacttggaggagcggaagatctcgcggatctcggagtgagaggtgacgacctcttcgtattccggcttgagcatgcccttgagggacgcctcgatgtcttcgatcgcacggtagatgaccgagtagtacttgatctccacgccctcgcgctcggcgaggtccgccacctgacggttcgggcgcacgttgaagccgatgataacggccttgtcgaccgtggccaggttgacatcattctgggtgattgcaccgacgccgcggtggatgacctggatgccgacctcgtcggatacctcgatcttcatcaaggaatcctcgagcgcctcgaccgaaccggacgaatcgcccttgatgacaatattgagcatgtcgatctcggactcggcgaacttcttcttgaagtcctcgagggagacgaccttgcgacgcttggccagctgggcggcacgctcggtggcctgacgcttctcggcgatctggcgagcggcacgatcatcggaggcgaccaggaagaggtcaccggcggtcggcacggaggtcaagcccagcacctgaacaggtgtggacggaccggccgcttccatcggctgaccgttctcgtcgagcatggcacgcacgcggccgtacgaagtgccggccacgatggcatcgcccacgtggagcgtaccctgctgaaccagcacggtggccacggcaccacgacccttgtcgagtcgggcttcgacggtggcaccacgggcgtccatgtcggggttggcgcggaggtccagctcagcgtcagccgtgagcagcacggcttcgagcagcttgtcgacgtgcaggttctgcttggcggagatgtcgacgaacatggtgtcgccaccatactcttcagggaccaggccgaactcggtgagctggccgcggaccttctccgggttggcaccgggcacatcgatcttgttgacggccacgacgatcggcaccttggcggcctgagcgtggttgatggcctcaacggtctggggcatcacaccatcgtcggcggcgaccacgaggatcgcgacgtcggtgagctcggcaccacgggcacgcatggcggtgaacgcctcgtggccaggggtatcgaggaaggtgatcttgcgcggttcgccttcaaggttcacggtgacctggtaggcaccgatgcgctgggtaatgccgccggcctcacgtgcaatgacgttggtcttgcggatggtatccagcagtcgtgtcttaccgtggtcgacgtggcccatgacggtgacgaccggcgggcgaggcttgagatcctcgtcatcctgcagttcttcctcgtcaaggttgatgtcgaactgctggagcagttccttgtcttcctcttctgcggagacgagctggatgttccagccgatctcttcgcccagaatctggaaggtctcctcatccaaggactgggtggcggtagccatctgacccaggtggaagagcacggtgaccagcgcggcctggttgacgttgatcttctccgccagatcggccagggaagcgccctgacgcagacggatggtctgaccgttgccgttggggatgcgaacgccgccgatggtcggtgccttcagctcctcatactcatggcgctttgccaggcggttcttacgggccttcgaggacttaccgccctgacgtccgaatgcacctgcggcaccgccgcgaccgccgcgaccgccgccacgtgcgggaccgttgctcggtgcgccgccgccctggaagttattgccgccgccttggcccccacggaagccgccgcgtgcgccgccctgaccggcaccctgggagccgccgccctgacccggacggttgtggccccactggccgggacgaggaccgccctgaccaccttggcccggacgaccgccacggaagccgcggccctgcccctggccttggccgggacggcccggacgaccgccacgaccgctatcagcagtcggacgagccatcggatgcggacgcggaatatcacccggcgtcggggtgtgcataccctgcttgcgggagaacgggttgttgcccgggcgcgggccctgagcgtgcgggcgcggaatcgcgtttgaagcggcattgccgccattggcaccggcgccgccctgagcgtgcgggcgcggagccgaagcattgtcgcggttgttctgatgctgccccggctggccattgttcggacggccctggttgttacgacgatcgttgttacggcgatcgttcgggcgactctgacgaccgttctcgcggccttcgcgattatcgcgaccattctcacggttgtcgtgctgaccgtggcggccgggggtcggcatgccggggcgtgcgccgccctgcggacgcggtgtcggtgcgcccggagtcggagcctgctgatgtgccgaggcgggcgatgcctgacgtgcgggagcggccggagtcggtgcggaagatgaagtggaagccggggccgaaggtgcggccgggcggcgctgctgcacgggcttggcagcaggcttttgtacggaagatgcgggcttggaatcgcccttggcgttgtccttggcgaactctgccttcagacgccgggctaccggcggttcaatcgtagaagaagcggacttgacgaattctcccatgtccttaagcttctcaagcacggttttgctatcgacattcaaaaccttagccagttcgtatacgcgtggtttcgccactaattactcctattctgtgaccacgcgcgtgcatgggcgtggtcagttggtgatgacggcaagcctaccctgtctcatcgtgcgaccatgatcgtgttacctcgtctctggtgtgggcgatttcgcgcacactgcaccagcccacatacgccaatcaagcatactcatagcgctggatagcgcagacgcagcgagccgcgccattgctgacgcggctcgtatcaggaaataatgcgccctgaagatcattcgccttcgagcccggcggcctattcggcttccggagcagcagcctcggccgcagcctgggcggccttttcggcggcgaccttcttggcatgggcctcggcggattcgatgccgatcttccagccggtcagcttggctgccagtcgtgcgttctggccttccttgccgatggccagggatagctggtcgtcgtggatgaaggcgatggcggtcttgttcttctcgctgatcacctgtacgccggtggccacagccggggacagcgcggctgccacgaacttggccggatcgtcggagtagtcgacgatgtcgatcttctccgggccaaggttctccataacggcacgcacgcgagcgccgccggggccgatcagcgcacccttcgggttcacgccatcggtgttggccttgaccgcgatcttggtgcgggcgccggcctcacgagcgatggccatgatggacacggcaccggagaccagttccggcacttcacgctcgaacagcttgcggaccagctccgggtgggagcgggacaccacgatttccgggcccttgatgccacgggccacgttcaccacgtacacgcggatgcgttcgccgtggcggtaacgttcgccgggcacctgctcacggcgaggcagaatggcttcgacatcgcccatcgcgacatgcacgttggaggggtcggaagcatcctgttggatgatgccggtgatgagcttgcccttctgaccggagaacgcgccgaataccttctcatcttcggcgcggcggaacagctgggtgatgacctggcgtgcagtggcggcggcgagacggccgaagtcacgcggggtgtcgtcgtattcctcgcccagcttgggagcggggtgcgggtcgtcctcggtgggctcgaccgggatttcgtcggcggcccagacggtgaagttgccggaacgttcgtcaagctccacacgcgcgtgcctggcggcgtgcggggtcttgaggtaggcgaggcgcagggcctctgccagcgcatcatccagggttccggggtcgattccttgctcggcggcgagcttgtgtattcctgtcaggtccagttccatcgatccgtacctcctatgaagttatgtggcgcatggcctatgagtggtcacagttagctattagtgtaggtttccatgcagacacgcttctcttcaggacggtttacccggcgcttggcatccgcactatgcgcgagcgcgatgctgtgttcgctttcggcgtgttcgatgccgcgactggccggacgggccgaggcggaagctcaaatgagcccttgcgagaaagcgatgacgttggcggactacgccacccatccggctgaaggcacgccgttattggagcagtatgccaccggcctggccgctcccctgacttggattgacgttgccgggtattgttcgggtcgttttgccgagggaacgttacgtgacgcgcagaccaagcaatggctggcttttctggccgataaattcgggcagtccgcgcctgaggtgacgccggcgcgtcttgatggcgtcacgtccgccaacgttgaccgatcggtattggatgcgatggccgtggccgaggatcgcgccggattcgctatcgaggtcttggccgcacgaggacagaccgctggggctacgttggcgttgagcgatatgcataagaccgccgggcagcagctggtgtcgctggcgaacggcaattttgatgattccggcgcacagtccagttcttccggccagagcgacccccgccaaaaggtctatgccatcgaccaactactggccaaccccaccaccatcgccgacaaggcaagcggccagaccgtaccgaccgccgccgccatcgaaatggactgcgcccgcgcgcagatcaaggccgtgaccgaatcgaaatcttccaccgagagcgatacgctgctcatcctcgccgcactggccgccaagcacgcctacaccgcgttccaacttggctacccagcgactgacgccgcattgttcgagtagacacacactcctcacgaagccgatgcgaacttgttggatgctagtgggcaagtcgagttgaggcacgttccaccaatgtgaaatcggtggtgtacgtacgggccgggcctgagtatccttcgatgcggtcgataagcatgtcaacggcatgcttggcataatc
